United States Patent Application Publication US 2021/0260178 A1 - sequence listing, part 5

SEQ ID NO: 6928 - RNA, 1813 nt, Artificial Sequence
  mRNA product Design b-4 comprising derived and/or modified sequence from LASV(Nig08-A19;Clade III)__ADU56618__GPCstabilized (opt6)
gggagagucccgcagucggcguccagcggcucugcuuguucgugugugugucguugcaggccuuauucaagcuuaccaugggucaaauaguaacauucuuccaagaagucccccacguuauagaagaaguaaugaacauagucuuaauagcauuaucaauacuagccauccuuaaaggacuauacaauauagcaaccugcggacuuauuggccuaguaacauuucuacucuuaucaggaagaucaugcuccaugacuuauaaaggaguauacgaacuucaaacacuagaacuuaacaugaauacuuuaaauaugacaaugccauuaucaugcaccaaaaacaacucacaccauuacaucaugguuggcaacgaaacaggauuagaacuaacuuuaacaaacacaucauuacuacaucacaaauucugcaaucuaagcgacgcacauaagaaaaaucuauacgaccacacacuaaugucaauaauaucaacauuucaucuaucaauaccaaacuucaaucaauacgaagcaaugagcugugauuucaacggaggaaaaauaacaguccaauacaaccuaucacacucuuacgcaauagacgcagcaaaccacugcggaacagucgcuaaugggguacuacaaaccuucaugagaauggcauggggcggcucauacaucgcacuugauagcggauguggcaaaugggauugcauuaugacaucauaccaauaccuaauaauccaaaauacaacgugggaagaccacugccaauucaguagaccuucaccaauaggauacuuaggauuacuaucacaacgaaccagagauaucuacauauccagaagaagacgcggcacauucacauggacccucucagacucagaagguaaugaaacaccaggaggauacugcuuaacaagauggaugcuuauagaagcagaauuaaaaugcuucggaaacaccgcuguagcaaaaugcaacgaaaaacacgacgaagaauuuugcgacaugcuaagacuauucgacuucaacaaacaagcaaucagacgauuaaaagcucccgcacaaauguccauacaacuaauaaauaaagcaguaaaugcuuuaauaaacgaccaacuaauaaugaaaaaccaccuaagagacauuaugugcauacccuauugcaacuacucaaaauacugguaucuaaaccauacaucaacugguagaacaucacuaccaagaugcugguuaguaucaaacggauccuacuuaaaugaaacacacuucucugaugacauagaacaacaagcagacaacaugauaacagaaaugcuucaaaaagaauacuuagacagacaagguaaaacaccucucgggcuaguagaccuauucguauucucaacaucauucuaccuuauaucaauauuccuacauuuaguaaaaaucccaacacaccgacauaucguaggaaaaccaugcccaaaaccacacagauuaaaucacaugggaauauguaguugcggauuauacaaacaacccggaguaccuguacgcuggaaaagauaaggacuaguaauaaggaaacuguaugaaugucugugggcaggaagugaagagauccuucuguaaagguuuuuggaauuaugucugcugaauaauaaacuuuuuugaaauaauaaaucugguagaaaaaugagaucuaaaaaaaaaaaaaaaaaaaaaaaaaaaaaaaaaaaaaaaaaaaaaaaaaaaaaaaaaaaaaaaaugcaucccccccccccccccccccccccccccccccaaaggcucuuuucagagccaccagaauu

SEQ ID NO: 6929 - RNA, 1816 nt, Artificial Sequence
  mRNA product Design b-4 comprising derived and/or modified sequence from LASV(G1180-SLE-2010;Clade IV)__AIT17168__GPCstabilized (opt6)
gggagagucccgcagucggcguccagcggcucugcuuguucgugugugugucguugcaggccuuauucaagcuuaccaugggacaaauagucacuuuuuuccaagaaguaccacauguaaucgaagaaguaaugaacauaguacuaauagcacuuuccauacuagcuguccuaaaaggacucuacaacuucgccacaugcggacuaguaggccuauuaacauuccuauuauuaugcggccguuccugcacagcaucaagauacaaagguguauacgaacuccaaacacuagaauuaaauauggaaacauuaaacaugacaaugccucuaucaugcacaaaaaacaacucacaucauuacauaaugguaggaaacgaaacaggacuagaacuaacauuaacaaacacaucaauaaucaaucacaaauucugcaauuuaagcgacgcucacaaaaaaaacuuauacgaccacgcauuaaugucaauaauaucaacuuuccaccuuucaaucccaaacuucaaccaauacgaagcaaugucaugugacuucaacggcggaaaaauaucaguucaauacaacuuaucucacucauacgcuggagacgcagcaaaucacuguggaacaguagcaaacggaguucuacaaacauucaugagaauggcauggggaggaucauauauagcauuagacucaggaugcggaucaugggacugcauuaugaccucauaccaauaccuaauaauacaaaacacaacaugggaagaccacugccaauucucuagaccaaguccaauaggauacuuaggacuucuaucacaaagaacacgcgacauauacauaucccgcagacgaagagguacauuuacauggacacuaagcgauuccgaaggaaaagacacaccaggaggauauugccuaacacgcuggaugcucauagaagcugaacuaaaaugcuucggaaauacagcuguagcaaaauguaacgaaaaacacgacgaagaauuuugugacaugcuaaggcuauucgacuucaacaaacaagcaauccaaagauuaaaagcacccgcucaaaugucaauacaacuaauaaacaaagcaguaaacgcacuaauaaacgaccaacuaauaaugaaaaaccaucucagagauauaaugugcauuccauacugcaacuauucaaaauacugguaucuaaaucacacaacaaccgguaaaacaucacuaccaaaaugcugguuaguaagcaacggaucauauuuaaacgaaacacacuucucugacgauauagaacaacaagcagacaauaugauaacagaaauguuacaaaaagaauacauggaaaggcaaggaaaaaccccacuaggauuaguagaccuauuuguauucucaacaaguuuuuacuuaauaucaaucuuucuacaucuaguaaaaauaccaacccacagacacauaguaggaaaauccugccccaaaccucacagacuaaaccacaugggcauaugcuccugcggacuauacaaacaacccggaguaccagucaaauggaaaagauaaggacuaguaauaaggaaacuguaugaaugucugugggcaggaagugaagagauccuucuguaaagguuuuuggaauuaugucugcugaauaauaaacuuuuuugaaauaauaaaucugguagaaaaaugagaucuaaaaaaaaaaaaaaaaaaaaaaaaaaaaaaaaaaaaaaaaaaaaaaaaaaaaaaaaaaaaaaaaugcaucccccccccccccccccccccccccccccccaaaggcucuuuucagagccaccagaauu

SEQ ID NO: 6930 - RNA, 1816 nt, Artificial Sequence
  mRNA product Design b-4 comprising derived and/or modified sequence from LASV(G1442-SLE-2011;Clade IV)__AIT17180__GPCstabilized (opt6)
gggagagucccgcagucggcguccagcggcucugcuuguucgugugugugucguugcaggccuuauucaagcuuaccaugggacaaauaguuaccuuuuuccaagaaguaccucauguaauagaagaagucaugaauauaguccuaauagcauuaucaauauuagcaguauuaaaaggacuuuacaacguagcaaccuguggacuaauaggucuaguaacauuucuacucuuaugcggaagaucauguacuacaacacuauacaaaggaguauacgaauuacaaacucuagaacuaaauauggaaacacuaaacaugacaaugccacucucauguaccaaaaacaacucacaucacuacauucgaguaggaaaugaaacaggucuagaauuaacauuaacaaacacaucaauaauaaaccauaaauucugcaaccucucagacgcacacaagaaaaacuuauacgaccaugcauuaaugucaauaauuuccacauuccauuuauccauaccaaauuuuaaucaauacgaagcaauguccugcgacuucaacggaggaaaaauauccguucaauauaauuuaagucacucuuaugcaggagacgcagcaaaucacuguggaacaguagccaacggagucuuacaaacauucaugagaauggcauggggagguucauacaucgcccuagacucaggcugcggaaauugggauugcauaaugacauccuaucaauaccuaauaauacaaaacacaaccugggaugaccacugucaauucucaagaccaucuccaauaggauauuuaggauuacuaucacaaagaacaagagacguauacauaagcagaagaagaagaggaacauuuacauggacuuuaucagauucagaaggaaaagacacacccggcggcuacugccugaccagauggaugcuaauagaagcagaauuaaaauguuucggcaacacagcaguagcaaaaugcaaugaaaaacacgacgaagaguucugcgauaugcuaagacuuuucgacuucaauaaacaagcaauucaacgauuaaaagcuccagcacaaauguccauacaacuuauaaacaaagccguaaacgcccuaauuaaugaucaauuaauaaugaaaaaccaccuaagagacauaauguguauaccuuacuguaauuacaguaaauacugguacuuaaauaauacugccacaggaaaaacaucauuaccaaaaugcugguuaauaucaaacggaucauacuuaaacgaaacacacuucucagaugacaucgaacaagaagcugacaacaugauuacagaaauguuacaaaaagaauacauggaaagacaaggaaaaacaccuuuaggucuaguagaucuauucgucuucuccacaucauucuaucucauaucuaucuuucuacaccuaguaaaaauaccaacacacagacacauagucggaaaauccugcccaaaaccacacagauuaaaccacaugggaauuugcucaugcggacuauacaaacaaccaggaguaccaguaagauggaaaagauaaggacuaguaauaaggaaacuguaugaaugucugugggcaggaagugaagagauccuucuguaaagguuuuuggaauuaugucugcugaauaauaaacuuuuuugaaauaauaaaucugguagaaaaaugagaucuaaaaaaaaaaaaaaaaaaaaaaaaaaaaaaaaaaaaaaaaaaaaaaaaaaaaaaaaaaaaaaaaugcaucccccccccccccccccccccccccccccccaaaggcucuuuucagagccaccagaauu

SEQ ID NO: 6931 - RNA, 1816 nt, Artificial Sequence
  mRNA product Design b-4 comprising derived and/or modified sequence from LASV(G3010-SLE-2013;Clade IV)__AIT17344__GPCstabilized (opt6)
gggagagucccgcagucggcguccagcggcucugcuuguucgugugugugucguugcaggccuuauucaagcuuaccaugggucaaaucguaacauuuuuccaagaaguaccacacgugaucgaagaaguaaugaauauaguacucauagcauuaaguauauuagcuguacuaaaaggccuauauaacuucgccacaugcggucuaguaggucuaguaacauuucuacuauuaugcggaagauccugcacaacaucccuauacaaaggagucuacgaauuacaaacauuagaauuaaacauggaaacacugaacaugacaaugccauuaucaugcaccaaaaacaacucacaccacuacaucauggucggaaaugaaacaggacuagaacuaacacuaacaaacacauccauaauaaaccacaaguuuugcaacuuaucagacgcacauaagaaaaaccucuauaaucacgcacuuauguccauaauauccacauuccaccuauccauaccaaacuucaaccaauacgaagcaaugucaugcgacuucaacggaggaaaaauuucaguacaauacaacuuaucacacucauacgcgggagacgcagcaucucauugcggaacaguagcaaacggaguauuacaaacauuuaugcgaauggcuuggggaggcucauauauagcacuagacucaggaugcggaaaaugggacugcauaaugacauccuaccaauaccuaauaauccaaaauacaacaugggaagaucauugucaauucuccagacccucaccaauaggauaccuuggacuacuaucacaaagaacaagagacauauacauaucaagaagaagacgaggaacauuuaccuggacacuaucagacucugaaggaaaagacacaccaggaggcuauugccuaacaagauggauguuaauagaagcagaacuaaaauguuucggaaauacagccguagcaaaauguaacgaaaaacaugacgaagaauuuugugauauguuacgacuauucgacuucaauaaacaagcaauacaaagacuaaaaacaccagcacaaaugucaauacaauuaauaaacaaagcaguuaacgcacuaauuaaugaucaacuaauaaugaaaaaccauuuaagagacauaauguguauaccuuauugcaauuacucaaaauacugguauuuaaaccacacaacaaccggcaaaacuucuuuaccaaaaugcuggcuaguaucuaacggaucauaucuuaacgaaacacacuucucagaugacauagaacaacaagcagacaacaugauuacagaaauguuacaaaaagaauauauggaaagacaaggaaaaacaccauugggcuuaguugauuuauuuguauucucaaccagcuucuacuuaauaucaauauuccuacaccuaguaaaaauaccuacacaccgacacauaguaggaaaaucaugccccaaaccacacagacuaaaucacaugggaauauguuccuguggacuauauaaacaaccaggaguaccaguaagguggaaaagauaaggacuaguaauaaggaaacuguaugaaugucugugggcaggaagugaagagauccuucuguaaagguuuuuggaauuaugucugcugaauaauaaacuuuuuugaaauaauaaaucugguagaaaaaugagaucuaaaaaaaaaaaaaaaaaaaaaaaaaaaaaaaaaaaaaaaaaaaaaaaaaaaaaaaaaaaaaaaaugcaucccccccccccccccccccccccccccccccaaaggcucuuuucagagccaccagaauu

SEQ ID NO: 6932 - RNA, 1816 nt, Artificial Sequence
  mRNA product Design b-4 comprising derived and/or modified sequence from LASV(G502-SLE-2009;Clade IV)__AIT17126__GPCstabilized (opt6)
gggagagucccgcagucggcguccagcggcucugcuuguucgugugugugucguugcaggccuuauucaagcuuaccaugggacaaauaguaaccuucuuccaagaaguaccacacguaaucgaagaagucaugaauauaguucuaauagcacucagcaucuuagcaguccuaaaaggacuauacaauuuugcaacaugcggucuaguaggacuacuuacauuccuucuauuauguggaagauccugcacaacaggacuauauaaaggaguauaugaauuacaaacacucgaauuaaacauggaaacacuaaacaugacaaugccacuaucaugcacuaaaaauaacucacaucauuauaucaugguuggaaaugaaacagguuuagaacuaacacuaacaaauacaagcauaaucaaucacaaauucugcaacuuaucugaugcucacaagaaaaacuuauaugaccacgcacuaaugagcaucauaucaacauuucacuuaucaaucccaaauuucaaccaauaugaagcaaugucaugcgauuucaacggaggaaaaauaucaguacaauacaaccucucacauucuuaugcuggagaugcagcagaucacugcggaacaguagcaaacggaguauuacaaacauucaugcgaauggcauggggaggaucauacauagcucucgacuccggaugcggaagaugggauugcauaaugacauccuaucaauaccuuauaauacaaaacacaacaugggaagaccacugccaauucucaagaccaaguccaauaggauaccuaggacuauuaucacaacgaacaagagacauuuacauaucucgacgcagaagaggaaccuucaccuggacauuauccgacucagaaggaaaagauacaccaggaggauacugcuuaacaagauggaugcuaauagaagccgaacucaaaugcuucggaaauacagcaguagccaaaugcaacgaaaaacacgaugaagaauuuugugacaugcuaagacuauucgacuucaacaaacaagcuauacaaagauuaaaagcacccgcccaaauguccauccaacuaauaaauaaagcuguaaacgcacuaaucaaugaccaacucguaaugaaaaaucaucuaagagacauaauguguauacccuacuguaacuacucacgauacugguaccuaaaccauacaacaacaggaagaacaucacuuccaaaaugcugguuagucucuaauggaucauaccuaaacgaaacacacuuuuccgacgauauagaacaacaagcagauaauaugauaacugaaauguuacaaaaagaauacauggaaagacaaggaaaaacuccccuaggucuaguagaccucuucguauuuucaacaucuuuuuaucuaaucucaauauucuuacaccuaguaaaaauaccaacacacaggcauauagucggaaaauccuguccaaaaccacacaggcuaaaccacaugggaauaugcucuuguggacuauacaaacaaccaggagucccaguaaaauggaaaagauaaggacuaguaauaaggaaacuguaugaaugucugugggcaggaagugaagagauccuucuguaaagguuuuuggaauuaugucugcugaauaauaaacuuuuuugaaauaauaaaucugguagaaaaaugagaucuaaaaaaaaaaaaaaaaaaaaaaaaaaaaaaaaaaaaaaaaaaaaaaaaaaaaaaaaaaaaaaaaugcaucccccccccccccccccccccccccccccccaaaggcucuuuucagagccaccagaauu

SEQ ID NO: 6933 - RNA, 1816 nt, Artificial Sequence
  mRNA product Design b-4 comprising derived and/or modified sequence from LASV(G733-SLE-2010;Clade IV)__AIT17154__GPCstabilized (opt6)
gggagagucccgcagucggcguccagcggcucugcuuguucgugugugugucguugcaggccuuauucaagcuuaccaugggacaaauaguaaccuucuuccaagaaguaccucacguaauagaagaaguaaugaauauaguauuaauagcauuauccauccucgcaguacuuaaagguuuauacaacuuugcaaccugcggcauagucggucuaguauccuuucucuuauuaugcggaagaucauguacaacauccuuauacaaaggaguauacgaacuacaaacauuagaauuaaacauggaaacucucaacaugacaaugccauuaucauguaccaaaaacaauagccaucauuauauaaugguaggaaacgaaacaggacucgaacuaacacuaacaaacacaucaauaauaaaccacaaauucugcaaccuuucagacgcacacaagaaaaaccuauacgaucacgcacuaaugucuauaauaucaacauuccaccuaagcauaccaaauuucaaucaauacgaagccauguccugugacuucaauggaggaaaaauaucaguacaauacaaccuaucacauuccuacgcaggagacgcagcaaaccauugcggaacaauagcaaacggaguucuacaaacauucaugagaauggcauggggaggaagcuacauagcacuagacucaggcugcgaccgaugggauugcauaaugacauccuaccaauaccuaauaauacaaaacacaacaugggaagaccauugccaauucucccgcccaucaccaauaggauacuuaggacuacuaucacaaagaacaagagacauuuauauaucuagacgaagaagaggaacauuuacauggacacuaucagauuccgaaggaaaagacacaccuggcggcuauugucuaaccagauggauguuaauagaagcagaacucaaaugcuuuggaaacacagcaguagccaaaugcaacgaaaaacacgacgaagaauuuugcgacauguuaagacucuucgauuuuaacaaacaagcaauacaaagauuaaaagcacccgcacaaaugucaauacaauuaauaaauaaagcuguaaacgcacuaauaaacgaccaauuaaucaugaaaaaccaucucagagauauaauguguauaccauacuguaauuauucuaaauacugguauuuaaaccacacaaccaccggaaaaacaucauuaccuaaaugcuggcuaguaagcaacgguucuuaucuaaacgaaacacacuuuucagacgacauagaacaacaggcagauaauaugauaaccgaaauguuacaaaaagaauacauggaaagacaaggaaaaacaccauuaggucuaguagaucuauucguauucucaacuagcuucuaccuuauaucaauuuuccuacauuuaguaaaaauacccacacauagacauguaguaggaaaaucauguccaaaaccacacagauuaaaccauaugggaaucuguucuugcggacuauacggacaaccagguguuccaguaaaauggaaaagauaaggacuaguaauaaggaaacuguaugaaugucugugggcaggaagugaagagauccuucuguaaagguuuuuggaauuaugucugcugaauaauaaacuuuuuugaaauaauaaaucugguagaaaaaugagaucuaaaaaaaaaaaaaaaaaaaaaaaaaaaaaaaaaaaaaaaaaaaaaaaaaaaaaaaaaaaaaaaaugcaucccccccccccccccccccccccccccccccaaaggcucuuuucagagccaccagaauu

SEQ ID NO: 6934 - RNA, 1816 nt, Artificial Sequence
  mRNA product Design b-4 comprising derived and/or modified sequence from MOPV/LASV reassortant(IGS-1;Clade IV)__AFY05576__GPCstabilized (opt6)
gggagagucccgcagucggcguccagcggcucugcuuguucgugugugugucguugcaggccuuauucaagcuuaccaugggccaaaucguaaccuucuuucaagaaguaccucauguaauugaagaaguaaugaauauaguucuuauagcacuaucaguauuagcaguucuaaaaggauuauauaacuucgccacauguggucuaguaggccuaguaaccuuuuuacuacuauguggaagaucaugcaccacaucauuauauaaaggaguauacgaacuucaaacccuagaacuaaauauggaaacacuaaacaugacaaugccauuaucaugcacgaaaaauaacucccaccacuacauuaugguaggaaacgaaacaggucuagaauuaacacucacaaauacaucaauuauaaaccacaaauuuugcaaucucuccgaugcgcacaagaaaaauuuauaugaccacgcacuaaugucaauaauaucaacauuucaccuaagcauaccaaacuucaaccaauaugaagccaugucaugcgauuucaacggaggaaaaaucucaguacaauacaaccuaucccauucauacgcaggagaugcagcaaaucacugcggcacaguagcaaacggcguacuacaaacauuuaugcgcauggccugggguggcucauacauagcucuagauucugguugugguaauugggauuguauaaugacaucuuaccaauaucuaauaauccaaaauacaacaugggaagaccacugccaauucucaagaccaucaccaauaggauauuuagguuuauuaucacaaagaacaagagacaucuauaucucacgaagaagacgaggaacauucacauggacacucucagacucugaaggugaagacacaccaggaggauacugccuaacacgauggauguuaauagaagcagaacuaaaaugcuucggaaauacagcaguugcaaaaugcaacgaaaaacacgaugaagaauuuugcgauauguuacgauuauuugacuuuaacaaacaagcaauacaacgacuaaaagcccccgcacaaaugucaauacaacuaauaaacaaagcaguaaaugcacugauaaaugaucaacuaauaaugaaaaaucacuuaagagacaucauguguaucccauauugcaacuacucaaaauauugguaucuaaaucacacuaccacaggaagaacaucccuaccaaaaugcuggcucguaucuaacggaaguuaccuaaacgaaacacacuuuucagaugauaucgaacaacaagcagacaacaugauaacagaaaugcuacaaaaagaauauauggaaagacaaggaaaaacaccacucggcuuagucgaccucuucgucuuuucaacaucauucuaccuaauaucaaucuuccuacaccucguaaaaauaccaacacacagacauauaguaggaaaaucgugcccaaaaccacauagacuuaaccauaugggaauauguucauguggucuuuacaaacaaccaggcgugccaguaaaauggaaacguuaaggacuaguaauaaggaaacuguaugaaugucugugggcaggaagugaagagauccuucuguaaagguuuuuggaauuaugucugcugaauaauaaacuuuuuugaaauaauaaaucugguagaaaaaugagaucuaaaaaaaaaaaaaaaaaaaaaaaaaaaaaaaaaaaaaaaaaaaaaaaaaaaaaaaaaaaaaaaaugcaucccccccccccccccccccccccccccccccaaaggcucuuuucagagccaccagaauu

SEQ ID NO: 6935 - RNA, 1816 nt, Artificial Sequence
  mRNA product Design b-4 comprising derived and/or modified sequence from LASV(LM765-SLE-2012;Clade IV)__AIT17814__GPCstabilized (opt6)
gggagagucccgcagucggcguccagcggcucugcuuguucgugugugugucguugcaggccuuauucaagcuuaccaugggacaaauaguaacauucuuucaagaaguaccacauguaauagaagaaguaaugaacaucguauuaauagcauuaaguauacuagccguacuaaaaggacuauauaauuucgccacaugcggacucguaggccuagucaccuuccuacuucuaugcggaagaucuuguacaacaucauuauacaaaggagucuacgaacugcaaacauuagaauuaaacauggaaacacuaaacaugacaaugccacuaucaugcaccaaaaacaauucacaucacuacaucauggugggaaacgaaacaggauuagaacuaacacuuacaaauacaagcauaauagaccacaaauucugcaaccuaucagaugcacacagaaagaacuuauaugaucacgcacuaauguccauaauaucaacauuucaccuauccauaccaaacuucaaccaauaugaagcaaugucaugcgacuucaacggaggaaaaauaucaguacaauacaacuuaucacacaguuacgcaaaagacgcagcagaucauuguggaacaguagcaaacggaguacuacaaacauucaugcgaauggccuggggaggaagcuacauagcgcuagacucaggauguggacgaugggauugcauaaugacuucauaucaauacuuaaucauccaaaacacuacaugggaagaucacugucaauucuccagacccucccccauaggauaccuaggacuauuaucacagagaaccagagauauauauauaucaagaagaagaagaggaacauucacauggacccuaucagacucagaaggaaaagacaccccaggaggauacugcuuaacacgauggaugcucaucgaagcugaauuaaaaugcuucggaaauacagcagucgcaaaaugcaaugaaaaacacgacgaagaauuuugugacaugcuaagauuauucgacuucaacaaacaagccauacaacgacuaaaagcaccagcccaaaugucaauacaauuaauaaacaaagcaguaaacgcauuaauaaaugaccaacuaauaaugaaaaaucaccuuagagauauaauguguauuccauacugcaacuauagcaaauacugguacuuaaaucacaccacaacaggaaaaacaagccucccuaaauguuggcuaguauccaauggaucauaucuuaaugaaacacauuucucagaugauauagaacaacaagcagacaacaugauaaccgaaauguuacaaaaagaauauauggaaagacaaggaaaaacaccauuaggucuaguagauuuauucguauuuucaacaucauucuaucuaauaucaauuuuccuacaucuaguaaaaauacccacccacagacauauaguaggaaaaccaugcccaaaaccacacagacuaaaccacaugggaaucugcucauguggacucuauaaacaaccaggaguaccaguuaaauggaaaagauaaggacuaguaauaaggaaacuguaugaaugucugugggcaggaagugaagagauccuucuguaaagguuuuuggaauuaugucugcugaauaauaaacuuuuuugaaauaauaaaucugguagaaaaaugagaucuaaaaaaaaaaaaaaaaaaaaaaaaaaaaaaaaaaaaaaaaaaaaaaaaaaaaaaaaaaaaaaaaugcaucccccccccccccccccccccccccccccccaaaggcucuuuucagagccaccagaauu

SEQ ID NO: 6936 - RNA, 1816 nt, Artificial Sequence
  mRNA product Design b-4 comprising derived and/or modified sequence from LASV(LM776-SLE-2012;Clade IV)__AIT17824__GPCstabilized (opt6)
gggagagucccgcagucggcguccagcggcucugcuuguucgugugugugucguugcaggccuuauucaagcuuaccaugggacaaauaguaacauucuuccaagaaguaccucacgucauagaagaagucaugaacauaguccuaauagcccuaucaauacucgcaguacuaaaaggauuauacaauuuugcuacuuguggauuaguaggauuaguaacauucuuacuacucugcggccgaucaugcacuacaucaguauacaaaggaguauacgaacuacaaaccuuagaauuaaauauggaaacauuaaacaugacaaugccacuaucaugcaccaaaaacaacucacaucauuacauaaugguuggaaaugaaacaggccuagaauuaacacuaacaaacacaucaaucauaaaccacaaauucugcaaucugucagacgcacacaagaaaaaccuauaugaccacgcauuaaugucuauaaucucuacauuccauuuaagcauaccaaacuuuaaccaauacgaagcaaugucaugcgacuucaacggaggaaaaauaucaguccaguacaaucuaucacacucauacgcaggagaugcagcaaaccauuguggaacugucgccaacggcguauuacaaacauucaugcgaauggcauggggcggaucauacauagcacuagacucuggaugcggaaaaugggacugcauaaugacaucauaccaauaccuaauaauucaaaacacaacaugggaagaucacugucaauuuucacgaccaucuccaaucggauaucuaggacuacuuucacaaagaaccagagacauauauauaucucgucgccgcagaggaacauuuaccuggacauuaagugacuccgaaggaaaagauaccccaggaggcuauugucuaaccagauggaugcuaauagaagcagaacuaaaaugcuucggaaauacagcuguagcaaaauguaacgaaaaacaugacgaagaauuuugcgauauguuaagacuauucgacuucaauaaacaagcaauacaacgauuaaaagcaccagcacaaaugucaauacaauuaauaaauaaagccgucaaugcucuaauaaacgaccaacuaauaaugaaaaaccauuuacgcgacauaaugugcauacccuacugcaauuacucaaaauauugguaccuaaaucacacaacaaccggaaaaacaucauuaccuaaauguuggcucguaucaaacggauccuaucuaaaugaaacacacuuuucagacgauauagaacaacaagcagauaacaugauuacagaaaugcuucaaaaagaauauauggaaagacaaggcaaaacaccacuaggucuaguagaccucuucguauuuucaaccucauucuacuuaauaucaauauuccuacaucuaguuaaaauaccaacacaccgucacauagucggaaaaucuugcccaaaaccacacagacuaaaccauaugggaauaugcucaugcgguuuauacaaacaaccaggaguaccaguaagauggaaacgauaaggacuaguaauaaggaaacuguaugaaugucugugggcaggaagugaagagauccuucuguaaagguuuuuggaauuaugucugcugaauaauaaacuuuuuugaaauaauaaaucugguagaaaaaugagaucuaaaaaaaaaaaaaaaaaaaaaaaaaaaaaaaaaaaaaaaaaaaaaaaaaaaaaaaaaaaaaaaaugcaucccccccccccccccccccccccccccccccaaaggcucuuuucagagccaccagaauu

SEQ ID NO: 6937 - RNA, 1816 nt, Artificial Sequence
  mRNA product Design b-4 comprising derived and/or modified sequence from LASV(Mad39;Clade IV)__ANH09722__GPCstabilized (opt6)
gggagagucccgcagucggcguccagcggcucugcuuguucgugugugugucguugcaggccuuauucaagcuuaccaugggacaaauaguaaccuuuuuccaagaaguuccacauguaauagaagaaguaaugaacauaguccuaauagcacuauccauauuagccguacuaaaagguuuauacaauguagccacaugcggacucauaggccuuguaacauuucuacuccuaugcggacgcucaugcacaacaacacuauacaaaggaguauaugaacuacaagcacuagaacucaacauggaaacacuaaacaugacaaugccauuauccugcacaaaaaauaacucucaccacuauaucagaguuggaaacgaaacaggacuagaacuuacauuaacuaacacaucacuaauaaaccacaaauucugcaaucuaucugaugcacacaaaaaaaaccuuuacgaccacgcacuaaugucaauuauaucaacauuccaccuaucaauaccaaacuucaaucaauacgaagcaaugucuugcgacuucaacgauggaaaaauaucaguucaauacaaucuaucacacacauacgccggagacacagccaaccacuguggaacagucgcaaauggcguuuuacaaacauuuaugcgaauggcauggggaggaucuuacauagcacuagacucagguuguggaggaugggauugcauaaugacaucauaucaauaccuaauaauucaaaacacaacaugggaagaucacugccaauuuucaagaccauccccaauaggauaucuaggacuuuuaucacaaagaacgagagacauauacauaucacgaagaagaagaggaacuuucacauggacgcucuccgacuccgaagguaaagacacaccaggaggauacugcuuaacuagauggauguuaauagaagcagaauuaaaaugcuuuggaaauacagcaguagcaaaaugcaacgaaaaacaugaugaagaauucugugacaugcuucgacuauuugacuucaauaaacaagcaauacaaagacuaaaagcaccagcacaaaugucaauccaauuaauaaacaaagcaguaaaugcauugauaaaugaccaauuaauaaugaaaaaucaucuaagagacauaaugugcauaccauauugcaauuacucuaaauauugguaccuaaaccacacugucacuggaaaaaccucacuaccaaaauguugguuaguauccaacggcucauaccuaaacgaaacccauuucuccgaugacauagaacaacaagccgacaacaugauaacagaaaugcuccaaaaagaguacauggaaagacaagguaaaaccccuuuaggauuagucgaccuauucguauucucaacauccuucuaccuaauaucaaucuucuuacaucuuguaaaaauaccaacucaucgccacgucguuggaaaaccaugccccaaaccacaucgacucaaccauauggguauauguuccuguggcuucuacaaacaaccaggagucccaguacgauggaaaagauaaggacuaguaauaaggaaacuguaugaaugucugugggcaggaagugaagagauccuucuguaaagguuuuuggaauuaugucugcugaauaauaaacuuuuuugaaauaauaaaucugguagaaaaaugagaucuaaaaaaaaaaaaaaaaaaaaaaaaaaaaaaaaaaaaaaaaaaaaaaaaaaaaaaaaaaaaaaaaugcaucccccccccccccccccccccccccccccccaaaggcucuuuucagagccaccagaauu

SEQ ID NO: 6938 - RNA, 1816 nt, Artificial Sequence
  mRNA product Design b-4 comprising derived and/or modified sequence from LASV(Z0947-SLE-2011;Clade IV)__AIT17840__GPCstabilized (opt6)
gggagagucccgcagucggcguccagcggcucugcuuguucgugugugugucguugcaggccuuauucaagcuuaccaugggacaaauaguaacauucuuccaagaaguaccacacguaauagaagaaguaaugaauaucguucucauagcucuuuccauccuagcuguacuaaaaggauuauauaauuucgccacaugcggccuaguaggcuuaguaacauucuuauuacucugcgguagauccugcacaauaucacuauacaaaggaguauacgaauuacaaacccuagaacuuaacauggaaacacuaaacaugacaaugccauuauccuguacaaaaaacaauucucaccacuacauaaugguaggaaacgaaacaggucucgaacuaacucucacaaauaccuccauaauaaaccacaaauucugcaaccucucugaugcucacaaaaaaaaccuauacgaccaugcucuaauguccauaauaucaacuuuucauuuaucaaucccaaacuucaaccaauacgaagcaauguccugugacuuuaacggaggcaaaauuucagugcaauacaacuuaucacacucauacgccggagacgcugcuaaucacugcgguacaguagcaaacggaguauuacaaacauuuaugcgaauggcauggggaggaagcuacaucgcacucgacuccggaugugacagaugggacuguauaaugacaucauaccaauaccuaauaauacaaaacacuacaugggaagaccacugccaauuuucacgcccaucaccaaucggauacuuaggacuacuaucacaaagaaccagagacauauacauuuccagaagaagaagaggaacauucaccuggacccuaucagauucagaaggcaaagauacucccgguggauacugccuaacaagauggaugcuaauagaagcugaauuaaaaugcuucggaaacacagcaguagcaaaaugcaaugaaaaacacgaugaagaauucugcgauaugcuccgccuuuuugacuucaauaaacaggcaauacaacgauuaaaagcacccgcacaaaugaguauacaacuaauaaacaaagcaguaaacgcacuaauaaacgaucaauuaauaaugaaaaaucaucucagagacaucaugugcauaccauauugcaacuauagcaaauacugguacuuaaaccacacaaccacaggcaaaacaucacuaccaaaaugcuggcuaguaucuaacggaucauacuuaaaugaaacacauuucagcgaugauauagaacaacaagcagacaacaugauaacagaaaugcuacaaaaagaauacauggaacgacaaggaaaaaccccauuaggacuaguagacuuauucguauucaguacaucauuuuaccucauaaguaucuuccuacaccuugucaaaauaccaacacaucgacacauaguaggaaaaccaugccccaaaccacauagacuaaaccacaugggaauuugcuccuguggacuauauaaacaacccggcguaccaguaaaauggaaacgauaaggacuaguaauaaggaaacuguaugaaugucugugggcaggaagugaagagauccuucuguaaagguuuuuggaauuaugucugcugaauaauaaacuuuuuugaaauaauaaaucugguagaaaaaugagaucuaaaaaaaaaaaaaaaaaaaaaaaaaaaaaaaaaaaaaaaaaaaaaaaaaaaaaaaaaaaaaaaaugcaucccccccccccccccccccccccccccccccaaaggcucuuuucagagccaccagaauu

SEQ ID NO: 6939 - RNA, 1816 nt, Artificial Sequence
  mRNA product Design b-4 comprising derived and/or modified sequence from LASV(Josiah;Clade IV)__NP_694870__GPCstabilized (opt11)
gggagagucccgcagucggcguccagcggcucugcuuguucgugugugugucguugcaggccuuauucaagcuuaccaugggccaaaucguaaccuucuuccaagaagucccccacgucaucgaggaagucaugaacauaguccucauagcgcucucaguacucgccguccuaaaaggccucuacaacuucgcaaccugcggacucguaggacugguaacauuccuucuacuaugcggaagaucaugcacuaccucacuauacaaaggagucuacgaacuacaaacccuagaacugaacauggaaacccucaacaugaccaugccccuauccugcaccaaaaacaacagccaucacuacauaaugguaggcaacgaaaccggccuugaacuaacccuaacaaacacauccaucauaaaccacaaauucugcaaccucuccgacgcccacaagaaaaaccucuacgaccacgcucucaugaguaucauauccaccuuucaccuguccaucccaaauuuuaaccaguaugaagccauguccugcgacuucaacggcggaaaaaucuccguacaauacaaccucucccacuccuacgccggcgacgcagccaaccacugcggcaccgucgccaacggcguccuccagaccuucaugcgaauggccuggggaggcuccuacaucgcacucgacuccggaugcggcaauugggacugcaucaugaccuccuaccaauaccucaucauccaaaauaccaccugggaagaccacugccaauucucccgcccaucccccaucggauaccucggacuacuaucccaacggacccgcgacaucuacaucagccgacguaggcgcggaacauucaccuggacgcuaagcgacuccgaaggcaaagacacccccggaggcuacugccugacccgcuggaugcuaaucgaagcagaacuaaaaugcuucggcaacaccgccgucgccaaaugcaacgaaaaacacgacgaggaguucugugacaugcuacgccucuucgacuucaacaaacaagccauacagcgacucaaagcaccggcccaaaugagcauccagcuaaucaacaaagccgucaacgcacucauaaacgaccagcucauaaugaaaaaccaccuacgcgacaucaugugcauccccuacugcaacuacucaaaauacugguaccugaaccacacaacuaccggccgcacaucccucccaaaaugcugguuagucuccaacggcucauaccucaaugaaacccacuucagcgacgacaucgaacaacaagccgacaacaugaucacagaaaugcuccaaaaagaauacauggaacgacaaggaaaaacaccccucggccucgucgaccuauuugucuucuccacaucguucuaccuaauauccaucuuccuccaccucguaaaaauccccacccaucgccacaucgucggcaaauccugccccaaaccacaccgccucaaccauaugggcaucugcuccugcggucucuacaaacaacccggcguucccgucaaauggaaacgcuaaggacuaguaauaaggaaacuguaugaaugucugugggcaggaagugaagagauccuucuguaaagguuuuuggaauuaugucugcugaauaauaaacuuuuuugaaauaauaaaucugguagaaaaaugagaucuaaaaaaaaaaaaaaaaaaaaaaaaaaaaaaaaaaaaaaaaaaaaaaaaaaaaaaaaaaaaaaaaugcaucccccccccccccccccccccccccccccccaaaggcucuuuucagagccaccagaauu

SEQ ID NO: 6940 - RNA, 1813 nt, Artificial Sequence
  mRNA product Design b-4 comprising derived and/or modified sequence from LASV(LP;Clade I)__AAF86701__GPCstabilized (opt11)
gggagagucccgcagucggcguccagcggcucugcuuguucgugugugugucguugcaggccuuauucaagcuuaccaugggccaaauaauaacauucuuccaagaagucccccacgucaucgaagaagucaugaauaucguacucaucgcccucucgcuccucgcuauccugaaaggccucuacaacaucgccacaugcggcaucauaggccucgucgccuuccuauuucucugcggcaaaucuugcucccucacccuaaaaggaggcuacgaacuccaaacacuagaacucaacauggaaacccucaauaugaccaugccccuuuccugcaccaaaaacuccucccaccacuacauccgcguaggcaacgaaaccggccucgaacucacacucaccaacacaagcaucaucaaccacaaauucugcaaccugucugacgcucacaagaaaaaucuuuacgaucacgcacucaugucgaucauaucaacauuccaccucucgauccccaacuucaaccaauacgaagccauguccugcgacuucaacggcggcaaaaucagcguccaauacaaccucucccacuccuacgccggcgacgcagcagaacacugcggcaccguggcgaacggaguacuccaaaccuucaugcgcauggccuggggcggacgcuacauagcccucgacuccggcuguggcaacugggacugcaucaugaccuccuaccaauaccucaucauccagaauaccaccugggaagaccacugccaauucucccgccccucaccaauaggcuaccucggccuccuaucccaacgaacacgcgacaucuacaucucaagacgcagacgcggcaccuucaccuggacccucucagacucugaaggcaacgaaacccccggaggcuacugccucacacgauggaugcucaucgaagccgaacucaaaugcuucggaaacaccgccguggccaaaugcaacgaaaaacacgacgaggaguucugcgacaugcuccgacucuucgacuucaacaaacaagccauacgccgacuaaaagcccccgcgcaaaugagcauccaacucaucaacaaagccgucaacgcccucaucaaugaucaacucaucaugaaaaaccaccuccgcgacauaaugugcaucccauacugcaacuacucaaaauacugguaccuaaaccacacuuccucaggacgcaccucacuccccaaaugcuggcucaucuccaacggcuccuaccuuaacgaaacacaguucucggacgacaucgaacaacaagcagacaacaugaucaccgaaaugcuacaaaaagaauacaucgaacgccaaggcaaaacaccccuaggccuagucgacauuuucauauucuccaccuccuucuaccucaucucaauuuuccuccaccuaaucaaaauccccacacaucgccacaucguaggaaaaccuugccccaaaccacacagacuaaaccacaugggcgucugcuccugcggccucuacaagcacccaggcguucccacaaaauggaagcgcuaaggacuaguaauaaggaaacuguaugaaugucugugggcaggaagugaagagauccuucuguaaagguuuuuggaauuaugucugcugaauaauaaacuuuuuugaaauaauaaaucugguagaaaaaugagaucuaaaaaaaaaaaaaaaaaaaaaaaaaaaaaaaaaaaaaaaaaaaaaaaaaaaaaaaaaaaaaaaaugcaucccccccccccccccccccccccccccccccaaaggcucuuuucagagccaccagaauu

SEQ ID NO: 6941 - RNA, 1813 nt, Artificial Sequence
  mRNA product Design b-4 comprising derived and/or modified sequence from LASV(803213;Clade II)__AAF86703__GPCstabilized (opt11)
gggagagucccgcagucggcguccagcggcucugcuuguucgugugugugucguugcaggccuuauucaagcuuaccaugggccaaaucaucaccuucuuccaggaggucccacacgucaucgaggaagucaugaacaucguccucaucgcccucucccuccuagccauccucaaaggcaucuacaacgucgcaaccugcggacucuucggacuaauauccuuccuccuccuuugcggccgcuccuguucgguaaccuacaaaggcguauacgaacugcaaacacuagaacucaacauggccaaccucaacaugaccaugccccuuuccugcaccaagaauaacucccaccacuacaucauggucggcaacgaaaccggucuagaacucacccuaaccaacacuagcauaaucaaccacaaauucugcaaccuaagcgaugcccacaagaaaaaccucuacgaccacgcccuaaugucgaucaucuccacauuucaccuauccauccccaacuucaaccaauacgaagccauguccugcgacuucaacgguggcaaaaucuccguccaauacaaccucucccacagcuucgccgucgacgcagcgaaccauugcggcaccaucgccaacggcguacuacaaacuuucaugcgcauggccuggggcgggagcuacaucgcccucgacuccggcugcggaaacugggacugcauaaugaccucauaccaauaccucauaauccaaaacacaaccugggaagaccacugccaguucucucgaccaucaccaauaggcuaccuaggccuccuaucucaacgcacccgcgacaucuacaucucccgccgccgccgcggcacauucacauggacccucuccgacagcgaaggcaacgaagccccuggcggauacugccucacccguuggaugcucauagaagcagaacucaaaugcuucggcaacacggccgucgcuaaaugcaacgaaaaacacgacgaagaguucugcgacaugcuccgacucuucgacuucaacaaacaagccaucaaacgucucaaaacgcccgcccaaauguccauccagcucaucaacaaagcagucaacgcccucaucaaugaccaacucaucaugaaaaaccaccuacgcgacaucauguguauccccuacugcaacuacagccguuacugguaccuaaaccacacaguaaccggcaaaacaucacucccacgcugcuggcuagucuccaacggcuccuaccucaacgaaacccacuucuccgacgacaucgaacaacaggccgacaacaugaucaccgagaugcuccaaaaggaguacauggaccgccaaggcaaaacaccccucggccucguagaccuauuuguauucuccaccuccuucuaccuaaucuccauauuccuccaucucguaaaaauucccacccaccgacacaucgucggaaagccaugccccaaaccacaccgacucaaccacaugggcaucugcucgugcggccuauacaagcacccaggcguaccuguaaaauggaaacgcuaaggacuaguaauaaggaaacuguaugaaugucugugggcaggaagugaagagauccuucuguaaagguuuuuggaauuaugucugcugaauaauaaacuuuuuugaaauaauaaaucugguagaaaaaugagaucuaaaaaaaaaaaaaaaaaaaaaaaaaaaaaaaaaaaaaaaaaaaaaaaaaaaaaaaaaaaaaaaaugcaucccccccccccccccccccccccccccccccaaaggcucuuuucagagccaccagaauu

SEQ ID NO: 6942 - RNA, 1813 nt, Artificial Sequence
  mRNA product Design b-4 comprising derived and/or modified sequence from LASV(GA391;Clade III)__CAA36645__GPCstabilized (opt11)
gggagagucccgcagucggcguccagcggcucugcuuguucgugugugugucguugcaggccuuauucaagcuuaccaugggccaaaucguuaccuucuuccaagaaguaccacacguaaucgaagaagucaugaacaucguauuaaucgcccucucaauccucgcuauccucaaaggccuuuacaacguagcuaccugcggccucaucggccuaguaaccuuccuccuccucuccggccgcuccugcucccuuaucuacaaaggcacauacgaacuucaaacccucgaacuaaauauggaaacccuaaacaugacuaugccccuauccugcaccaaaaacaacucgcaccacuacauccgagucggcaaugaaacaggccucgaacucacccuuaccaacacaucgauccuaaaccacaaguuuuguaaccucuccgacgcgcacaaacgcaaccucuacgaccacucccucaugucaaucaucuccaccuuccaccuaucuauacccaacuucaaccaauacgaagcaaugucuugcgacuucaacggcggaaaaaucaccguccaguacaaucuaucacacucauucgcagucgacgccgccggucacugcggaacccucgccaacggaguacuucaaacauucaugcgcauggcauggggcggcuccuacaucgcccuagacucaggcugcggcaacugggacugcauaaugaccuccuaccaauaccucauuauccaaaacaccaccugggacgaccacugccaauucucccgaccuucacccaucggcuaccucgggcuacuaucccaacgaacccgagacaucuacaucucccgcaggcgccgcggcacauucaccuggacccuauccgacagcgaaggcaacgaaacccccgguggcuacugccucacccgcuggaugcucauagaagccgaguuaaaaugcuucgguaacacagccgucgcaaaaugcaacgaaaaacacgacgaagaguucugcgacaugcuccgacuuuucgacuucaauaaacaagccauccgccgccuuaagaccccagcccaaaugucaauccaacucaucaacaaagccguaaacgcccucaucaacgaucaacucaucaugaaaaaccaccuccgugacaucaugugcauacccuacugcaacuacucccgcuauugguaccucaaccacaccuccacaggcaagaccucacucccccgcugcuggcucauauccaauggcucuuaucuaaacgaaaccaaauucucagacgacaucgaacaacaagcugacaacaugaucaccgaaaugcuccaaaaagaauacauagaccgccaaggaaaaacaccccucggccucguagaccucuucgucuucuccaccuccuucuaucucaucucgaucuuccuccaccucgucaaaauacccacccaccgacacauagucggaaaacccugccccaaaccacaccgccucaaccacaugggcaucugcuccugcggccuauacaaacaacccggcguccccgugcgcuggaaacgauaaggacuaguaauaaggaaacuguaugaaugucugugggcaggaagugaagagauccuucuguaaagguuuuuggaauuaugucugcugaauaauaaacuuuuuugaaauaauaaaucugguagaaaaaugagaucuaaaaaaaaaaaaaaaaaaaaaaaaaaaaaaaaaaaaaaaaaaaaaaaaaaaaaaaaaaaaaaaaugcaucccccccccccccccccccccccccccccccaaaggcucuuuucagagccaccagaauu

SEQ ID NO: 6943 - RNA, 1816 nt, Artificial Sequence
  mRNA product Design b-4 comprising derived and/or modified sequence from LASV(AV;Clade V)__CCA30314__GPCstabilized (opt11)
gggagagucccgcagucggcguccagcggcucugcuuguucgugugugugucguugcaggccuuauucaagcuuaccaugggccaaauaguaaccuucuuccaagaaguuccccacgucaucgaagaagucaugaacaucguccuaauagcccucucaauccuagccguacuaaagggccucuacaacaucgcaaccugcggccucaucggccuaaucaccuuccuacuccugugcggacgcucaugcagcuccaaccuauacaaaggcgucuacgaacuccaaucccuugaccucaacauggaaacucucaacaugaccaugcccuuguccugcaccaaaaacaacucacaccacuacauacgcguaggcaacgacaccggucucgaacuaacccuaaccaacaccucuauccucaaccacaaauucugcaaccuaucagacgcacacaagaaagaccucuacgaccacgcacucaugucgaucauauccaccuuccaccucucaauacccaacuucaaccaauacgaagccaugucaugcgacuuuaacggaggcaaaaucuccguacaauauaaccucucacacuccuacgccaucgacgccgcaaaccacugcggaaccgucgccaacggcauccuccaaacuuucaugcgcauggccuggggaggaucuuacaucgcccuugacagcggaugcgguaacugggauugcaucaugaccuccuaccaauaccucauuauccaaaauacuaccugggaaaaccacugccaguucucccgccccagccccaucggauaccuaggucuacucucccaacgaacccgcgauaucuacaucucccgaagacgccgcggcaccuuuaccuggacacuauccgacucagaagguaacgccaccccagggggauacugccucacgagauggaugcucaucgaagcagaacuuaaaugcuucggcaacaccgccguagcaaaaugcaacgaaaaacacgacgaagaguucugcgacaugcuccgacucuucgacuucaacaaacaagccauaucacgucucaaauccccagcccaaauguccauacaacucauaaacaaagccguuaacgcacucaucaacgaccaacucaucaugaaaaaccaccuccgcgacauaaugugcauacccuacugcaacuacuccaaauacugguaccugaaccacaccauaaccggcaaaacuucacucccuaaaugcuggcucgucucgaacggaucauaccucaacgaaacucacuucuccgacgacaucgaacaacaagccgacaacaugaucaccgaaaugcuccaaaaagaauacauggaacgccaaggcaaaaccccacugggccucgucgaccucuucguauuuuccaccucauucuaccucaucuccaucuuccuccgccucguaaaaauccccacccaccggcacaucgucggaaaacccugccccaaaccccaucgacucaaccacaugggaauuugcucuugugggcuuuacaaacaaccaggcguacccguccgauggaaacgcuaaggacuaguaauaaggaaacuguaugaaugucugugggcaggaagugaagagauccuucuguaaagguuuuuggaauuaugucugcugaauaauaaacuuuuuugaaauaauaaaucugguagaaaaaugagaucuaaaaaaaaaaaaaaaaaaaaaaaaaaaaaaaaaaaaaaaaaaaaaaaaaaaaaaaaaaaaaaaaugcaucccccccccccccccccccccccccccccccaaaggcucuuuucagagccaccagaauu

SEQ ID NO: 6944 - RNA, 1813 nt, Artificial Sequence
  mRNA product Design b-4 comprising derived and/or modified sequence from LASV(Togo/2016/7082;Clade VI)__AMR44577__GPCstabilized (opt11)
gggagagucccgcagucggcguccagcggcucugcuuguucgugugugugucguugcaggccuuauucaagcuuaccaugggacaaaucaucaccuucuuccaagaagucccccacguaaucgaagaagucaugaacaucguacucauagcccucucccuacuagccauccucaaaggcgucuacaacgucgccacaugcggcaucauaggccucgucaccuuccuauuccucugcggccgcuccuguucccucaucuacaaaggcucguaugaauuacagacccucgaacucaacauggaaacccucaacaugaccaugccccucucaugcaccaaaaacagcucacaccacuacauccguguuggcaacgaaaccggacucgaauuaacccuuaccaacacauccaucaucaaccacaaguucugcaaccucucagacgcucacaaacgcaaccucuacgaccacgcccucauguccauccucuccaccuuccaccuuuccauccccaacuuuaaccaauacgaagccauguccugcgacuucaacggcggcaaaaucuccguccaauacaaccugucccacgccuacgccgucgacgccgccgaacacugcggcacagucgcaaacgguguccuacaaaccuucaugcguauggccuggggcggcuccuacauagcccuagacucuggauguggaaacugggacugcauaaugaccuccuaucaauaccuaaucauccaaaacacuacaugggaagaccacugccaauuuucccgacccucacccauaggcuaccucggccuccucucccaacgcacccgcgacauauacaucucucgucgccgccgcggcacauucaccuggaccuuaagugacucagaaggaaacgaaacccccggaggauacugccucacacgauggaugcucaucgaagcugaacuuaagugcuucggcaacacugccgucgccaaaugcaacgaaaaacacgacgaagaguucugcgacaugcuccgauuauucgacuucaacaagcaagccauccagcgacucaaaucccccgcccaaaugucgauccagcucauaaacaaagccgucaacgcccuuaucaacgaccaacucauaaugaaaaaccaccucagagacaugaugugcauaccguacugcaacuacuccaaguacugguaucucaaccacacauccuccggaagaaccucacuccccaaaugcuggcucguaucgaacggcucuuaccuaaacgaaacacacuuuagugacgacauugaacaacaagccgacaacaugaucaccgaaaugcuccaaaaagaauacaucgacagacaaggcaaaacaccccucggacucgucgaccuauucguauucucaaccucauucuaccucauauccaucuuucuccaccuaauaaaaauacccacccaccgacacaucgucggcaaacccugccccaaaccucaccgccuaaaccacaugggcaucugcuccugcggccucuacaagcaacccggaguccccacccgcuggaaacgauagggacuaguaauaaggaaacuguaugaaugucugugggcaggaagugaagagauccuucuguaaagguuuuuggaauuaugucugcugaauaauaaacuuuuuugaaauaauaaaucugguagaaaaaugagaucuaaaaaaaaaaaaaaaaaaaaaaaaaaaaaaaaaaaaaaaaaaaaaaaaaaaaaaaaaaaaaaaaugcaucccccccccccccccccccccccccccccccaaaggcucuuuucagagccaccagaauu

SEQ ID NO: 6945 - RNA, 1813 nt, Artificial Sequence
  mRNA product Design b-4 comprising derived and/or modified sequence from LASV(KAK-428;Clade n.d. (VII))__ANH09740__GPCstabilized (opt11)
gggagagucccgcagucggcguccagcggcucugcuuguucgugugugugucguugcaggccuuauucaagcuuaccaugggccaaaucguaaccuucuuccaggaaguaccccacgucaucgaagaaguuaugaacaucguacucaucgcccucucccuccuagcgauccuuaaaggacucuacaacuucgcaaccugcggcgucaucggacucauaacguuccuacuacucugcggacgcuccuguuccgccacguacaaaggccaauacgaacuccagacacuagaacucaacauggaaagccuaaacaugacgaugccccuauccugcaccaaaaacaacucacaccacuacauccgcgccgggaauaacaccggccuagaacuaacacucacaaacaccucgaucaucucccacaaauucugcaaccuaucagacgcccacaagaaaaaccucuacgaccacacgcucaugucaauuauuaccaccuuccaccucucgauaccaaacuucaaucaauacgaagccaugucaugcgacuucaacgguggcaaaaucucuauccaguacaacuugucccacuccuacgccggcgacgcggcccagcacugcggcaccguugcaaacggcguacugcagaccuucaugcgaauggccuggggaggcuccuaccucgcccuagacuccggcugccgcggaugggacugcaucaucuccaguuaccaauaccucaucauccaaaacaccacaugggacgaccacugccaauucucacgccccuccccgaucggcuaccucgguuucgucucccagaaaacgcgcgacauauacaucagccgccgacgucgcggcaccuucacauggacccucagcgacagcgaaggccacgacaugcccggcggcuacugccuaacccgauggaugcuaaucgaagccgaucucaagugcuucggcaacaccgccgucgcaaaaugcaacgaaaaacacgacgaagaguucugcgauauguggcgacucuucgacuucaacaaacaggccauccaaaggcuaaaggccccagcccaaaugaacauucaacuuauaaacaaagcagucaacgcccuuaucaacgaccaacucaugaugaagaaccaccuacgcgacaucaugugcauccccuacuguaacuacuccaaauucugguaccucaacaacaccaccaccggccgcaccucucucccacgcugcuggcucaucagcaacggcuccuaccuaaacgaaacccacuucuccgacgacaucgaacaacaagccgacaacaugauaacugaaaugcugcaaaaagaauacauggaccgucaaggcaaaacaccccucggccucgucgaccucuucguuuucuccaccagcuucuaccucaucaccaucuuccuacaccuugucaagauacccacccaccgccacaucgucggcaaacccugucccaaaccccaccgacucaaccacaugggaaucugcuccugcggccuauacaaacaaccaggcguccccguacgcuggaaacgcuaaggacuaguaauaaggaaacuguaugaaugucugugggcaggaagugaagagauccuucuguaaagguuuuuggaauuaugucugcugaauaauaaacuuuuuugaaauaauaaaucugguagaaaaaugagaucuaaaaaaaaaaaaaaaaaaaaaaaaaaaaaaaaaaaaaaaaaaaaaaaaaaaaaaaaaaaaaaaaugcaucccccccccccccccccccccccccccccccaaaggcucuuuucagagccaccagaauu

SEQ ID NO: 6946 - RNA, 1813 nt, Artificial Sequence
  mRNA product Design b-4 comprising derived and/or modified sequence from LASV(Pinneo-NIG-1969;Clade I)__AIT17836__GPCstabilized (opt11)
gggagagucccgcagucggcguccagcggcucugcuuguucgugugugugucguugcaggccuuauucaagcuuaccaugggacaaauaaucaccuucuuccaagaagugccccacgucauagaagaagucaugaauaucguccucaucgcacucucccuacucgccauacucaaagggcuguacaacauagcaaccugcggcaucauagggcucguugccuuccucuuccuuugcggcaaaucgugcucccucacccucaaaggcggcuacgaacuacaaacccucgaacucaauauggaaacccuaaacaugaccaugccacuauccuguacaaagaacucaucccaucacuacauccgcguaggcaaugaaacaggccucgaacucacacuaacuaacacguccauaauaaaccacaaauucugcaaccucucagacgcccacaagaaaaaccucuacgaccacgcccucauguccaucaucuccaccuuucaccuauccauucccaacuucaaccaauacgaagccauguccugcgacuucaacggcgguaaaaucucaguacaauacaaccucucacacuccuacgccggcgacgcagccgaacacugcggcaccguagccaacggcguacuacaaacauucaugcgcauggccuggggcggccgcuacauagcacuggacuccggcugcggaaacugggacugcaucaugacauccuaccaauaccucauaauccaaaacaccacaugggaagaccacugccaauucucccgcccaucacccaucggcuaccugggacuccuaucacaacgcacccgagacaucuacaucucccgacgccggcgcggcaccuucacauggacauuaucagacucugaaggcaaugagaccccaggaggcuacugccucacccgcuggaugcucaucgaagccgaacuaaaaugcuucggcaauaccgccguagccaaaugcaacgaaaaacacgaugaagaguucugcgacaugcuccgccuauucgacuucaacaaacaagcaaucagacgccucaaagccccagcccaaauguccauacagcuaauaaacaaagcagucaacgcucucaucaacgaccaacucaucaugaaaaaccaucuccgcgacaucauguguauccccuacugcaacuacagcaaauacugguaucuuaaucacaccuccuccggccgaaccucucuccccaaaugcuggcucauauccaacggauccuaccucaacgaaacccaguucagcgacgacaucgaacaacaagcggacaauaugaucaccgaaaugcuacagaaagaauacaucgaacgccaaggcaaaacaccacucggccuagucgacaucuucaucuucuccaccuccuucuaccucauuagcaucuuccuacaccucauaaaaauccccacacaccgccacaucgucggaaaaccgugccccaaaccucaccgucuuaaccacaugggcgucugcuccugcggccucuacaaacaccccggcguccccaccaaauggaaacgcuaaggacuaguaauaaggaaacuguaugaaugucugugggcaggaagugaagagauccuucuguaaagguuuuuggaauuaugucugcugaauaauaaacuuuuuugaaauaauaaaucugguagaaaaaugagaucuaaaaaaaaaaaaaaaaaaaaaaaaaaaaaaaaaaaaaaaaaaaaaaaaaaaaaaaaaaaaaaaaugcaucccccccccccccccccccccccccccccccaaaggcucuuuucagagccaccagaauu

SEQ ID NO: 6947 - RNA, 1813 nt, Artificial Sequence
  mRNA product Design b-4 comprising derived and/or modified sequence from LASV(ISTH0009-NIG-2011;Clade II)__AIT17404__GPCstabilized (opt11)
gggagagucccgcagucggcguccagcggcucugcuuguucgugugugugucguugcaggccuuauucaagcuuaccaugggucagaucauuaccuucuuccaggaagucccacacgucaucgaagaagucaugaacaucguacucaucgcccucagucuacucgcgauccuaaaaggcaucuacaacgucgcaaccugcggacucuuuggccuagucucuuuccuccuucucugcggacggucaugcuccaccaccuacaaaggcgucuacgaacuccaaacccucgaacuugacauggcaucccuaaauaugaccaugccgcucuccugcaccaaaaauaacucucaccacuacaucauggucggaaacgaaaccggccucgaacucacccuaacaaacacauccauuaucaaccacaaauuuugcaaccucuccgacgcucauaagaaaaaccucuacgaccacgcccucauguccaucauaucaaccuuccaccuaucaauaccaaacuucaaccaauacgaagccaugagcugcgacuucaacggaggaaagauaucaguccaauacaaccucucccacgccuacgcagucgacgcagccaaccacugcggcacaaucgccaacggcguacuacaaaccuucaugcgcauggccuggggcgguuccuacaucgcccucgacagcggaugcggaagcugggacugcauaaugacauccuaccaauacuuaaucauccaaaacaccacuugggaagaccacugccaauucucacgccccuccccaauaggauaccucggccuacucucgcaacgcacccgugacauauacauaucccgacgccgccgcggcaccuucacauggacccuauccgacagcgaaggcaacgaaacgccuggcggcuacugccucacccgcuggauguuaaucgaagccgagcuaaaaugcuucggcaacacagccguagccaaaugcaacgaaaaacacgacgaagaguucugcgacaugcucagacucuucgacuucaacaaacaagccauacgacgccucaaaaccccagcacaaauguccauccaacuaaucaacaaagccgucaacgcccuuauaaacgaccagcuuauaaugaaaaaccaccuccgcgacaucaugugcauccccuacugcaacuacagcaaauacugguaccuaaaccacacggucaccggcaaaacgucccucccccgcugcuggcuagucuccaacgguuccuaccucaacgaaacccacuucagcgacgacaucgaacaacaggccgacaacaugaucaccgaacuccuccaaaaagaauacauggaccgccaaggcaaaacaccccuaggccucgucgaccucuuugucuucagcaccucauucuaccucauaucuaucuuccuacaccuuaucaaaauccccacccacagacacaucaccggcaagcccugccccaaaccccaccgccucaaccacauggguaucugcagcugcggccucuacaaacacccuggcguacccguaaaguggaaacgcuaaggacuaguaauaaggaaacuguaugaaugucugugggcaggaagugaagagauccuucuguaaagguuuuuggaauuaugucugcugaauaauaaacuuuuuugaaauaauaaaucugguagaaaaaugagaucuaaaaaaaaaaaaaaaaaaaaaaaaaaaaaaaaaaaaaaaaaaaaaaaaaaaaaaaaaaaaaaaaugcaucccccccccccccccccccccccccccccccaaaggcucuuuucagagccaccagaauu

SEQ ID NO: 6948 - RNA, 1813 nt, Artificial Sequence
  mRNA product Design b-4 comprising derived and/or modified sequence from LASV(ISTH2010-NIG-2012;Clade II)__AIT17482__GPCstabilized (opt11)
gggagagucccgcagucggcguccagcggcucugcuuguucgugugugugucguugcaggccuuauucaagcuuaccaugggccaaaucauaacauucuuccaggaagucccgcacgucaucgaagaggucaugaacaucguacuaaucgcccugucccuccuagccauacuaaaaggcauauacaacguagccacaugcggccuauucggccuugucuccuuccuccuccucuguggccgcuccugcucaaccaccuacaaaggcguauacgaacuccaaacacuagaacucgacauggccucccucaacaugaccaugccccucucauguaccaagaacaacucacaccauuacaucauggucggcaacgaaaccggccuggaacucacccucacuaauaccagcaucaucaaccauaaauucugcaaccuauccgacgcccacaagaaaaaccucuacgaccacgcacuaaugucgaucaucucaaccuuccaccuaucuauccccaacuucaaccaauaugaggccauguccugcgacuucaacggcggcaaaauaagcguacaauacaaccucucccacgccuacgcugucgaugccgcuaaccacugcggaaccaucgcuaacggaguccuacaaaccuucaugcgaauggccuggggcggcagcuacaucgcccuagacuccggaugcggcagcugggacugcaucaugaccuccuaccaauaccuaaucauccaaaacaucaccugggaagaccacugccaauucagccgcccaucaccaaucggcuaccucggccuucucucucaacgaacccgagacaucuacaucucccgccgccgccgcggaaccuucaccuggacucucucugacucagaaggcaacgaaaccccaggaggauauugccucacccguuggaugcucaucgaagcagaacucaaauguuucggcaacaccgccgucgccaaaugcaacgaaaaacacgacgaagaguucugcgacaugcuccgacucuucgacuucaacaaacaagccauccggcgacucaaaacccccgcgcaaauguccauacagcucaucaacaaagccguaaacgcccucaucaacgaccagcuuaucaugaaaaaccaccuucgcgacaucaugugcauccccuacugcaacuacuccaaauauugguaccucaaccacaccguaaccgguaaaacgagccucccccgcugcuggcucgucuccaacggcuccuaccucaaugaaacccacuuuuccgacgacaucgaacaacaagccgacaacaugaucaccgaacuccuucaaaaagaauacauagaccgccaagguaaaaccccgcucggccuaguagaccuuuucguauucucaaccucuuucuaccuaaucuccaucuuccuccaccucgucaaaauccccacccaccgacacgucguagguaaaccaugccccaaaccccaccgacucaaucacauggguaucugcuccugcggacucuacaaacaucccggcguacccgucaaauggaaacgcuaaggacuaguaauaaggaaacuguaugaaugucugugggcaggaagugaagagauccuucuguaaagguuuuuggaauuaugucugcugaauaauaaacuuuuuugaaauaauaaaucugguagaaaaaugagaucuaaaaaaaaaaaaaaaaaaaaaaaaaaaaaaaaaaaaaaaaaaaaaaaaaaaaaaaaaaaaaaaaugcaucccccccccccccccccccccccccccccccaaaggcucuuuucagagccaccagaauu

SEQ ID NO: 6949 - RNA, 1813 nt, Artificial Sequence
  mRNA product Design b-4 comprising derived and/or modified sequence from LASV(Lassa virus/H.sapiens-wt/NGA/2015/ISTH_0543;Clade II)__AVO03639__GPCstabilized (opt11)
gggagagucccgcagucggcguccagcggcucugcuuguucgugugugugucguugcaggccuuauucaagcuuaccaugggccaaaucaucaccuucuuccaggaaguaccacacgucaucgaagagguaaugaacauaguccucaucgcacucucccuacucgccauauuaaaaggcaucuacaacguagcaaccugcggccuauucggccuagucucauuccuccuccucugcggccgcuccugcuccaccaccuacaaaggaguuuacgaacuccaaacccucgaacucgacauggcaaaccuaaacaugacaaugccucucuccugcaccaaaaacaacucacaccacuacaucauggucggcaacgagaccggccucgaacucacuuuaaccaacaccucaaucaucaaccacaaauucugcaaccuaucggacgcccacaagaaaaaccucuacgaccacgcccugaugucaaucaucucaacauuccaccucuccauacccaacuucaaccaauacgaagcaauguccugcgacuucaacggcggcaaaaucucuguacaauacaaccugucacacaccuacgccgucgacgccgccaaccacugcggaaccaucgccaacggcguccuacaaacauucaugcgcauggcguggggcggauccuacauagcucucgacuccgguugcggcuccugggacuguaucaugacauccuaccaauaccucgucauacaaaacacaaccugggaagaccacugccaauucucccgccccucuccaaucggcuaccugggccuccucagccaacgcacccgugacaucuacaucuccagacgcagacgcggaaccuucacauggacccucucagacuccgaaggcaacgagacccccggcggcuacugccuaaccagauggaugcugaucgaagcagaacugaaauguuucgguaacacugcaguagccaaaugcaacgaaaaacacgacgaagaguucugcgacaugcucagacuuuucgacuucaacaaacaagccauccgccgacuaaaaacccccgcccagaugucuauccaacucaucaacaaagccgucaacgcacucaucaacgaucaacucaucaugaaaaaccaccuccgcgacauuaugugcauaccuuacugcaacuacuccaaauauugguaccucaaccacacagucaccggcaaaaccagccucccccgcugcuggcucgucucaaacggcagcuaccuaaacgaaacccacuucucugaugacauugaacaacaggccgacaacaugauuacagaacuccuacaaaaggaauacaucgacagacaaggaaaaaccccucucggccuaguagaccucuucgucuucucaacauccuucuaccuaaucagcaucuuccuccaccucgucaaaauccccacccaccgccacauaaccggcaaacccugccccaaaccucaccgacucaaccacaugggaaucugcucauguggccucuacaaacaccccggcguacccgucaaauggaaacgcuaaggacuaguaauaaggaaacuguaugaaugucugugggcaggaagugaagagauccuucuguaaagguuuuuggaauuaugucugcugaauaauaaacuuuuuugaaauaauaaaucugguagaaaaaugagaucuaaaaaaaaaaaaaaaaaaaaaaaaaaaaaaaaaaaaaaaaaaaaaaaaaaaaaaaaaaaaaaaaugcaucccccccccccccccccccccccccccccccaaaggcucuuuucagagccaccagaauu

SEQ ID NO: 6950 - RNA, 1813 nt, Artificial Sequence
  mRNA product Design b-4 comprising derived and/or modified sequence from LASV(Lassa virus/H.sapiens-wt/NGA/2016/ISTH_0009;Clade II)__AVO03571__GPCstabilized (opt11)
gggagagucccgcagucggcguccagcggcucugcuuguucgugugugugucguugcaggccuuauucaagcuuaccaugggacaaaucaucaccuucuuccaagaagucccccacgucaucgaagaagucaugaauaucguccucauagcccuaucucuccuugcuauccucaaaggcaucuacaacgucgcaaccugcggccuacuagggcucgucuccuuccuacuacucugcggccgcuccugcucaaccaccuacaaaggcgucuacgaacuucaaacucucgaacucgauauggccucucuuaacaugacaaugccccucuccugcaccaaaaacaacucccaccacuacaucaugguuggcaaugaaacaggccucgaacucacccuaacaaacaccuccaucaucaaccacaaauucuguaaucucuccgacgcccacaagaaaaaccuauacgaccacgcccuuaugucuauaaucagcaccuuccaccucuccauacccaacuuuaaccaguacgaagccauguccugcgacuuuaacggcggacgcauauccguccaauacaaccugucacacuccuacgccguggacgcugccaaccacugcggcacaauugccaacggcguccugcaaaccuucaugcgcauggccuggggcggcuccuacauagccuuagacuccggaugcggcuccugggacugcaucaugacgucauaccaauaccucaucauacaaaacaccaccugggaagaccacugccaauuuucccgccccagcccaaucggcuaccucggccuucuaucccaacgaacccgcgacaucuacaucucacgccgccgccgcggcaccuucaccuggacccucuccgacuccgaaggcaacgaaacaccaggcggcuacugucucacacgcuggaugcucaucgaagccgaacuaaaaugcuucggcaacaccgccgucgccaaaugcaacgaaaaacacgacgaagaauuuugcgacaugcuacgacuuuucgacuucaacaaacaagcuauccgccgccuaaaaacccccgcucaaauguccauacaacucaucaacaaagccgucaacgcccucaucaacgaccaacuaaucaugaaaaaccaucuccgagacaucaugugcauccccuauuguaacuacuccaaauacugguaccuaaaccacaccguuaccgguaagacaucccuaccacgcugcuggcuagucucaaacggcuccuaccuaaacgaaacccacuucuccgacgacauagaacagcaagcagacaacaugaucacugaacuccuucaaaaagaauacaucgaccgccaagguaaaacaccccucggccucgucgaccuauucgucuucuccaccuccuucuaucuaauauccaucuuccuccaccucgucaaaauccccacccaucgccauaucacuggaaaacccugccccaaaccacaucgacuaaaccacauggguaucugcuccugcggccuauacaaccaccccggcgucccagucaaguggaaacgcuagggacuaguaauaaggaaacuguaugaaugucugugggcaggaagugaagagauccuucuguaaagguuuuuggaauuaugucugcugaauaauaaacuuuuuugaaauaauaaaucugguagaaaaaugagaucuaaaaaaaaaaaaaaaaaaaaaaaaaaaaaaaaaaaaaaaaaaaaaaaaaaaaaaaaaaaaaaaaugcaucccccccccccccccccccccccccccccccaaaggcucuuuucagagccaccagaauu

SEQ ID NO: 6951 - RNA, 1813 nt, Artificial Sequence
  mRNA product Design b-4 comprising derived and/or modified sequence from LASV(Lassa virus/H.sapiens-wt/NGA/2016/ISTH_0017;Clade II)__AVO03567__GPCstabilized (opt11)
gggagagucccgcagucggcguccagcggcucugcuuguucgugugugugucguugcaggccuuauucaagcuuaccaugggccagauuaucaccuucuuccaggaaguaccacacgucaucgaagaaguaaugaacaucguacucaucgcccuaucccuacucgcaauccucaaaggcaucuacaacguagcaaccugcggccucuucggacucguuuccuuccuccuccuuugcggccgcucaugcuccacaaccuacaaaggcgucuacgaacuacaaacacucgaacucgacauggccucccucaacaugaccaugccccucagcugcaccaaaaacaacagccaccacuacaucauggucggcaacgaaacaggacuugaacucacccucacaaacaccucaaucaucaaccacaaguucugcaaccuaagcgacgcgcacaagaaaaaccuauacgaccacgcccuaaugucaaucaucagcaccuuccaccucucgauucccaacuucaaccaauaugaagcaauguccugcgacuucaacggaggcaaaaucagcguccaguacaaccuaagccacacauacgccauagacgccgcaaaccacugcggcaccaucgccaauggcguccuccaaaccuucaugcgcauggccuggggaggcuccuacauagcacucgacuccggcugcggcucaugggacugcaucaugacauccuaccaauaccucaucauccaaaacacgacaugggaagaccacugccaauucucacgccccucccccauaggcuaccuaggccuccuaucacaacgcacccgcgacaucuacaucuccagacgacgucgagguaccuucaccuggacacucagcgacucagaaggcaacgaaacccccggcggauacugccucacccgcuggaugcuaauagaagcagaacucaaaugcuuuggcaacaccgcugucgcaaaaugcaacgaaaagcacgacgaagaguuuugcgacaugcuccgccucuucgacuucaacaaacaagccauccgucgccucaaaacacccgcccaaauguccauccagcuaaucaauaaagccguuaacgcacuuaucaacgaccaacucaucaugaaaaaccaccucagagacauuaugugcaucccauacugcaacuacuccaaauacugguaccuuaaccacacagucaccggcaaaaccucacuuccccgcugcuggcuagucuccaacggcucauaccucaacgaaacacacuuuagcgacgacauugaacagcaggcagacaacaugaucacagaacuacuccaaaaagaauacauggaccgccaaggaaaaacaccccuaggccuuguagaccuuuucgucuucuccaccuccuucuaccuaaucucaaucuuccuccaccucguucgaauccccacccaccgacaugucauaggaaaacccugccccaaaccccaccgacucaaccacaugggcaucuguuccugcggccucuauaaacaucccggaguccccguuaaauggaaacgcuaaggacuaguaauaaggaaacuguaugaaugucugugggcaggaagugaagagauccuucuguaaagguuuuuggaauuaugucugcugaauaauaaacuuuuuugaaauaauaaaucugguagaaaaaugagaucuaaaaaaaaaaaaaaaaaaaaaaaaaaaaaaaaaaaaaaaaaaaaaaaaaaaaaaaaaaaaaaaaugcaucccccccccccccccccccccccccccccccaaaggcucuuuucagagccaccagaauu

SEQ ID NO: 6952 - RNA, 1813 nt, Artificial Sequence
  mRNA product Design b-4 comprising derived and/or modified sequence from LASV(Lassa virus/H.sapiens-wt/NGA/2018/ISTH_0959;Clade II)__AVV65099__GPCstabilized (opt11)
gggagagucccgcagucggcguccagcggcucugcuuguucgugugugugucguugcaggccuuauucaagcuuaccaugggccaaaucaucacauucuuccaagaaguaccccacgucaucgaagaagucaugaacaucguucuaauagcccucucccuacuagccauccucaaaggcaucuauaacguagugaccugcggccuauuuggccucgucagcuuccuccuccuaugcggacgauccugcuccaccacauacaaaggagucuacgaacuacaaacacucgaacuugacauggccucccucaacaugaccaugccccucuccugcaccaaaaacaacucccaccauuacaucauggucggcaacgaaaccggccuagaacugacccucacaaauaccuccaucaucaaccacaaauucugcaaccuaagcgacgcccacaagaaaaaucucuacgaucacgcacucaugagcaucauauccaccuuccaccucuccauaccuaacuucaaccaauaugaagccaugucaugcgacuucaacggcggaaaaaucuccguccaauacaaccucagccacgccuacgccaucgacgccgccaaccacugcggaaccauagcgaacggagucuuacaaaccuucaugcgaauggcauggggcggcagcuacaucgcacucgacuccggaugcggcucaugggacugcaucaugaccuccuaccaauaccugauaauccaaaauaccaccugggaagaccauugccaauucagccgccccucccccauaggcuaccugggacuccuuucccaaagaacccgcgacaucuacaucucacgacggcgccgcggcacauucaccuggacccucuccgacagcgaaggcaaugaaaccccaggcggauacugccucacucgcuggaugcuaauagaagccgagcuaaaaugcuucggcaacaccgccgucgcaaaaugcaaugaaaaacacgaugaagaguucugcgacaugcuccgccuauucgacuucaacaaacaagccaucagacggcucaaaacaccagcccaaauguccauccaacucauuaacaaagccgucaacgcccuaaucaaugaccaacucauaaugaaaaaccaccuccgggacaucaugugcauaccauacugcaacuacuccaaauacugguaccucaaucacaccgucaccggcaaaaccucacuaccccgaugcuggcucgucuccaauggcucauaccuaaacgaaacucacuucucagacgacaucgaacaacaagccgacaacaugaucacagaacuccuacaaaaagaauacaucgaccgccaaggcaaaacaccccucggacucguagaucuauucguauucuccaccucauucuaccucaucuccaucuuccuccaccucgucaaaauaccaacccaccgccacgucauaggcaagcccugccccaaaccccaccgccucaaucacaugggcaucugcuccugcggccucuacaaacacccuggggucccaguaaaauggaaacguuagggacuaguaauaaggaaacuguaugaaugucugugggcaggaagugaagagauccuucuguaaagguuuuuggaauuaugucugcugaauaauaaacuuuuuugaaauaauaaaucugguagaaaaaugagaucuaaaaaaaaaaaaaaaaaaaaaaaaaaaaaaaaaaaaaaaaaaaaaaaaaaaaaaaaaaaaaaaaugcaucccccccccccccccccccccccccccccccaaaggcucuuuucagagccaccagaauu

SEQ ID NO: 6953 - RNA, 1813 nt, Artificial Sequence
  mRNA product Design b-4 comprising derived and/or modified sequence from LASV(LASV003-NIG-2008;Clade II)__AIT17580__GPCstabilized (opt11)
gggagagucccgcagucggcguccagcggcucugcuuguucgugugugugucguugcaggccuuauucaagcuuaccaugggucaaaucauaacauucuuccaagaaguuccacacgucaucgaagaagucaugaacaucguccucauagcccucucccuccucgcaauucucaaaggcaucuacaauguagccaccuguggccuauucggacucgucagcuuccuacuccuaugcggccgcuccugcuccaccaccuacaaagguguauacgagcuacaaacacucgaacucgacauggccucacucaacaugaccaugccacucuccugcaccaaaaacaacucccaccacuauaucauggucgguaacgaaacuggccucgaacuaacgcucacaaacacauccauaauaaaucacaaauucugcaaucucucagacgcccacaagaaaaaccuuuacgaccacgcccucaugucaaucaucuccaccuuccaccucuccauccccaacuucaaccaguacgaagcaaugucaugcgacuucaacggcggaaaaaucuccguccaauacaaccucucacacaccuacgccgucgacgcagccaaccacugcgguaccauagcaaacggaguacuccaaacauucaugcgcauggccuggggcggcuccuacauugcccuggacucaggcugcggcuccugggauugcaucaugacaagcuaccaauaucucaucauccaaaacaccacaugggaagaucacugucaauucucccgccccucaccaaucggauaccucggucuucucucccaacgaacccgcgacaucuacaucucccgccgucgacgcggcaccuucaccuggacccucuccgacuccgaauccaaugaaacucccggaggcuacugccucacucgcuggaugcuaaucgaagccgaacucaaaugcuuuggcaacaccgccguugcaaaaugcaacgaaaaacacgacgaggaguucugcgacaugcuacgccuuuucgacuuuaacaaacaagccauacgacgccucaaagcccccgcacaaauguccauccaacucaucaacaaagcagucaacgcccucaucaacgaucaacucauaaugaaaaaccaccuucgcgauaucaugugcauucccuacuguaacuacucgaaauacugguaccucaaccacaccgucaccggccgcaccucacucccccgcuguuggcucgucuccaacggcucuuaccucaacgaaacccacuucucagacgacaucgaacaacaagccgacaacaugaucaccgaacuccuccagaaagaauacauggaccgacaaggcaaaacuccacucggacucguagaccucuucgucuucucuaccuccuucuaccucauauccaucuuccuccacuuggucaaaauccccacacaccgccaugucaucggaaaaccaugccccaaaccacaccgccucaaucacaugggaauaugcagcugcggccucuacaaacaccccggcguacccgucaaauggaaacgcuaaggacuaguaauaaggaaacuguaugaaugucugugggcaggaagugaagagauccuucuguaaagguuuuuggaauuaugucugcugaauaauaaacuuuuuugaaauaauaaaucugguagaaaaaugagaucuaaaaaaaaaaaaaaaaaaaaaaaaaaaaaaaaaaaaaaaaaaaaaaaaaaaaaaaaaaaaaaaaugcaucccccccccccccccccccccccccccccccaaaggcucuuuucagagccaccagaauu

SEQ ID NO: 6954 - RNA, 1813 nt, Artificial Sequence
  mRNA product Design b-4 comprising derived and/or modified sequence from LASV(LASV035-NIG-2009;Clade II)__AIT17588__GPCstabilized (opt11)
gggagagucccgcagucggcguccagcggcucugcuuguucgugugugugucguugcaggccuuauucaagcuuaccaugggccaaaucaucaccuucuuccaagaagucccucacgucaucgaagaagucaugaacaucguccucauagcccucucucuacucgccauccucaaaggcaucuacaacgucgcaaccugcggccucuucgggcucguaucguuccuccuccucugcggaagauccugcucaaccaccuacaaaggcgucuacgaacuccaaacccucgaacucgacauggccucacuuaacaugaccaugccccucuccugcaccaaaaacaacucccaccauuacaucauggucgguaacgagaccggccuagaacuaacacucaccaacaccucuauaaucaaccacaaauucugcaaccuaucagacgcccacaagaaaaaccuuuacgaccacgcccuuauguccaucaucuccaccuuccaccuauccauacccaacuucaaccaauacgaagccauguccugcgacuucaauggcggcaaaaucuccguccaauacaaccucucccacgcauacgccgucgacgccgccaaccacuguggcaccaucgccaacgggguacuacaaaccuucaugcgcauggccuggggagguucguacaucgcccucgacucaggaugcggcucaugggacugcaucaugaccuccuaucaauaccucaucauccaaaacaccaccugggaagaccacugccaauuuucaagacccucccccauaggcuaccuaggccugcucucacaacgcacccgagacaucuacaucucccgccgacgacgcggaacauucacauggacucucuccgacucagagggcaacgaaacccccggcggcuacugccuaaccagauggaugcuaaucgaggccgaacucaaaugcuucggcaacaccgccgucgcaaaaugcaacgaaaaacacgacgaagaguucugcgacaugcuccgacucuucgacuucaacaaacaagccauucgacgccuaaaagcccccgcacagaugucaauccaacucaucaacaaagccguaaacgcccuaaucaacgaccaacuaaucaugaaaaaccaccuccgcgacaucaugugcaucccuuauugcaauuacuccaaauacugguaccucaaccacaccgucaccggaaaaacaucccuaccccgaugcuggcuaguauccaacggcuccuaccucaaugaaacgcacuucucagacgacaucgaacaacaagccgauaacaugauaaccgaacuucuccaaaaagaauacaucgacagacagggcaaaacaccccucggacucgucgaccuauucguauucucuaccucauucuaccuaauuucgaucuuccuccaccucgucaaaauacccacccaccgacacguuaucggcaaacccugccccaagccccaccgccucaaccacaugggcauaugcuccugcggccucuacaaacacccaggcguccccgucaaguggaaacgcuaaggacuaguaauaaggaaacuguaugaaugucugugggcaggaagugaagagauccuucuguaaagguuuuuggaauuaugucugcugaauaauaaacuuuuuugaaauaauaaaucugguagaaaaaugagaucuaaaaaaaaaaaaaaaaaaaaaaaaaaaaaaaaaaaaaaaaaaaaaaaaaaaaaaaaaaaaaaaaugcaucccccccccccccccccccccccccccccccaaaggcucuuuucagagccaccagaauu

SEQ ID NO: 6955 - RNA, 1813 nt, Artificial Sequence
  mRNA product Design b-4 comprising derived and/or modified sequence from LASV(LASV1000-NIG-2009;Clade II)__AIT17782__GPCstabilized (opt11)
gggagagucccgcagucggcguccagcggcucugcuuguucgugugugugucguugcaggccuuauucaagcuuaccaugggccaaauaaucaccuucuuccaagaaguaccucacgucauagaagaagucaugaacaucguccucaucgcccucucccuccucgccauacucaaaggcaucuacaacgucgcaaccuguggccucuucggccucgucucauuccuccuacucugcggcagaucaugcucaaccacauacaaaggcguauacgaacuucagacccucgaacucgacauggccucccucaacaugaccaugccccucuccugcaccaagaacaacucccaucacuacaucauggucggcaacgaaaccggacuagaacucacacuuacgaacaccuccaucaucaaccacaaauucugcaaccuaagcgacgcccacaagaaaaaccuguacgaccacgcucucauguccauaaucuccaccuuccaccucuccauccccaacuucaaccaauacgaagcaaugagcugcgacuucaacggcggcaaaauaucaguccaauacaaccuaucccacaccuacgccgucgacgccgcaaaccacugcggcacaaucgccaacggcguccuccaaaccuucaugcgcauggccuggggcgguagcuacaucgcccucgacuccggcugcggaucaugggacuguaucaugacauccuaucaguaccuaaucauccaaaacaccaccugggaagaccacugccaauuuucccgacccucccccauagguuaccucgggcuccucucccaacgcacacgcgacaucuacaucucucgcagacgccgcggaaccuucaccuggacacucucagacucagaaggcaacgaaacucccggaggauacugccucacacgcuggaugcucaucgaagccgaacucaaaugcuucggaaacaccgcaguagcaaaaugcaacgaaaaacacgacgaagaauuuugcgacaugcucagacuauucgacuucaacaaacaagcuauaaaacgccucaaaacccccgcccaaauguccauccaacucaucaacaaagccgucaacgcacuaaucaacgaccaacuaaucaugaagaaccaccuacgcgacaucaugugcaucccuuacugcaacuacuccaaauacugguaccucaaccacacagucaccggaaaaacuucauuaccccgaugcuggcuggucuccaacggcuccuaccucaacgaaacgcacuucuccgacgacaucgaacaacaagccgacaacaugauaaccgaacuccuccaaaaagaauauaucgaccgccaaggcaaaacuccccucggccucgucgaccucuucguguucucuacauccuucuaccucaucucaaucuuccuacaucucguaaaaauuccaacccaccgccauguaguaggcaaacccugccccaaaccccaccgccucaaccacauggggaucugcucuugcggccuguacaaacaccccggcgucccaguuaaauggaaaagguagggacuaguaauaaggaaacuguaugaaugucugugggcaggaagugaagagauccuucuguaaagguuuuuggaauuaugucugcugaauaauaaacuuuuuugaaauaauaaaucugguagaaaaaugagaucuaaaaaaaaaaaaaaaaaaaaaaaaaaaaaaaaaaaaaaaaaaaaaaaaaaaaaaaaaaaaaaaaugcaucccccccccccccccccccccccccccccccaaaggcucuuuucagagccaccagaauu

SEQ ID NO: 6956 - RNA, 1813 nt, Artificial Sequence
  mRNA product Design b-4 comprising derived and/or modified sequence from LASV(LASV221-NIG-2010;Clade II)__AIT17624__GPCstabilized (opt11)
gggagagucccgcagucggcguccagcggcucugcuuguucgugugugugucguugcaggccuuauucaagcuuaccaugggccaaauaaucaccuucuuccaagaaguuccccacguaaucgaggaagucaugaacaucguccucaucgcccuaucccuacuugcuauacucaaaggcauauacaaugucgcaaccugcggccucuucgggcuaguaucuuuccuccuacucugcggccguuccugcuccaccaccuacaaaggcgucuacgaacuccaaacacucgagcucgacauggccucccucaacaugacaaugccccuauccuguaccaagaacaacucccaccacuacaucaugguugguaacgaaacaggccuagagcucacacucaccaacaccuccauuaucaaccacaaauucuguaaccucuccgacgcccauaagaaaaaccucuacgaccacgcccucaugagcaucaucuccaccuuccaccucuccauccccaacuucaaccaauacgaagccauguccugcgacuucaacggaggcaaaaucuccguccaauacaaccucucccacacuuacgccaucgacgccgcgaaccacugcggaaccaucgccaacggcguucuccaaaccuucaugcgcauggccuggggaggcucauacaucgcacuagacuccggaugcggcuccugggacuguaucaugaccuccuaccaauaccucauuauacaaaauacaaccugggaagaccacugccaauucucccgaccauccccaaucggauaccucggccuccucucacaacgaacccgagacaucuacaucucucgccgccgccgaggcacauucacguggacacucuccgacuccgagggcaacgaaacccccggaggcuauugccuaacucgcuggaugcucaucgaagccgaacuaaaaugcuucggcaacaccgccgucgcaaaaugcaacgaaaaacacgacgaagaguucugcgacaugcuccgacucuucgacuucaacaaacaggccauccgccgccuuaaaaccccagcacaaauguccauccaacugaucaacaaagccguaaaugcucuaaucaacgaccaacucauaaugaaaaaccaccuccgagacaucaugugcauccccuacuguaacuacuccaaauacugguaccucaaccacaccguaacaggaaaaaccucccuaccacgcugcuggcucgucagcaacggcuccuaccuaaacgaaacccacuuuucugacgacauagaacaacaagccgacaacaugauaacggaaaugcuacaaaaagaauacauggaccggcaaggcaaaaccccgcucggccucguagaccucuucgucuucuccaccuccuucuaccucaucuccaucuuccuccaccucgucaagauccccacccacagacacguaaucggcaaaccuugccccaaaccccacagguugaaccacaugggcaucugcuccugcggccuauacaaacacccaggcguaccagucaaguggaaacgcuaaggacuaguaauaaggaaacuguaugaaugucugugggcaggaagugaagagauccuucuguaaagguuuuuggaauuaugucugcugaauaauaaacuuuuuugaaauaauaaaucugguagaaaaaugagaucuaaaaaaaaaaaaaaaaaaaaaaaaaaaaaaaaaaaaaaaaaaaaaaaaaaaaaaaaaaaaaaaaugcaucccccccccccccccccccccccccccccccaaaggcucuuuucagagccaccagaauu

SEQ ID NO: 6957 - RNA, 1813 nt, Artificial Sequence
  mRNA product Design b-4 comprising derived and/or modified sequence from LASV(LASV237-NIG-2010;Clade II)__AIT17638__GPCstabilized (opt11)
gggagagucccgcagucggcguccagcggcucugcuuguucgugugugugucguugcaggccuuauucaagcuuaccaugggccaaauaaucaccuucuuucaagaagucccccacgucaucgaagaggucaugaacauuguccucauagcccuaucccuacucgcaauccucaaaggcauuuacaacgucgcuaccugcggccuauucggccuagucagcuuccuccucuuaugcggccgcuccugcucaacaacauacaaaggcguuuacgaguuacaaacccucgaacuagacauggccucucuaaacaugaccaugccccuuuccugcacuaaaaacaacucucaccacuauauuaugguaggcaacgagacaggccuugaacucacccucaccaacaccuccaucauaaaccacaaauucugcaaccuauccgacgcccacaaaaaggaccuuuacgaccacgcccucaugucaaucauaagcaccuuccaccucagcauucccaacuucaaucaauacgaagccauguccugcgauuucaacggcggcaaaaucuccguccaauacaaccuuagccacaccuacgccgucgacgccgccaaccacugcggaaccaucgcaaacggcguacuccagacauucaugcgcauggccuggggcgguuccuacaucgcccucgacucuggcugcggcuccugggacugcaucaugaccuccuaccaauaccucauaauccaaaacacaacaugggaagaccacugccaauucucccguccaucucccaucgguuaccucggccuacuuucccaacgaacccgagacaucuacaucagccgacgucgucgcggcacauucaccuggacacuauccgacucugaaggcaacgaaacccccggcggauauugccuaacccgauggaugcucauagaagccgaacucaaaugcuucggcaacaccgccgucgccaaaugcaacgaaaaacacgacgaagaguucugcgacaugcuacgccucuucgacuucaacaaacaagccauccgucgccuaaaaaccccagcccaaaugucaauacagcucaucaacaaggccgucaacgcccucaucaacgaccaacucaucaugaagaaccaccuccgugacaucaugugcauccccuacugcaacuacucaaaauauugguaccuuaaccacacagucacgggcaaaaccucccucccccgcugcuggcucgucuccaacggauccuaccucaacgaaacucacuucuccgacgacaucgaacaacaagccgacaacaugaucaccgaacuacuccaaaaagaauacauggaccgccaaggcaagacuccccucggccucgucgaccucuucguuuucuccaccuccuucuaccucaucagcaucuuccuacaccucaucaaaaucccgacccaccgccacaucaccggcaaacccugcccgaaaccccaccggcuaaaccacaugggcaucugcuccugcggccucuauaaacaccccgguguccccgucaaauggaaacgauaaggacuaguaauaaggaaacuguaugaaugucugugggcaggaagugaagagauccuucuguaaagguuuuuggaauuaugucugcugaauaauaaacuuuuuugaaauaauaaaucugguagaaaaaugagaucuaaaaaaaaaaaaaaaaaaaaaaaaaaaaaaaaaaaaaaaaaaaaaaaaaaaaaaaaaaaaaaaaugcaucccccccccccccccccccccccccccccccaaaggcucuuuucagagccaccagaauu

SEQ ID NO: 6958 - RNA, 1813 nt, Artificial Sequence
  mRNA product Design b-4 comprising derived and/or modified sequence from LASV(LASV253-NIG-2011;Clade II)__AIT17670__GPCstabilized (opt11)
gggagagucccgcagucggcguccagcggcucugcuuguucgugugugugucguugcaggccuuauucaagcuuaccaugggccaaaucaucaccuucuuccaagaaguaccacacguaaucgaagaagucaugaacauaguccucauagcacucucccuacucgccauacuuaaaggaauuuacaacguagcaaccugcggucucuucggccuugucuccuuccucuuacugugcggccgaagcugcuccacaacauacaaaggagucuacgaacuacagacccucgaacucgacauggcaucccucaacaugaccaugccccuauccuguaccaaaaacaacucacaccacuacaucaugguagguaacgaaacaggacuugaacuaacccucaccaacacuucaaucauaaaccacaaauucugcaaccucuccgacgcccacaaaaaaaaccucuacgaccacgccuugauguccaucauauccaccuuccaccucuccaucccaaacuuuaaccaauacgaagccauguccugcgacuucaacggaggcaaaauaucaguacaauauaaccuaucccacaccuacgcagucgacgccgccaaccacugcggcaccauagccaacggaguccugcagacauucaugcgaauggcaugggguggaucuuacaucgcucuagacuccgggugcggcuccugggacugcaucaugaccucauaucaauaccucaucauacaaaacaccaccugggaggaccacugucaauucucccgcccuucccccauaggcuaccuggggcuccuaucccaaagaacccgcgacauauacauaucccgccgucgucgaggcaccuucacauggacccucagcgacucagaaggcaacgaaacccccggcggcuacugccucacccguuggaugcuaauagaagcagaacucaaaugcuucggcaacaccgcggucgccaaaugcaacgagaaacacgacgaagaauucugcgacaugcuccgccuauucgacuucaacaaacaagcaauccgccgccuuaaagcccccgcccaaaugucaauccaacucaucaacaaagccguaaacgcacucaucaacgaccaacucaucaugaaaaaccaccuccgcgacauaaugugcauccccuacugcaacuacuccaaauacugguaccucaaccacaccgucaccggccgcaccucucucccccggugcuggcuugucucaaacggcuccuaccucaaugaaacccacuucuccgacgacauagaacaacaagccgacaacaugaucacagaacuccuccaaaaagaauacaucgaccgccaaggcaaaaccccccucggacuagucgaccucuucguuuucuccaccuccuucuaccucaucuccaucuuccuccaccucgucaaaauacccacccaccgucacaucaucggcaaaccaugccccaaaccccaccgccucaaccacaugggcauaugcuccugcggacuguacaaacaccccggaguaccaguaaaauggaaacgcuaaggacuaguaauaaggaaacuguaugaaugucugugggcaggaagugaagagauccuucuguaaagguuuuuggaauuaugucugcugaauaauaaacuuuuuugaaauaauaaaucugguagaaaaaugagaucuaaaaaaaaaaaaaaaaaaaaaaaaaaaaaaaaaaaaaaaaaaaaaaaaaaaaaaaaaaaaaaaaugcaucccccccccccccccccccccccccccccccaaaggcucuuuucagagccaccagaauu

SEQ ID NO: 6959 - RNA, 1813 nt, Artificial Sequence
  mRNA product Design b-4 comprising derived and/or modified sequence from LASV(LASV254-NIG-2011;Clade II)__AIT17674__GPCstabilized (opt11)
gggagagucccgcagucggcguccagcggcucugcuuguucgugugugugucguugcaggccuuauucaagcuuaccaugggccaaaucaucaccuucuuccaagaagucccccacgucauugaagaagucaugaacaucguccucauugcccugucccuacucgccauccucaaaggcaucuacaacgucgcaaccugcggucuauuuggccucgucagcuuccuccugcuaugcggccguuccugcuccaccaccuacaaaggcgucuacgaacuucaaacccucgaacucgacaugacaaaucuaaacaugaccaugccccugucuugcaccaaaaacaacagccaccacuacaucauggucggcaacgaaaccggccuagaacucacccuaaccaacacauccaucaucaaccacaaauucugcaaccucuccgacgcccauaagaaaaaccucuauaaccacgcccucauguccauaaucucaacauuccaccucucaauaccaaauuuuaaccaauaugaagccauguccugcgacuucaacggcggcaaaaucucaguacaauacaaucucucccacucuuacgccguagacgcagccaaccacugcggaaccauagccaacgguguccuccagaccuucaugcgcauggccuggggaggaucauacaucgcccucgacagcggcugcggaaacugggacugcaucaugaccuccuaccaauaccucaucauucaaaacaccaccugggaagaccacugccaguucucccgccccagcccaaucggauaccuaggccuccucucccaaagaacccgcgacaucuacaucucccguagacgacguggcacauucaccuggacacuaucugacuccgaaggcaacgaaacccccgguggauacugccucacccgcuggaugcucauugaagccgaacucaaaugcuucggaaacacagcagucgccaaaugcaacgaaaaacaugacgaagaguucugcgacaugcuccgccucuucgacuucaacaaacaagccaucagacgccucaaaacccccgcacaagccaacauacaacucaucaauaaagccgucaaugcacucauaaacgaccaacucaucaugaaaaaccaccuccgagacauaauguguauccccuacugcaacuauuccaaauacugguaccuuaaccacaccgucaccgguaaaaccucccucccccgcugcuggcucguauccaacggcuccuaccucaacgaaacccacuucuccgacgacaucgaacaacaagcagacaacaugaucaccgaacuucuacaaaaagaauacauggacagacagggcaaaacgccgcucggacucgucgaccuauucgucuucagcaccuccuucuaccuaauauccaucuuccuacaccuggucaaaauucccacgcaccgacacguaaucggaaaacccugucccaaaccccaccgacucaaccauaugggcaucugcagcugcggccuuuacaaacaccccggcguccccgucaaauggaaacgcuaaggacuaguaauaaggaaacuguaugaaugucugugggcaggaagugaagagauccuucuguaaagguuuuuggaauuaugucugcugaauaauaaacuuuuuugaaauaauaaaucugguagaaaaaugagaucuaaaaaaaaaaaaaaaaaaaaaaaaaaaaaaaaaaaaaaaaaaaaaaaaaaaaaaaaaaaaaaaaugcaucccccccccccccccccccccccccccccccaaaggcucuuuucagagccaccagaauu

SEQ ID NO: 6960 - RNA, 1813 nt, Artificial Sequence
  mRNA product Design b-4 comprising derived and/or modified sequence from LASV(Nig08-A19;Clade III)__ADU56618__GPCstabilized (opt11)
gggagagucccgcagucggcguccagcggcucugcuuguucgugugugugucguugcaggccuuauucaagcuuaccaugggccaaaucgucacauucuuccaagaaguuccccacgucauagaagaagucaugaauaucguccuaaucgcccucuccauccucgccauucucaaaggacuauacaacaucgcaaccugcggccucaucggccuugucacauuccuucuacucuccggccgauccugcucaaugaccuacaagggagucuacgaacuacaaacacucgaacuaaacaugaacacccuaaacaugacuaugccccucuccugcaccaaaaacaacagccaccacuacaucauggucgggaacgaaaccggacuagagcuaacccucaccaacaccucccuccuccaccacaaguucugcaaccuauccgacgcccacaagaaaaaccucuacgaccacacccucaugucaauaaucuccaccuuccaccucuccauccccaacuucaaccaauacgaagccaugucgugcgacuuuaacggcggcaaaauaacaguccaauacaaccucucccacucguacgccauagacgccgccaaccacugcggcaccgucgcaaacggaguccuacaaaccuucaugcgcauggcauggggcggaucauacaucgcccucgacuccggcugcggcaaaugggacugcaucaugaccagcuaccaauaccucaucauccaaaacacaaccugggaggaccacugccaauucucgcgucccucacccaucggcuaccucggacuccucucccaacgcacccgcgacaucuacauaagccgacgccgccgcggcaccuucaccuggacacuuuccgacuccgaagguaacgaaacccccggaggauacugccucacgcgcuggaugcugauagaagcagaacucaaaugcuucggcaacaccgccgucgccaaaugcaacgaaaaacacgaugaagaguucugcgacaugcuucgccuuuucgauuucaacaaacaagcuauacgccgccucaaagccccagcccaaaugucaauccaacuaauuaacaaagcagucaacgcucucaucaacgaccaacucauaaugaaaaaccaccuaagagacaucaugugcauccccuacugcaacuacuccaaauacugguaucucaaccacacuuccaccggacgaaccagccucccacgcugcuggcuaguauccaacggcucauaccucaacgaaacucacuucucggacgacaucgaacaacaagcagacaacaugaucaccgaaaugcuccaaaaagaauaccucgaccgacaaggcaaaaccccucuagggcucguugaucucuucgucuucucaacaucuuucuaccucaucuccauauuccuucaccucgucaagauccccacacaccgccacaucguaggaaaacccugcccaaaaccacaccgacucaaucacaugggcaucugcagcugcggccucuacaagcaacccggcguacccguccgcuggaagcgcuagggacuaguaauaaggaaacuguaugaaugucugugggcaggaagugaagagauccuucuguaaagguuuuuggaauuaugucugcugaauaauaaacuuuuuugaaauaauaaaucugguagaaaaaugagaucuaaaaaaaaaaaaaaaaaaaaaaaaaaaaaaaaaaaaaaaaaaaaaaaaaaaaaaaaaaaaaaaaugcaucccccccccccccccccccccccccccccccaaaggcucuuuucagagccaccagaauu

SEQ ID NO: 6961 - RNA, 1816 nt, Artificial Sequence
  mRNA product Design b-4 comprising derived and/or modified sequence from LASV(G1180-SLE-2010;Clade IV)__AIT17168__GPCstabilized (opt11)
gggagagucccgcagucggcguccagcggcucugcuuguucgugugugugucguugcaggccuuauucaagcuuaccaugggccaaauagucaccuucuuccaagaaguaccccacgucaucgaagaagucaugaacauaguccucauagcccucuccauacucgccguccucaaaggccuuuacaacuucgcaaccugcggccuagucggccugcuaaccuuccuacuacucugcggcagauccuguaccgccucacgcuacaaaggagucuacgaguuacaaacacucgaacucaacauggaaacccucaacaugacaaugccccucuccugcacgaaaaauaauucacaccacuacaucauggucggcaacgaaaccggccucgaacucacccucaccaacacaagcaucaucaaccacaaauucugcaaccuaucagacgcacacaagaaaaaccuguacgaccacgcccuaauguccaucaucucuacauuccaccuguccaucccaaacuucaaccaauacgaagcaaugagcugcgacuucaacggcgggaaaaucuccguccaauacaacuuaagccacagcuacgccggagacgccgcaaaccacugcggaacagucgcaaacggcguccuucaaaccuucaugcgcauggccuggggcggcuccuacauugcacuggacuccggcugcggcuccugggacugcaucaugaccuccuaucaauaccuaauaauacaaaacacaaccugggaagaccauugccaauucucccgcccaucacccaucggauaccuaggccuacucucccaacgaacucgagacaucuacaucucccgacgccgccgaggcaccuucaccuggacccucuccgacucagaaggcaaagacacucccggcggauacugccucacccgcuggaugcuuaucgaagccgaacucaaaugcuucggcaacacagccgucgccaaaugcaacgaaaaacacgacgaagaguucugugacaugcuccgacucuucgacuucaacaaacaagccauccaacgccuaaaagcaccagcacaaauguccauccaacucaucaacaaagccgucaaugcccucauuaacgaccaacucaucaugaaaaaccaccuccgagacaucaugugcaucccuuacugcaacuacuccaaauacugguaccuaaaccacaccacaaccggaaaaacaucccuccccaaaugcuggcuuguauccaacggcucauaucucaacgaaacccacuucuccgacgacaucgaacaacaagcagacaacaugauaacagaaaugcuacaaaaagaauacauggaacgacaaggaaaaacaccccuaggcuuggucgaucuauucgucuuuagcacaucauucuaccucauaucaauauuccuccaccucguaaaaauccccacccaccgccacauagucggcaaauccugcccaaaaccacaccgacucaaccacaugggcauauguucaugcggccucuacaaacaacccggcguacccgugaaauggaaacgcuagggacuaguaauaaggaaacuguaugaaugucugugggcaggaagugaagagauccuucuguaaagguuuuuggaauuaugucugcugaauaauaaacuuuuuugaaauaauaaaucugguagaaaaaugagaucuaaaaaaaaaaaaaaaaaaaaaaaaaaaaaaaaaaaaaaaaaaaaaaaaaaaaaaaaaaaaaaaaugcaucccccccccccccccccccccccccccccccaaaggcucuuuucagagccaccagaauu

SEQ ID NO: 6962 - RNA, 1816 nt, Artificial Sequence
  mRNA product Design b-4 comprising derived and/or modified sequence from LASV(G1442-SLE-2011;Clade IV)__AIT17180__GPCstabilized (opt11)
gggagagucccgcagucggcguccagcggcucugcuuguucgugugugugucguugcaggccuuauucaagcuuaccaugggccaaaucgucaccuucuuccaagaaguaccccacguaaucgaagaagucaugaacaucguccucaucgcacucuccauccuagccguccuaaaaggacuuuacaacguugccacaugcggucuaaucggacucgucaccuuccuccuccugugcggccgcucauguaccaccacacucuacaaaggcgucuacgaacuccaaacacuagaacucaauauggagacccuuaacaugacaaugccccuaagcugcaccaaaaacaauucucaccacuacauccggguagggaaugaaacagggcuagaacucacccucaccaacaccuccaucaucaaccacaaauucugcaaccuauccgacgcccacaagaaaaaccuauacgaccacgcccucauguccaucaucagcaccuuucaccuauccauacccaacuucaaccaauacgaagccauguccugcgacuucaacggcggcaaaauauccguacaauacaaccuaucccacucuuacgccggcgacgcagccaaccacugcggcacagucgcaaacgguguccuacaaacauucaugcgcauggcauggggcggauccuacaucgcccuugacuccggcugcgguaacugggacugcaucaugaccuccuaccaauaccucaucauccaaaacaccacaugggacgaccacugccaauucagcagacccagcccuauaggcuaccuaggccuacucucacaacgcacccgcgacguuuacaucagccgacgacgccgcggaaccuucaccuggacccucuccgacagcgagggcaaagacaccccaggcggcuacugccucacccgcuggaugcucauagaagccgaauuaaaaugcuucggcaacaccgccguagccaaaugcaacgaaaaacacgacgaagaguucugcgacaugcuccgccucuucgacuucaacaaacaagccauucaacgucucaaagcccccgcccaaauguccauccaacucauaaacaaagccguaaacgcccucaucaacgaccaacucaucaugaaaaaccaucugcgagacaucaugugcaucccguacugcaauuacucaaaauacugguaccuaaacaacaccgcuacaggcaaaacaucccuccccaaaugcuggcucaucuccaacggauccuaucuaaacgaaacccacuucuccgacgacaucgaacaagaagccgauaacaugaucaccgaaaugcuccaaaaagaauacauggaacgccaagguaaaacuccccucggccuugucgaccuauucguuuucucaaccucauuuuaccucauauccauauuccuccaccuaguuaaaauacccacccaccgccacaucgucggaaaauccugccccaaaccccaccgccucaaccacaugggcaucugcucaugcggucuauacaaacaacccggaguaccaguccgcuggaaacgcuaaggacuaguaauaaggaaacuguaugaaugucugugggcaggaagugaagagauccuucuguaaagguuuuuggaauuaugucugcugaauaauaaacuuuuuugaaauaauaaaucugguagaaaaaugagaucuaaaaaaaaaaaaaaaaaaaaaaaaaaaaaaaaaaaaaaaaaaaaaaaaaaaaaaaaaaaaaaaaugcaucccccccccccccccccccccccccccccccaaaggcucuuuucagagccaccagaauu

SEQ ID NO: 6963 - RNA, 1816 nt, Artificial Sequence
  mRNA product Design b-4 comprising derived and/or modified sequence from LASV(G3010-SLE-2013;Clade IV)__AIT17344__GPCstabilized (opt11)
gggagagucccgcagucggcguccagcggcucugcuuguucgugugugugucguugcaggccuuauucaagcuuaccaugggccagauagucaccuucuuucaagaagucccccacguaauagaagaggucaugaacaucguccuaauagcccucucaauccuagccguccuaaaaggccuauacaacuucgccacaugcggccuagucggccuaguaaccuuccuccuacugugcggccgcucuugcacgaccagccucuacaaaggagucuacgaacuacaaacccucgaacucaacauggaaacccuaaacaugaccaugccccucuccugcaccaaaaacaacucccaccacuacaucauggucggaaacgaaacaggccuagaacucacccuaaccaacaccucaauaaucaaccacaaguucugcaaccucucagacgcccauaagaaaaaccuauacaaccacgcacuaauguccaucauuuccaccuuucaccuaucuauccccaacuucaaccaauacgaagccaugucuugcgacuucaauggcggcaaaaucucaguccaauauaaccucagucacuccuacgccggagacgcagccucccacugcggcaccgucgccaacggcguacuccaaaccuucaugaggauggcauggggcggaagcuacaucgcccucgacuccggcugcggcaaaugggauugcaucaugacauccuaccaauaucucaucauacaaaacaccaccugggaggaccacugccaauucucccgccccagccccaucgguuaccucggccuacucucccagcgcacccgcgacaucuacaucucccgcagacgccgcggaaccuucaccuggacccuuuccgacuccgaaggcaaagacacacccggcggcuacugccucacucgauggaugcucaucgaagccgaacugaaaugcuuuggcaacacugccgucgccaaaugcaacgagaaacacgacgaagaauuuugcgacaugcuccgccucuucgacuucaacaaacaagccauucaacgccuuaaaacccccgcgcaaauguccauacaacucaucaacaaggccguaaacgcacucaucaaugaccaacuaaucaugaagaaccaccuccgagacauaaugugcauccccuacugcaacuacuccaaauacugguaucucaaccacacaacaaccggcaagaccucccuccccaaauguuggcucguaucaaacggauccuaccucaacgaaacccacuucuccgacgacaucgaacaacaagcagacaacaugaucaccgagaugcuacaaaaggaauacauggaacgccaaggaaaaacgccccuaggacucgucgaccucuucguauucagcaccuccuucuaccugaucuccaucuuccuccaucuugucaaaaucccaacccaccgccacaucgucggcaagucaugccccaaaccacaccgacuaaaccacaugggaauauguucaugcggccucuacaaacagccgggcguccccgugcgcuggaaaagaugaggacuaguaauaaggaaacuguaugaaugucugugggcaggaagugaagagauccuucuguaaagguuuuuggaauuaugucugcugaauaauaaacuuuuuugaaauaauaaaucugguagaaaaaugagaucuaaaaaaaaaaaaaaaaaaaaaaaaaaaaaaaaaaaaaaaaaaaaaaaaaaaaaaaaaaaaaaaaugcaucccccccccccccccccccccccccccccccaaaggcucuuuucagagccaccagaauu

SEQ ID NO: 6964 - RNA, 1816 nt, Artificial Sequence
  mRNA product Design b-4 comprising derived and/or modified sequence from LASV(G502-SLE-2009;Clade IV)__AIT17126__GPCstabilized (opt11)
gggagagucccgcagucggcguccagcggcucugcuuguucgugugugugucguugcaggccuuauucaagcuuaccaugggccaaaucgucaccuucuuucaagaagucccccacguuaucgaagaaguuaugaacaucguacucaucgcccucuccauccuagccgucuuaaaagggcucuacaacuucgcaaccugcggccucguaggccuacucaccuuccugcuccucugcggccgaucaugcacaaccggacuuuacaagggcguauacgaacugcaaacccucgaacuaaacauggaaacccucaacaugacuaugccccucuccugcaccaaaaacaacagccaccacuacauaauggucggcaacgaaacaggacuagagcucacccuaaccaacaccucgaucaucaaccacaaguucugcaaccuauccgacgcccacaagaaaaaccucuacgaccacgcgcucauguccauaaucuccaccuuccaccugucaauacccaacuucaaucaauacgaagcaauguccugcgacuucaacggaggcaaaaucuccguacaauacaaucugucccacuccuacgccggagacgccgccgaccacugcggcacaguagccaacggcguacuccaaacuuucaugcgaauggcauggggcggcuccuacaucgcucucgacucaggcugcggacgaugggacugcaucaugaccucauaccaauaccuaaucauccaaaacaccaccugggaagaccacugccaauucucccgacccucgccaaucggauaccugggccugcucucccaacgcacccgcgacaucuacauuucccgccgcagacgcggaaccuucaccuggacccucagcgacuccgagggcaaagacacacccgguggcuacugccuaacacgcuggaugcugaucgaagccgaacucaaaugcuucggaaacaccgccguugcaaaaugcaacgaaaaacacgacgaagaguucugcgacaugcuccgacucuucgacuucaacaaacaagccauacaacgccucaaagcccccgcccaaauguccauacaacucauaaauaaagccgucaacgcccucaucaacgaccagcuaguaaugaaaaaucaccuccgagacaucaugugcauaccauacugcaacuacuccagauacugguaccuaaaccacaccaccaccggccgcaccucccucccuaagugcuggcuaguauccaacggcucauaccucaacgaaacacacuucucagacgacaucgagcaacaagccgacaacaugaucacggaaaugcuacaaaaagaauacauggaacgccaaggaaaaaccccacucggccucgucgaccucuucgucuucuccacuucauucuaccuaaucucaaucuuccuacaccucguaaaaaucccuacccacagacacaucguaggcaaauccugccccaaaccccaccgacuaaaccacaugggaauaugcucuugcggacucuacaaacaacccggcguacccguaaaauggaaaagauaaggacuaguaauaaggaaacuguaugaaugucugugggcaggaagugaagagauccuucuguaaagguuuuuggaauuaugucugcugaauaauaaacuuuuuugaaauaauaaaucugguagaaaaaugagaucuaaaaaaaaaaaaaaaaaaaaaaaaaaaaaaaaaaaaaaaaaaaaaaaaaaaaaaaaaaaaaaaaugcaucccccccccccccccccccccccccccccccaaaggcucuuuucagagccaccagaauu

SEQ ID NO: 6965 - RNA, 1816 nt, Artificial Sequence
  mRNA product Design b-4 comprising derived and/or modified sequence from LASV(G733-SLE-2010;Clade IV)__AIT17154__GPCstabilized (opt11)
gggagagucccgcagucggcguccagcggcucugcuuguucgugugugugucguugcaggccuuauucaagcuuaccaugggccaaaucguaaccuucuuucaagaagucccccacgucaucgaagaaguuaugaacauaguucuaaucgcccuaucaauccucgccguccucaaaggccucuacaacuucgcaaccugcggaaucguuggucuuguaucauuccuccuacuuugcggacgguccugcaccacuucccuuuacaaaggagucuacgaacuccaaacccucgaacucaacauggaaacccuaaacaugaccaugccccucucaugcaccaagaacaacucccaccacuacaucauggucggcaacgaaaccggccucgagcucacccugacaaacacaucaaucauuaaccacaaguucugcaaccuuuccgacgcccacaagaaaaaccucuacgaccacgcccucauguccauaauauccaccuuccaccucuccauccccaacuucaaccaauacgaagccauguccugcgacuucaacggcggaaaaaucucaguccaauacaaccucucccacuccuaugccggagacgccgccaaccacugcggcaccauagcaaacggcguccuccaaaccuucaugcgcauggccuggggcggcagcuacauagcccucgacagcggcugcgaccgaugggacugcauuaugacuucauaccaauaccuaaucauccaaaacacaaccugggaagaccacugccaauucucacgccccucccccauaggauaccucggccuacuaucccaacgcacccgcgacaucuacaucucccgacgccgccgaggcacguuuaccuggacauuguccgacuccgagggcaaagacacacccggcggcuacugccuaacccgauggaugcucaucgaagccgaacucaaaugcuucggcaacaccgccgucgccaaaugcaaugagaaacacgacgaagaguucugcgauaugcuccgccuauucgacuucaacaaacaagcuauccaacgccucaaagcucccgcccaaaugagcauccaacucaucaacaaagccguuaacgcccucaucaacgaccaacucauaaugaaaaaccaccuccgggacaucaugugcauccccuacugcaacuacaguaaauacugguaccuuaaccacaccacaacaggaaagaccuccuuacccaaaugcuggcucguauccaacggauccuaccuaaacgaaacacauuucuccgacgacaucgaacaacaagccgacaacaugaucacagaaaugcuccaaaaagaauacauggaacgccaaggaaaaaccccacuuggccucgucgaccuauucguauuuagcaccucuuucuaccucaucuccaucuuccuccaccuagucaagauacccacccaccgccacgucgucggcaaaagcugccccaaaccccaccgacuuaaccacaugggcauaugcuccugcggacucuauggccaacccggcguccccguuaaguggaaaagguaaggacuaguaauaaggaaacuguaugaaugucugugggcaggaagugaagagauccuucuguaaagguuuuuggaauuaugucugcugaauaauaaacuuuuuugaaauaauaaaucugguagaaaaaugagaucuaaaaaaaaaaaaaaaaaaaaaaaaaaaaaaaaaaaaaaaaaaaaaaaaaaaaaaaaaaaaaaaaugcaucccccccccccccccccccccccccccccccaaaggcucuuuucagagccaccagaauu

SEQ ID NO: 6966 - RNA, 1816 nt, Artificial Sequence
  mRNA product Design b-4 comprising derived and/or modified sequence from MOPV/LASV reassortant(IGS-1;Clade IV)__AFY05576__GPCstabilized (opt11)
gggagagucccgcagucggcguccagcggcucugcuuguucgugugugugucguugcaggccuuauucaagcuuaccaugggccaaaucgucaccuucuuccaagaagucccacacgucauagaagaagucaugaauaucguccuuaucgcacuauccguacuagcaguccuuaaaggacuuuacaacuucgcaaccugcggccugguaggccuaguaaccuuccuccuccucugcggacgcucaugcaccaccagccucuacaaaggaguauacgaacuacaaacccucgaacucaacauggaaacccuuaacaugaccaugccccucuccugcacaaagaacaacucccaccacuauauaauggucggcaacgaaacaggccuggaacucacccuaacaaacaccuccauaaucaaccacaaauucugcaaccucuccgacgcccacaagaaaaaccuauacgaccacgcccuaaugucgauaaucuccacauuccaccucagcaucccaaacuucaaccaauacgaagccauguccugcgacuucaacggcggcaaaaucucuguccaauacaaccuaucacacuccuacgccggugacgccgccaaccauugcgggaccgucgccaacggcguccuccaaaccuucaugagaauggccuggggcggaucguacaucgcccuagacagcggaugcgguaacugggacugcaucaugaccagcuaccaauaccucaucauacaaaacacuaccugggaggaccacugccaguucucacgccccuccccuauaggcuaccucggccugcucagccaacgcacccgcgacauauacaucucccgacgacgacgaggcaccuucaccuggacacucuccgauuccgaaggcgaagacaccccuggcggauacugccugacacgauggaugcucauagaggccgaacucaaaugcuucggcaacacagcagucgcaaaaugcaacgaaaaacacgacgaagaguucugcgacaugcuccgccuauucgacuucaacaaacaagccauccaacgauuaaaagccccagcccaaauguccauacaacucaucaacaaagccgucaacgcacuaauaaacgaccagcuaaucaugaaaaaccaccuccgagacaucaugugcauaccauacugcaacuacuccaaauacugguaccucaaccacacaaccacuggacgcaccucucuccccaaaugcuggcucgucucaaacggcagcuaccuuaacgaaacccacuucuccgacgacaucgaacaacaagccgacaacaugaucaccgaaaugcuacaaaaagaauacauggaaagacagggcaagacaccccucggccuagucgaccucuucguauucuccaccuccuucuaccuaaucucaaucuuccuacaccuagucaaaauccccacccaccgccacauaguaggcaaauccugccccaaaccccaucgccucaaccacaugggcauaugcucaugcggucucuacaaacaacccggcguccccgucaaguggaaacgaugaggacuaguaauaaggaaacuguaugaaugucugugggcaggaagugaagagauccuucuguaaagguuuuuggaauuaugucugcugaauaauaaacuuuuuugaaauaauaaaucugguagaaaaaugagaucuaaaaaaaaaaaaaaaaaaaaaaaaaaaaaaaaaaaaaaaaaaaaaaaaaaaaaaaaaaaaaaaaugcaucccccccccccccccccccccccccccccccaaaggcucuuuucagagccaccagaauu

SEQ ID NO: 6967 - RNA, 1816 nt, Artificial Sequence
  mRNA product Design b-4 comprising derived and/or modified sequence from LASV(LM765-SLE-2012;Clade IV)__AIT17814__GPCstabilized (opt11)
gggagagucccgcagucggcguccagcggcucugcuuguucgugugugugucguugcaggccuuauucaagcuuaccaugggacaaaucgucaccuucuuccaagaagucccgcacgucaucgaggaagucaugaacauaguccucauagcccucucgauacuagccguccuaaaaggccuauacaacuucgcaaccugcggccucguaggccucgucaccuuccuccuccucugcggccgaucguguaccaccucacuauacaaaggagucuacgaacuccaaacucuggaacuuaacauggagacccucaacaugaccaugccccucuccugcaccaaaaacaauucccaccauuacaucauggucggaaacgaaacaggacucgaacuaacccucacgaacacuuccaucauagaucacaaauucugcaaccucagcgacgcccaccgcaaaaaccucuacgaccacgccuuaaugagcaucaucucaacauuccacuuauccauacccaacuucaaccaauacgaagccaugucaugcgauuucaacggcggcaaaaucucaguccaauacaaccuaucccacucuuacgccaaagacgccgccgaccacugcggcacagucgccaacggcguccuccaaaccuucaugcgcauggccuggggcggaagcuacaucgcacucgacucaggcugcggccgcugggacugcauaaugacauccuaccaguaccuuauaauccaaaacacaacaugggaagaccacugucaauucagcagacccagccccaucggauaccuaggccuacucucccaacgcacacgcgacauauacauaucacgccgccgucgcggcaccuucacauggacccuaucagauuccgagggcaaagacacacccggaggcuacugccucacucguuggaugcuaaucgaagcugaacucaaaugcuucgguaacacugccgucgccaaaugcaaugaaaaacacgacgaagaauuuugcgacaugcuccgccucuucgacuucaacaaacaagccauacagcgacuaaaggcccccgcccaaauguccauucaacugaucaacaaagccgucaacgcccuaaucaacgaccaacucaucaugaaaaaccaccuccgcgacauaaugugcaucccauacugcaacuacuccaaguacugguaccuaaaccacaccaccaccggcaaaaccucccuccccaaaugcuggcucgucucuaacggaucuuaccuuaacgaaacccacuucucagacgauaucgagcaacaagcugacaacaugaucaccgaaaugcuccaaaaagaauacauggaaagacaaggcaaaacaccccuaggacucgucgaccucuucgucuucucuaccuccuucuaccucauaucaaucuuucuccaccucgucaagaucccuacccaccgccacaucgucggcaaaccaugccccaaaccccaccgccucaaccacaugggcauaugcuccugcggccucuacaaacagccaggcgucccggucaaauggaaacgauagggacuaguaauaaggaaacuguaugaaugucugugggcaggaagugaagagauccuucuguaaagguuuuuggaauuaugucugcugaauaauaaacuuuuuugaaauaauaaaucugguagaaaaaugagaucuaaaaaaaaaaaaaaaaaaaaaaaaaaaaaaaaaaaaaaaaaaaaaaaaaaaaaaaaaaaaaaaaugcaucccccccccccccccccccccccccccccccaaaggcucuuuucagagccaccagaauu

SEQ ID NO: 6968 - RNA, 1816 nt, Artificial Sequence
  mRNA product Design b-4 comprising derived and/or modified sequence from LASV(LM776-SLE-2012;Clade IV)__AIT17824__GPCstabilized (opt11)
gggagagucccgcagucggcguccagcggcucugcuuguucgugugugugucguugcaggccuuauucaagcuuaccaugggccaaaucgucacauucuuccaagaagucccccacgucaucgaagaagucaugaacaucguccucaucgcccucucaauccuagccguccucaaaggccuauacaacuucgcuaccugcggccucgucggccucguaaccuuccuccuccuaugcggccgaucuugcaccaccucugucuacaaaggagucuacgaacuccaaacacucgaacuaaacauggaaacccugaacaugacaaugccccucuccuguaccaagaacaacucccaccacuacaucaugguuggcaacgaaaccggccuagaacuuacccucaccaacacuucaaucauaaaccacaaauucugcaaccucuccgacgcccacaagaaaaaccucuacgaccacgcacucauguccaucaucucaaccuuccaccucagcaucccaaacuucaaccaauacgaagccaugucaugcgacuucaacggcggcaaaaucucuguacaauacaaccuaucccacuccuacgccggcgacgcagccaaccacuguggaaccgucgcaaacggcguccuacagacguucaugcgcauggccuggggcggcucauauaucgcccucgacuccggaugcggcaaaugggacugcaucaugaccucauaccaauaccucauaauacaaaacaccacaugggaagaccauugccaguuuucccgcccuuccccgauaggauaccucggccuccuaucccaacgcacccgcgacauuuacaucucacgccgccgccgaggcacauuuacauggacccucucugacuccgaaggcaaagacacccccggaggcuacugccuaacucgcuggaugcucauagaggccgaacucaaaugcuucggcaacacagccguagccaaaugcaacgaaaaacacgaugaagaguucugcgauaugcuccgccucuucgacuucaacaaacaagcaauccaaagacuaaaagcccccgcacaaaugagcauucaacucaucaacaaagcagucaacgcccuuauaaacgaccaacuaaucaugaaaaaccaucuacgcgacaucaugugcauccccuacugcaacuacucaaaauacugguaccuaaaccacacaacaacuggcaaaaccagccuccccaaauguuggcucgucucuaacggcucauaccucaacgaaacccacuucucagacgacaucgaacaacaagccgacaacaugaucaccgaaaugcuccaaaaagaauacauggaacgccagggcaaaacuccacucggccuaguagaccucuucgucuucuccacaaguuucuaccucaucuccauauuccuacaccuagucaaaauccccacccaccgacacaucguaggcaaaucuugccccaaaccucaucgccuaaaccacaugggaaucugcagcugcggucucuacaaacaacccggcgucccaguccgauggaaacgauaaggacuaguaauaaggaaacuguaugaaugucugugggcaggaagugaagagauccuucuguaaagguuuuuggaauuaugucugcugaauaauaaacuuuuuugaaauaauaaaucugguagaaaaaugagaucuaaaaaaaaaaaaaaaaaaaaaaaaaaaaaaaaaaaaaaaaaaaaaaaaaaaaaaaaaaaaaaaaugcaucccccccccccccccccccccccccccccccaaaggcucuuuucagagccaccagaauu

SEQ ID NO: 6969 - RNA, 1816 nt, Artificial Sequence
  mRNA product Design b-4 comprising derived and/or modified sequence from LASV(Mad39;Clade IV)__ANH09722__GPCstabilized (opt11)
gggagagucccgcagucggcguccagcggcucugcuuguucgugugugugucguugcaggccuuauucaagcuuaccaugggccaaaucgucacauucuuccaagaagucccccacgucaucgaagaagucaugaacaucgugcuaauagcacucuccauccuagccguccuaaaaggccucuauaacgucgcaaccugcggccugaucggccuugucaccuuccuacuccucugcggacgauccuguaccaccacccuuuacaaaggcgucuacgaacuccaagcccucgaauuaaauauggaaacccugaacaugaccaugccccucuccugcaccaaaaauaacucccaucacuacauucgagucggcaacgaaaccggacucgaauuaacccucaccaacacaucccuaaucaaccacaaauucugcaaccucucagacgcccacaagaaaaaccucuacgaccacgcccuuauguccaucaucucaacauuccaccucucaauacccaacuucaaccaauacgaagcaauguccugcgacuucaacgacggcaaaaucucuguccaauacaaccucucacacaccuacgccggcgacacagcaaaccacugcggcaccgucgcaaacggcguacuccaaacauucaugcgaauggcuuggggcggauccuacaucgcacuagacucaggaugcggcggcugggacuguaucaugacauccuaccaauacuuaaucauacaaaacacuaccugggaagaccacugucaauucucacgucccucuccgaucggcuaccucggccuccucucccaacgaacccgcgacaucuauaucucccgccgccgccgcggcaccuucacauggacgcuaagcgauucagagggcaaagacacccccggcggcuacugccugacccgcuggaugcuuaucgaagcagaacucaaaugcuucggcaacacagcagucgccaaaugcaacgaaaaacacgacgaggaguucugcgacaugcuccgccuauucgacuucaacaaacaagccauccaacgccucaaagccccagcacaaauguccauucaacuaaucaacaaagccguaaaugcccucaucaacgaccaacucauuaugaaaaaccaccuucgugacaucaugugcauaccauacugcaacuacuccaaauacugguaccucaaccacaccguuaccggcaaaaccucacucccaaaaugcuggcucgucuccaauggcucguaccuaaacgaaacccacuucagcgacgacaucgaacaacaagccgacaacaugaucaccgaaaugcuacaaaaagaauacauggaacgccaaggcaagacaccccugggccuaguggaccuuuucgucuucuccaccuccuucuaccucauauccauauuccuccaccucgucaaaaucccaacacaccgccacguaguaggaaaacccugcccaaaaccccaccgccucaaccacaugggcaucugcagcugcggauucuacaaacaaccuggcgucccaguccguuggaaacgauaaggacuaguaauaaggaaacuguaugaaugucugugggcaggaagugaagagauccuucuguaaagguuuuuggaauuaugucugcugaauaauaaacuuuuuugaaauaauaaaucugguagaaaaaugagaucuaaaaaaaaaaaaaaaaaaaaaaaaaaaaaaaaaaaaaaaaaaaaaaaaaaaaaaaaaaaaaaaaugcaucccccccccccccccccccccccccccccccaaaggcucuuuucagagccaccagaauu

SEQ ID NO: 6970 - RNA, 1816 nt, Artificial Sequence
  mRNA product Design b-4 comprising derived and/or modified sequence from LASV(Z0947-SLE-2011;Clade IV)__AIT17840__GPCstabilized (opt11)
gggagagucccgcagucggcguccagcggcucugcuuguucgugugugugucguugcaggccuuauucaagcuuaccaugggucaaaucgucacauuuuuccaagaagucccacacguaauagaagaagucaugaacaucguacuuauagcacucuccauccuugcaguccuuaaaggccucuauaacuucgccacuugcggacucgucggccuaguaacauuccuacuacuguguggccgcuccugcaccaucucacucuacaagggcguauacgaacuccaaacacuugaacucaacauggaaacccuaaacaugaccaugccccucuccugcaccaaaaacaacucucaccacuacauaauggucggaaacgaaacaggacuagaacucacccucaccaacaccucaauaaucaaccacaaauucugcaaccuuuccgaugcacacaagaaaaaccucuacgaccacgcacucauguccauaaucuccaccuuccaccucucaauccccaacuucaaccaauacgaagcaaugucgugcgacuucaacggcgggaaaaucuccguccaauacaaccucucccacuccuacgcuggagacgccgcaaaccacugcgguaccguggccaacgguguccuccagaccuucaugcgcauggccuggggcggauccuacauagcccucgacucagguugugaccgaugggauugcaucaugacauccuaccaauaccucaucauccaaaacaccaccugggaagaccacugccaauucucccgucccucccccauaggcuaccucggccuccucucccaacgcacccgcgauaucuacaucagccgccgacgccgcggcaccuucaccuggacccuuucugacuccgaaggaaaagacacccccggcggcuacugccuaacucgauggaugcucaucgaagccgaacuaaaaugcuucggcaacaccgccgucgccaaaugcaacgaaaaacacgacgaagaguucugcgacaugcuucgccucuucgacuucaacaaacaagccauccagcgccucaaagcccccgcacaaauguccauacaacuaaucaacaaagccgucaacgcccuaauaaacgaccaacucaucaugaaaaaccaccuccgcgauauaaugugcauuccauacugcaacuacuccaaauacugguaucuaaaccacacaaccaccggcaaaaccucccuacccaaaugcuggcucgucuccaacggaucguaucuaaacgaaacucacuucuccgacgacaucgaacaacaagccgacaacaugaucacugagaugcuccagaaagaauacauggaacgacaaggcaaaacaccacuaggccucgucgaccucuucgucuucuccacauccuucuaccucaucucaaucuuccuccaccucguaaaaaucccaacccaccgccacaucgucggaaaacccugccccaagccacaccgccuaaaccacaugggcaucugcuccugcggacucuacaagcaacccggaguacccgucaaauggaaacgauagggacuaguaauaaggaaacuguaugaaugucugugggcaggaagugaagagauccuucuguaaagguuuuuggaauuaugucugcugaauaauaaacuuuuuugaaauaauaaaucugguagaaaaaugagaucuaaaaaaaaaaaaaaaaaaaaaaaaaaaaaaaaaaaaaaaaaaaaaaaaaaaaaaaaaaaaaaaaugcaucccccccccccccccccccccccccccccccaaaggcucuuuucagagccaccagaauu

SEQ ID NO: 6971 - RNA, 1858 nt, Artificial Sequence
  mRNA product Design i-2 comprising derived and/or modified sequence from LASV(Josiah;Clade IV)__NP_694870__GPCstabilized (wt)
ggggcgcugccuacggagguggcagccaucuccuucucggcaucaagcuuaccaugggacaaauagugacauucuuccaggaagugccucauguaauagaagaggugaugaacauuguucucauugcacugucuguacuagcagugcugaaaggucuguacaauuuugcaacguguggccuuguugguuuggucacuuuccuccuguugugugguaggucuugcacaaccagucuuuauaaagggguuuaugagcuucagacucuggaacuaaacauggagacacucaauaugaccaugccucucuccugcacaaagaacaacagucaucauuauauaauggugggcaaugagacaggacuagaacugaccuugaccaacacgagcauuauuaaucacaaauuuugcaaucugucugaugcccacaaaaagaaccucuaugaccacgcucuuaugagcauaaucucaacuuuccacuuguccauccccaacuucaaucaguaugaggcaaugagcugcgauuuuaaugggggaaagauuagugugcaguacaaccugagucacagcuaugcuggggaugcagccaaccauugugguacuguugcaaaugguguguuacagacuuuuaugaggauggcuuggggugggagcuacauugcucuugacucaggcugcggcaacugggacuguauuaugacuaguuaucaauaucugauaauccaaaauacaaccugggaagaucacugccaauucucgagaccaucucccaucgguuaucucgggcuccucucacaaaggacuagagauauuuauauuaguagaagacgccggggcacauucacauggacacugucagauucugaagguaaagacacaccagggggauauugucugaccagguggaugcuaauugaggcugaacuaaaaugcuucgggaacacagcuguggcaaaauguaaugagaagcaugaugaggaauuuugugacaugcugaggcuguuugacuucaacaaacaagccauucaaagguugaaagcucccgcacaaaugagcauucaguugaucaacaaagcaguaaaugcuuugauaaaugaccaacuuauaaugaagaaccaucuacgggacaucaugugcauuccauacuguaauuacagcaaguauugguaccucaaccacacaacuacugggagaacaucacugcccaaauguuggcuuguaucaaaugguucauacuugaacgagacccacuuuucugaugauauugaacaacaagcugacaauaugaucacugagauguuacagaaggaguauauggagaggcaggggaagacaccauugggucuaguugaccucuuuguguucaguacaaguuucuaucuuauuagcaucuuccuucaccuagucaaaauaccaacucauaggcauauuguaggcaagucgugucccaaaccucacagauugaaucauaugggcauuuguuccuguggacucuacaaacagccuggugugccugugaaauggaagagaugaggacuagugcaucacauuuaaaagcaucucagccuaccaugagaauaagagaaagaaaaugaagaucaauagcuuauucaucucuuuuucuuuuucguugguguaaagccaacacccugucuaaaaaacauaaauuucuuuaaucauuuugccucuuuucucugugcuucaauuaauaaaaaauggaaagaaccuagaucuaaaaaaaaaaaaaaaaaaaaaaaaaaaaaaaaaaaaaaaaaaaaaaaaaaaaaaaaaaaaaaaaugcaucccccccccccccccccccccccccccccccaaaggcucuuuucagagccaccagaauu

SEQ ID NO: 6972 - RNA, 1855 nt, Artificial Sequence
  mRNA product Design i-2 comprising derived and/or modified sequence from LASV(LP;Clade I)__AAF86701__GPCstabilized (wt)
ggggcgcugccuacggagguggcagccaucuccuucucggcaucaagcuuaccauggggcagauuauuacauucuuucaagaagugccacauguaauagaggaagucaugaacauugugcuaauugcgcuuucucuauuggcaaucuugaagggcuuguauaacaucgcuacaugugggauuauuggauugguugccuuuuuauucuuguguggcaagucuuguucccuaacccuuaaagggggauaugagcugcaaaccuuagaauuaaauauggagacccuaaacaugaccaugcccuuaucaugcaccaagaacagcagucaucauuacauaagagugggcaaugagacuggauuagaauugacuuuaacuaacaccagcauuauaaaucacaaauuuugcaacuuauccgaugcucacaaaaagaaucuuuaugaucaugcucucaugagcaucaucucaacauuccaucuauccauuccaaacuucaaucaguaugaagccaugaguugugauuucaauggagggaaaaucagugugcaauacaaccucucucauuccuaugcuggggaugcggccgaacacugugggacaguugccaacggaguguugcaaacauuuaugagaauggccugggguggaagauacauugcauuagacucaggaugcggaaacugggacuguauaaugaccagcuaccaguaccugauaauucaaaauacaacaugggaggaccacugccaauucucaagaccgucuccuaucggguaccuuggccuuuugucacaaaggacaagagauauauauauaaguaggaggcgccgggggaccuucaccuggacauugucagauucugagggcaaugaaacaccaggugguuauuguuuaaccagguggaugcuaauugaagcagaacucaaguguuuugggaauacagcuguggcaaaaugcaaugagaagcaugaugaggaguuuugugacaugcugagauuguuugauuucaacaagcaagcaauccguagguugaaggcucccgcccagaugaguauucaauuaauaaauaaagccgugaaugccuuaaucaaugaucaauuaaucaugaagaaccauuuaagagacaucaugugcauucccuacugcaauuacagcaaguauugguaccuuaaucauacuaguagcgggagaacaucacuaccaaaguguuggcuuauauccaaugggucauaucuaaaugaaacccaguucucugaugacauagaacagcaagccgacaauaugaucacagagaugcuucagaaagaauacauugaaagacaagggaaaacgcccuugggacuaguggacauuuucaucuuuagcacaagcuuuuaucugaucagcauuuucuugcauuuaauuaaaaucccuacacaucgacacaucguugggaaacccugucccaaaccccauagacuaaaucacaugggaguauguuccuguggacuguacaaacacccugguguuccaacaaaguggaagagauagggacuagugcaucacauuuaaaagcaucucagccuaccaugagaauaagagaaagaaaaugaagaucaauagcuuauucaucucuuuuucuuuuucguugguguaaagccaacacccugucuaaaaaacauaaauuucuuuaaucauuuugccucuuuucucugugcuucaauuaauaaaaaauggaaagaaccuagaucuaaaaaaaaaaaaaaaaaaaaaaaaaaaaaaaaaaaaaaaaaaaaaaaaaaaaaaaaaaaaaaaaugcaucccccccccccccccccccccccccccccccaaaggcucuuuucagagccaccagaauu

SEQ ID NO: 6973 - RNA, 1855 nt, Artificial Sequence
  mRNA product Design i-2 comprising derived and/or modified sequence from LASV(803213;Clade II)__AAF86703__GPCstabilized (wt)
ggggcgcugccuacggagguggcagccaucuccuucucggcaucaagcuuaccauggggcaaaucauaacauucuuccaagaggugccucaugucauagaggaggucaugaacauuguccuaauugcccucagucuccuggcgauacuaaaggggauuuacaauguugcuaccuguggucucuuuggguugaucuccuuucuucucuuauguggcagaucauguucaguaaccuauaaagguguuuaugagcuacaaacucuagaacugaacauggcaaaccuuaauaugacgaugcccuugucuuguacgaagaacaacagccaucauuacaucaugguuggaaaugaaacaggccuagagcugaccuuaacaaacacaagcaucauuaaccacaaguuuugcaaccuuucugaugcacauaaaaagaaucucuaugaccaugcucugaugagcaucaucucaacuuuccacuuaucuauuccaaacuuuaaucaguaugaagcaaugaguugugacuucaauggagggaaaauaaguguucaguacaaccucagucacuccuuugcuguggaugcagccaaccacugugggaccauugccaaugguguucugcagaccuuuaugaggauggcuugggguggcaguuacauagcacuugauuccggaugcgggaacugggauuguauaaugacuuccuaucaauacuugauaauucaaaacaccacuugggaagaucacugccaguuuucucgcccaucuccuauugguuacuuaggacuauugucacagagaacuagagauaucuauaucagucgaagacgccggggaacuuucacuuggacccuuucugauucugaagguaaugaagcaccugguggguauugucuaacuagauggauguuaauugaagcagaacugaaaugcuuugggaacacagcaguugcaaagugcaacgaaaaacaugaugaagaauuuugugacauguugagauuguuugauuucaacaaacaagcuauaaagaggcugaaaacacccgcacagaugaguauucagcugauaaacaaggcagugaaugcauuaaucaaugaccaacugauuaugaagaaccaucuaagggacaucaugugcauuccuuauugcaacuacaguagauauugguaucuaaaucacacugugacagggaagacaucacugccaagauguuggcuugugucaaaugguuccuaccuaaacgaaacacauuuuucugaugacauugaacaacaagcagacaacaugauaacagaaauguugcagaaagaguacauggacaggcaggggaaaacaccuuuaggguuaguggaccuuuuugucuuuagcacuagcuuuuaccucauaagcaucuuucuccaucuggucaagaucccaacucacaggcacaucguggggaaaccuugcccuaagccacacagacucaaccacaugggcaucugcucauguggucuguauaaacaucccgguguuccaguaaaauggaagagauaaggacuagugcaucacauuuaaaagcaucucagccuaccaugagaauaagagaaagaaaaugaagaucaauagcuuauucaucucuuuuucuuuuucguugguguaaagccaacacccugucuaaaaaacauaaauuucuuuaaucauuuugccucuuuucucugugcuucaauuaauaaaaaauggaaagaaccuagaucuaaaaaaaaaaaaaaaaaaaaaaaaaaaaaaaaaaaaaaaaaaaaaaaaaaaaaaaaaaaaaaaaugcaucccccccccccccccccccccccccccccccaaaggcucuuuucagagccaccagaauu

SEQ ID NO: 6974 - RNA, 1855 nt, Artificial Sequence
  mRNA product Design i-2 comprising derived and/or modified sequence from LASV(GA391;Clade III)__CAA36645__GPCstabilized (wt)
ggggcgcugccuacggagguggcagccaucuccuucucggcaucaagcuuaccaugggacagauugugacauucuuccaagaaguuccucauguuauugaggaagugaugaauauuguccuuauugcacuauccauccuagcaauucugaagggacuauacaauguugccacguguggcuugauagggcuugucacauuccuucuacuuucaggaaggucaugcucacugaucuacaaagggacuuacgagcugcaaacccuugaguugaauauggagacucuuaauaugaccaugccgcuauccugcacaaagaacaacagucaucauuauauaaggguggggaaugagacaggacuugagcucaccuugaccaacaccagcauucuuaaucacaaauucuguaaccucucugaugcccacaaaaggaaucuuuaugaucacagccucaugaguaucaucucuaccuuucaucuguccauucccaacuucaaucaauaugaggcaaugagcugcgauuucaauggggggaaaaucacugugcaauacaaccugagucauagcuucgcaguggaugcagcaggucacugcggcacacuugcaaauggugucuuacaaacauuuaugagaauggcuuggggagggaguuauauugcucuugauucuggaugcgguaacugggacuguauaaugaccaguuaccaauaucuaaucauucagaauacaaccugggaugaccacugccaauuuuccagaccaucaccuauuggcuaccuugggcuucucucacaaagaacuagagacauauacauuagcagaaggcgccgggggacauucaccuggacacuaucagacucagagggaaaugaaacaccagggggauacugccuuacuagauggauguugauugaggccgaauuaaagugcuuuggaaacacugcaguagccaagugcaaugagaaacaugaugaagaauuuugugacaugcuaagguuguucgauuucaacaaacaggccauaaggaggcucaaaacacccgcccaaaugagcauacagcugaucaacaaggcugucaaugcuuuaauaaaugaucagcucaucaugaagaaccacuugagagacaucaugugcauaccauauuguaacuacagcagauauugguaccuuaaccacacaucaacaggaaagaccucacuaccaagguguuggcuuaucucaaauggaucauaucucaaugagaccaaguuuucagaugacaucgaacaacaagcugacaacaugauaacagagaugcuacaaaaggaauacauagauagacagggcaaaacuccacugggguuaguugaccuauuuguuuuuagcacaaguuucuaucugauaagcaucuuucuccaccuggucaaaauaccaacccauagacacauuguagguaaaccuugcccaaaaccccacaggcugaaccacaugggcaucugcuccuguggucuauacaaacagccaggugugccugucagauggaagaggugaggacuagugcaucacauuuaaaagcaucucagccuaccaugagaauaagagaaagaaaaugaagaucaauagcuuauucaucucuuuuucuuuuucguugguguaaagccaacacccugucuaaaaaacauaaauuucuuuaaucauuuugccucuuuucucugugcuucaauuaauaaaaaauggaaagaaccuagaucuaaaaaaaaaaaaaaaaaaaaaaaaaaaaaaaaaaaaaaaaaaaaaaaaaaaaaaaaaaaaaaaaugcaucccccccccccccccccccccccccccccccaaaggcucuuuucagagccaccagaauu

SEQ ID NO: 6975 - RNA, 1858 nt, Artificial Sequence
  mRNA product Design i-2 comprising derived and/or modified sequence from LASV(AV;Clade V)__CCA30314__GPCstabilized (wt)
ggggcgcugccuacggagguggcagccaucuccuucucggcaucaagcuuaccauggggcaaauagugacauucuuucaagaggugccucaugugauagaagaggugaugaacauuguucuuauagcauugucuauauuggcaguguugaaaggucucuacaacauugccacaugcggccucaucggcuugaucacuuuccucuuauuauguggaaggucuugcucauccaaccucuacaagggggucuaugaacuucaaucucuggaccugaacauggagacacucaacaugaccaugccccucuccugcacaaagaacaauagucaucacuacauaaggguuggcaaugacacagggcuggaacugaccuugaccaacacgagcauacucaaucacaaauucugcaaccuaucagaugcucacaagaaagaccuauaugaucacgcacucaugagcauaaucucaacuuuccaccugucuauacccaauuucaaccaauacgaagcaaugaguugugacuucaaugggggcaaaaucagugugcaguacaaucuaagccauucuuaugcuauagaugcagcuaaucauugcggcacagucgcgaauggcaucuugcagacuuucaugagaauggcauggggugggagcuauauugcucuugacucaggcugcggaaacugggacuguauuaugacuagcuaucaauaucugauuauucagaacacaaccugggaaaaucacugucaguucucaagaccaucuccuauugguuaucuuggucuccucucacagaggacuagagacauuuacauuagcaggaggcgccggggcacauucacguggacacugucagacucugaggguaaugcuacaccaggagguuauugucugaccagguggauguuaauugaagcugaguugaaaugcuuuggaaacacagcaguagcaaaguguaaugaaaagcaugaugaagaauuuugcgacaugcucagacuuuuugauuuuaauaagcaggcuauaaguagauugaaaucucccgcacaaaugagcauccaacugaucaacaaagcagugaaugcuuugaucaacgaucaauuaauuaugaagaaccacuugcgagacaucaugugcauuccauauuguaauuacagcaaguauugguaccucaaucauacaauaacuggcaaaaccucauuaccuaaauguuggcuuguaucuaaugguucauacuugaaugaaacccauuuuucugacgacaucgagcaacaagcugacaauaugaucacagagaugcuacaaaaggaauacauggagaggcaagggaaaacgccuuuggguuuaguugaucuguuuguguuuagcacaaguuuuuaucuaauuaguaucuuccuccgacuagucaagauuccaacccauagacacauugugggcaaaccauguccuaagccccacagguugaaccacaugggcauuuguucuugcggcuuauacaagcagccuggcguccccgugagauggaagagauagggacuagugcaucacauuuaaaagcaucucagccuaccaugagaauaagagaaagaaaaugaagaucaauagcuuauucaucucuuuuucuuuuucguugguguaaagccaacacccugucuaaaaaacauaaauuucuuuaaucauuuugccucuuuucucugugcuucaauuaauaaaaaauggaaagaaccuagaucuaaaaaaaaaaaaaaaaaaaaaaaaaaaaaaaaaaaaaaaaaaaaaaaaaaaaaaaaaaaaaaaaugcaucccccccccccccccccccccccccccccccaaaggcucuuuucagagccaccagaauu

SEQ ID NO: 6976 - RNA, 1855 nt, Artificial Sequence
  mRNA product Design i-2 comprising derived and/or modified sequence from LASV(Togo/2016/7082;Clade VI)__AMR44577__GPCstabilized (wt)
ggggcgcugccuacggagguggcagccaucuccuucucggcaucaagcuuaccauggggcaaauaauaaccuucuuccaggagguuccucauguuauagaggaggugaugaacauuguucugauagcacucucacuccuagcuauccugaaaggggucuacaauguggcaacaugugggauaauugggcuugugaccuuccucuuucucuguggaagaucuuguucacugaucuacaaaggcaguuaugagcugcaaacauuggaguuaaauauggagacccuaaacaugaccaugccucugucaugcacuaaaaauaguagccaccauuauauucgaguugggaacgagacuggcuuagagcugacauugaccaacaccagcauuauaaaucacaaauucuguaaccugucagaugcucacaaacguaaucuguaugaccacgcacucaugagcauccuuuccacauuccaucuguccaucccaaacuucaaccaguaugaggcgaugaguugugacuucaauggaggcaaaaucagugugcaauauaaucucagccaugcuuaugcaguugaugcugccgaacacugcggaacaguugcaaauggugugcuacaaacauucaugaggauggcuuggggaggaaguuacauugcacuugacucugggugcggcaauugggacuguauuaugacaagcuaccaauacuuaaucauucagaauacaacaugggaagaucacugccaauuuucaagaccuucuccuauugguuaucucggcuuauugucacaaagaacaagagacauuuauaucaguaggaggcgccgggguacauucaccuggacacuuucugacucagagggaaaugagacaccaggcggauacuguuuaacaagauggaugcugauagaggcugagcuaaaauguuuuggaaacacagcuguugcaaaguguaaugagaagcaugaugaggaauucugcgacauguuaagguuguuugacuucaacaaacaggcaauucagaggcucaaaucacccgcacaaaugagcauccaguuaauaaauaaagcagugaaugcauugauaaaugaucagcucauuaugaagaaccacuuaagggauaugaugugcauaccguauugcaacuacaguaaguauugguaucucaaucacaccucaucagggagaacaucguugccuaaaugcuggcuuguuuccaauggaaguuaucugaaugagacccacuucucagaugauauugaacaacaggcagacaacaugauaacugaaauguuacaaaaggaauauaucgauaggcaggguaaaacaccuuuaggacuuguugaccuuuuuguuuucagcacgaguuuuuaccuuauaaguauauucuuacacuugauaaagauaccuacucauaggcacauaguuggaaagccaugccccaagccacaccgccucaaccacauggggaucugcucuuguggacuauacaagcagccuggugucccaaccagauggaagagauaaggacuagugcaucacauuuaaaagcaucucagccuaccaugagaauaagagaaagaaaaugaagaucaauagcuuauucaucucuuuuucuuuuucguugguguaaagccaacacccugucuaaaaaacauaaauuucuuuaaucauuuugccucuuuucucugugcuucaauuaauaaaaaauggaaagaaccuagaucuaaaaaaaaaaaaaaaaaaaaaaaaaaaaaaaaaaaaaaaaaaaaaaaaaaaaaaaaaaaaaaaaugcaucccccccccccccccccccccccccccccccaaaggcucuuuucagagccaccagaauu

SEQ ID NO: 6977 - RNA, 1855 nt, Artificial Sequence
  mRNA product Design i-2 comprising derived and/or modified sequence from LASV(KAK-428;Clade n.d. (VII))__ANH09740__GPCstabilized (wt)
ggggcgcugccuacggagguggcagccaucuccuucucggcaucaagcuuaccaugggucaaauagugaccuucuuccaggaaguaccucauguuauagaggaagugaugaacauaguucugauagcacuuucucucuuagccauccugaagggccucuacaauuuugccaccuguggaguaauuggacugauaacauuccuuuuacuuuguggaagauccuguucagcgaccuacaaaggccaauaugaacuccaaacuuuagaacuaaauauggagucccuaaacaugaccaugccacugucuugcacaaaaaacaacagucaucauuauaucagagcuggcaacaacacaggccuggaguugacccucaccaacaccagcauuauaucucauaaauucugcaaccuuucugaugcucacaagaagaaccuuuaugaccacacucuuaugaguauaauaacuaccuuucauuuguccaucccaaauuucaaccaguaugaggcaaugaguugugacuuuaacggugggaaaaucagcauacaguacaaccucagucacuccuacgcuggugaugcugcgcaacacuguggaacaguugcaaauggggugcugcaaaccuuuaugagaauggcuuggggagguaguuaucuggcccuugauucaggaugcagagguugggacugcauaauuuccaguuaccaauacuugaucauccaaaacacaacuugggaugaccauugccaguuuucaaggccauccccgaucggguaucuuggguuuguaucgcagaagaccagggacaucuauauaaguagaagacgccggggaacuuuuacauggacacuuucagacuccgagggacaugacaugccaggugguuacugcuugaccagauggaugcucauugaagcugauuuaaaguguuuuggaaacacagcugucgcuaaguguaaugagaaacaugacgaggaguucugugacauguggagguuguuugacuuuaauaagcaagccauucaaaggcucaaagcacccgcccagaugaacauccagcucauaaauaaagcugucaaugcucucauaaaugaccaauugaugaugaaaaaccauuuaagggauaucaugugcauucccuauugcaauuacaguaaauucugguaucucaauaacaccacgacugggagaaccucacugccaagaugcuggcugauuucaaauggguccuacuuaaaugagacucacuucucagaugauauugaacagcaagcugacaauaugauaacugagauguugcagaaagaauacauggacagacaaggaaaaacaccgcuaggacugguugaucucuuuguauucaguacaagcuuuuaccucauuaccauuuucuuacaucuugugaaaauaccaacccacagacacauaguuggcaagccgugcccuaaaccacacagacugaaucacaugggcaucugcuccugugggcucuacaaacagccuggugugccaguacgauggaagagaugaggacuagugcaucacauuuaaaagcaucucagccuaccaugagaauaagagaaagaaaaugaagaucaauagcuuauucaucucuuuuucuuuuucguugguguaaagccaacacccugucuaaaaaacauaaauuucuuuaaucauuuugccucuuuucucugugcuucaauuaauaaaaaauggaaagaaccuagaucuaaaaaaaaaaaaaaaaaaaaaaaaaaaaaaaaaaaaaaaaaaaaaaaaaaaaaaaaaaaaaaaaugcaucccccccccccccccccccccccccccccccaaaggcucuuuucagagccaccagaauu

SEQ ID NO: 6978 - RNA, 1855 nt, Artificial Sequence; identical to SEQ ID NO: 6972
  mRNA product Design i-2 comprising derived and/or modified sequence from LASV(Pinneo-NIG-1969;Clade I)__AIT17836__GPCstabilized (wt)

SEQ ID NO: 6979 - RNA, 1855 nt, Artificial Sequence
  mRNA product Design i-2 comprising derived and/or modified sequence from LASV(ISTH0009-NIG-2011;Clade II)__AIT17404__GPCstabilized (wt)
ggggcgcugccuacggagguggcagccaucuccuucucggcaucaagcuuaccaugggacaaaucauaacauuuuuccaggaaguaccucaugucauagaggaagugaugaacauuguccugauugcucucagccuucuggcaauacugaaggggaucuacaauguugccaccuguggccuauuuggacugguguccuuucuccucuuaugugggagaucaugcucaacaacuuauaaggguguuuaugagcuacaaacucuagagcuggacauggcaagccuuaauaugacaaugccccuaucuugcacaaagaacaacagucaccauuacaucauggucggaaaugagacuggcuuggagcugacuuuaacaaauacaaguauuaucaaccacaaguuuuguaaccuuucugaugcacauaaaaagaaucucuaugaccaugcuuuaaugaguaucaucucaaccuuccacuuaucuauuccuaauuuuaaucaguaugaagcaaugaguugugacuucaauggggggaagauaaguguucaguacaaccuuagccacgcuuaugcuguagaugcagccaaucacugugggacuaucgccaauggcguucuucagacuuuuaugaggauggcuugggguggcaguuacauagcacuugauuccggaugcgggaguugggauuguauaaugacuuccuaccaauauuugauaauccagaacaccacuugggaagaucacugccaguuuucucgcccauccccuaucgguuaucuggggcuacugucacaaaggaccagagacauuuacaucagucgaagacgccgggggacuuuuacuuggacucucucugauucugaagguaaugaaacaccggguggguacugucuaacaagauggaugcugauugaggccgaguugaagugcuuugggaacacagcaguugcgaaaugcaaugagaaacaugaugaagaguuuugugacauguuaagacuguuugauuucaacaaacaagcuauaaggaggcuaaagacacccgcacagaugaguauccaacugauaaacaaagcagugaaugcauugaucaaugaccagcuuauuaugaagaaucacuugagagauaucaugugcauuccuuacugcaauuacagcaaguacugguaucuaaaucacacuguaacagggaagacaucguugccaaggugcuggcuugugucaaaugguuccuaccugaaugagacacauuuuucugaugacauugaacaacaggcagacaacaugauaacagaacuguugcaaaaggaguacauggacaggcaagggaaaacacccuuaggguuaguagaucuuuuugucuucagcaccagcuuuuaucucauuagcaucuuccuccaccugaucaaaaucccaacccacagacauaucacagggaaacccugcccuaaaccacacagacuuaaccacaugggcauaugcucauguggucuauacaaacauccugguguaccagucaaguggaaaagauagggacuagugcaucacauuuaaaagcaucucagccuaccaugagaauaagagaaagaaaaugaagaucaauagcuuauucaucucuuuuucuuuuucguugguguaaagccaacacccugucuaaaaaacauaaauuucuuuaaucauuuugccucuuuucucugugcuucaauuaauaaaaaauggaaagaaccuagaucuaaaaaaaaaaaaaaaaaaaaaaaaaaaaaaaaaaaaaaaaaaaaaaaaaaaaaaaaaaaaaaaaugcaucccccccccccccccccccccccccccccccaaaggcucuuuucagagccaccagaauu

SEQ ID NO: 6980 - RNA, 1855 nt, Artificial Sequence
  mRNA product Design i-2 comprising derived and/or modified sequence from LASV(ISTH2010-NIG-2012;Clade II)__AIT17482__GPCstabilized (wt)
ggggcgcugccuacggagguggcagccaucuccuucucggcaucaagcuuaccaugggacaaaucauaacauuuuuccaggaaguaccucaugucauagaggaagugaugaacauuguccugauugcucucagccuucuggcaauauugaaggggaucuacaauguugcuaccuguggccucuuuggauugguguccuuccuccucuuauguggaaggucauguucaacaacuuacaaggguguuuaugagcuacaaacucuggagcuagacauggcaagccuuaauaugacaaugcccuuaucuugcacgaagaacaacagccaccauuacaucauggucggaaaugaaacuggcuuggagcuaacuuuaacaaauacaaguaucaucaaccacaaauuuuguaaccucucugaugcacauaagaagaaucuuuaugaucaugcuuuaaugaguaucauuucaaccuuccacuuauccauuccuaacuuuaaucaguaugaagcaaugagcugugacuucaaugggggaaagauaaguguucaguacaaccuuagccacgcuuaugcuguagaugcagccaaccacugugggaccaucgccaauggcguucuucagacuuuuaugaggauggcuugggguggcagcuauauagcacuugauuccggaugcgggaguugggauuguauaaugacuuccuaccaauauuugauaauccaaaacaucacuugggaagaucacugccaguuuucucgcccauccccuaucgguuaccuagggcuacugucacaaaggaccagggacauuuacaucagucgaagacgccgggggacuuuuacuuggacucucucugauucugaagguaaugaaacaccggguggguauugccuaacaagauggaugcugauugaagccgaguugaaaugcuuugggaacacagcaguugcgaaaugcaaugagaaacaugaugaagaguuuugugacauguuaagauuguuugacuuuaacaaacaggcuauaaggaggcuaaagacacccgcacagaugaguauccaacugauaaacaaagcagugaacgcacugaucaaugaccagcugauuaugaagaaucauuugagagauaucaugugcauuccuuacugcaauuacagcaaguacugguaucuaaaucauacuguaacagggaagacaucguugccaaggugcuggcuugugucaaaugguuccuaccugaaugagacacauuuuucugaugacauugaacaacaggcagacaacaugauaacagaacugcugcaaaaggaguacauagacaggcaagggaaaacaccuuuaggguuaguagaucuuuuugucuucagcaccagcuuuuaucucauuagcaucuuccuccaccugguuaaaaucccaacccacagacaugucguaggaaaacccugcccuaaaccacacagacucaaccacaugggcauauguucauguggucuauacaaacauccuggugugccagucaaguggaaaagauagggacuagugcaucacauuuaaaagcaucucagccuaccaugagaauaagagaaagaaaaugaagaucaauagcuuauucaucucuuuuucuuuuucguugguguaaagccaacacccugucuaaaaaacauaaauuucuuuaaucauuuugccucuuuucucugugcuucaauuaauaaaaaauggaaagaaccuagaucuaaaaaaaaaaaaaaaaaaaaaaaaaaaaaaaaaaaaaaaaaaaaaaaaaaaaaaaaaaaaaaaaugcaucccccccccccccccccccccccccccccccaaaggcucuuuucagagccaccagaauu

SEQ ID NO: 6981 - RNA, 1855 nt, Artificial Sequence
  mRNA product Design i-2 comprising derived and/or modified sequence from LASV(Lassa virus/H.sapiens-wt/NGA/2015/ISTH_0543;Clade II)__AVO03639__GPCstabilized (wt)
ggggcgcugccuacggagguggcagccaucuccuucucggcaucaagcuuaccaugggacaaaucauaacauuuuuccaggaagugccucaugucauagaggaaguaaugaacauuguccugauugcucucagccuucuggcaauauugaaggggaucuacaauguagccaccuguggccuuuuuggacugguguccuuucuccucuuauguggaagaucaugcucaacaacuuauaagggugucuacgagcuacaaacucuagagcuggacauggcaaaccuuaauaugacaaugccccuaucuugcacaaagaacaacagucaccauuacaucauggucggaaaugaaacuggcuuggagcugacuuuaacaaauacaaguauuaucaaccacaaguuuugcaaccuuucugaugcacauaaaaagaaucucuaugaccaugcuuuaaugaguaucaucucaaccuuccacuuaucuauuccuaauuuuaaucaguaugaagcaaugaguugugacuucaauggagggaagauaaguguucaguacaaccuuagccacacuuaugcuguagaugcagccaaucacugugggacuaucgccaauggcguucuucagacuuuuaugaggauggcuugggguggcaguuacauagcacuugauucuggaugcgggaguugggauuguauaaugacuuccuaccaauaucugguaauccagaacaccacuugggaagaucacugccaauuuucucgcccauccccuaucgguuaucuggggcuacugucacaaaggaccagagacauuuacaucagucgaagacgccgggggacuuucacuuggacucucucugauucugaagguaaugaaacaccggguggguacugucuaacaagauggaugcugauugaggccgaguugaagugcuuugggaacacagcaguugcgaaaugcaaugagaaacaugaugaagaguuuugugacauguuaagacuguucgauuuuaacaaacaagcuauaaggaggcugaagacacccgcacagaugaguauccaacuaauaaacaaagcagugaaugcauugaucaaugaccagcuuauuaugaagaaucacuuaagagauaucaugugcauuccuuacugcaauuacagcaaguacugguaucuaaaucacacugugacagggaagacaucguugccaaggugcuggcuuguaucaaaugguuccuaccugaaugagacacauuuuucugaugauauugaacaacaggcagacaacaugauaacagaacuguugcaaaaggaauacauagacaggcaagggaaaacacccuuaggguuaguagaucuuuuugucuucagcaccagcuuuuaucucauuagcauuuuccuccaccuggucaaaaucccaacucacagacauaucacagggaaacccugcccuaaaccacacagacuuaaccacaugggcauaugcucauguggucuauacaaacauccugguguaccagucaaguggaaaagauagggacuagugcaucacauuuaaaagcaucucagccuaccaugagaauaagagaaagaaaaugaagaucaauagcuuauucaucucuuuuucuuuuucguugguguaaagccaacacccugucuaaaaaacauaaauuucuuuaaucauuuugccucuuuucucugugcuucaauuaauaaaaaauggaaagaaccuagaucuaaaaaaaaaaaaaaaaaaaaaaaaaaaaaaaaaaaaaaaaaaaaaaaaaaaaaaaaaaaaaaaaugcaucccccccccccccccccccccccccccccccaaaggcucuuuucagagccaccagaauu

SEQ ID NO: 6982 - RNA, 1855 nt, Artificial Sequence
  mRNA product Design i-2 comprising derived and/or modified sequence from LASV(Lassa virus/H.sapiens-wt/NGA/2016/ISTH_0009;Clade II)__AVO03571__GPCstabilized (wt)
ggggcgcugccuacggagguggcagccaucuccuucucggcaucaagcuuaccaugggacaaaucauaacauuuuuccaggaaguaccucaugucauagaggaagugaugaacauuguccugauugcucucagccuucuggcaauacugaaggggaucuacaauguugccaccuguggccuccuuggacugguguccuuucuccucuuauguggaaggucaugcucaacaacuuauaaggguguuuaugagcuacaaacucuagagcuggacauggcaagccuuaauaugacaaugccccugucuugcacaaagaacaacagucaccauuacaucauggucggaaaugagacuggcuuggagcugacuuuaacaaauacaaguauuaucaaccacaaguuuuguaaccuuucugaugcacauaaaaagaaucucuaugaccaugcucuaaugaguaucaucucaaccuuccacuuaucuauuccuaauuuuaaccaguaugaagcaaugaguugugacuucaauggggggaggauaaguguucaguacaaccuuagccacucuuaugcuguagaugcagccaaucacugugggacuaucgccaauggcguucuucagacuuucaugaggauggcuugggguggcaguuacauagcacuugauuccggaugcgggaguugggauuguauaaugacuuccuaccaauacuugauaauccagaacaccacuugggaagaucacugccaguuuucucgcccauccccuaucgguuauuuggggcuacugucacagaggaccagagacauuuacaucagucgaagacgccgggggacuuuuacuuggacucucucugauucugaagguaaugaaacaccggguggguacugucuaacaagauggaugcugauugaggccgaguugaagugcuuugggaacacagcaguugcgaaaugcaaugagaaacaugaugaagaguucugugacauguuaagacuguuugauuuuaauaaacaagccauaaggaggcugaagacacccgcacagaugaguauccaacugauaaacaaagcagugaaugcauugaucaaugaccagcuuauuaugaagaaccacuugagagauaucaugugcauuccuuacugcaauuacagcaaguacugguaucuaaaucacacuguaacagggaagacaucguugccaaggugcuggcuugugucaaaugguuccuaccugaaugagacacauuuuuccgaugacauugaacaacaggcagacaacaugauaacagaauuguugcagaaggaguacauagacaggcaagggaaaacacccuugggguuaguagaucuuuuugucuucagcaccagcuuuuaucucauuagcaucuuccuccaccuggucaaaauuccaacccacagacauaucacagggaaacccugccccaaaccacacagacuuaaccacaugggcauaugcucauguggucuauacaaccauccuggugugccagucaaguggaaaagauagggacuagugcaucacauuuaaaagcaucucagccuaccaugagaauaagagaaagaaaaugaagaucaauagcuuauucaucucuuuuucuuuuucguugguguaaagccaacacccugucuaaaaaacauaaauuucuuuaaucauuuugccucuuuucucugugcuucaauuaauaaaaaauggaaagaaccuagaucuaaaaaaaaaaaaaaaaaaaaaaaaaaaaaaaaaaaaaaaaaaaaaaaaaaaaaaaaaaaaaaaaugcaucccccccccccccccccccccccccccccccaaaggcucuuuucagagccaccagaauu

SEQ ID NO: 6983 - RNA, 1855 nt, Artificial Sequence
  mRNA product Design i-2 comprising derived and/or modified sequence from LASV(Lassa virus/H.sapiens-wt/NGA/2016/ISTH_0017;Clade II)__AVO03567__GPCstabilized (wt)
ggggcgcugccuacggagguggcagccaucuccuucucggcaucaagcuuaccaugggacaaaucauaacauuuuuccaggaaguaccucaugucauagaggaagugaugaacauuguccugauugcucucagccuucuggcaauacugaaagggaucuacaauguugcuaccuguggccucuuuggguugguguccuuccuccucuuaugugggagaucaugcucaacaacuuacaaggguguuuaugagcuacaaacucuagagcuagacauggcaagccuuaauaugacaaugcccuuaucuugcacgaagaacaauucccaccauuacaucauggucggaaaugagacuggcuuggagcugacuuuaacaaauacaagcauuaucaaccacaaguuuuguaaccuuucugaugcacauaaaaagaaucuuuaugaccaugccuuaaugagcaucauuucaaccuuccacuuauccauuccuaacuuuaaucaguaugaagcaaugaguugugacuucaaugggggaaaaauaaguguucaguacaaccuuagccauacuuaugcuauagaugcagcuaaccacugugggaccauugccaauggcguucuucagacuuuuaugaggauggcuugggguggcaguuacauagcacuugauuccggaugcggcagcugggacugcauuaugacuuccuaccaauauuugauaauccagaacaccacuugggaagaucacugccaguuuucucgcccaucccccaucgguuaucuggggcuacugucacaaaggaccagagacauuuacaucagucgaagacgccgggggacuuuuacauggacccucucugacucugaagguaaugaaacaccagguggguacugucuaacgagauggaugcugauugaggccgaguugaagugcuuugggaacacagcaguugcaaaaugcaaugagaaacaugaugaagaguuuugugauauguuaagauuauuugacuuuaacaaacaagcuauaaggaggcugaagacacccgcgcagaugaguauccaacugauaaacaaagcagugaacgcacugaucaaugaccagcugauuaugaagaaucauuuaagagauaucaugugcauuccuuacugcaauuacagcaaguauugguaucuaaaucacacuguaacagggaagacaucauuaccaagaugcuggcuugugucgaaugguuccuaccugaaugagacacauuuuucugaugacauugaacaacaagcagauaacaugauaacagaacuuuugcaaaaggaauauauggauaggcaagggaaaacacccuuaggguuaguagaucuuuuugucuucagcaccagcuuuuaucucauuagcaucuuccuccaccuggucagaaucccaacucacagacaugucauagggaaacccugcccuaaaccacacagacucaaccacaugggcauaugcucauguggucuguacaaacauccuggugugccagucaaauggaaaagauagggacuagugcaucacauuuaaaagcaucucagccuaccaugagaauaagagaaagaaaaugaagaucaauagcuuauucaucucuuuuucuuuuucguugguguaaagccaacacccugucuaaaaaacauaaauuucuuuaaucauuuugccucuuuucucugugcuucaauuaauaaaaaauggaaagaaccuagaucuaaaaaaaaaaaaaaaaaaaaaaaaaaaaaaaaaaaaaaaaaaaaaaaaaaaaaaaaaaaaaaaaugcaucccccccccccccccccccccccccccccccaaaggcucuuuucagagccaccagaauu

SEQ ID NO: 6984 - RNA, 1855 nt, Artificial Sequence
  mRNA product Design i-2 comprising derived and/or modified sequence from LASV(Lassa virus/H.sapiens-wt/NGA/2018/ISTH_0959;Clade II)__AVV65099__GPCstabilized (wt)
ggggcgcugccuacggagguggcagccaucuccuucucggcaucaagcuuaccaugggacaaaucauaacauuuuuccaggaaguaccucaugucauagaggaagugaugaacauuguccugauugcucucagccuuuuggcaauacugaaggggaucuacaauguuguuaccuguggccucuuuggauugguguccuuccuccucuuauguggaagaucauguucaacaacuuacaaggguguuuaugagcuacaaacucuggagcuggacauggcaagccuuaauaugacaaugcccuuaucuugcacgaagaacaacagccaccauuacaucauggucggaaaugagacuggcuuggagcugacuuuaacaaauacaaguaucaucaaccauaaauuuuguaaccucucugaugcacauaaaaagaaucuuuaugaucaugcuuuaaugaguaucauuucaaccuuccacuuauccauuccaaacuuuaaucaguaugaagcaaugagcugugacuucaaugggggaaagauaaguguucaguacaaccuuagccacgccuaugcuauagaugcagccaaccacugcgggacuauugccaauggcguucuucaaacuuuuaugaggauggcuugggguggcagcuauauagcacuugauuccggaugcgggaguugggacuguauaaugacuuccuaccaguauuugauaauccaaaacaccacuugggaagaucauugucaguuuucucgcccauccccuaucgguuaccuagggcuacugucacaaaggaccagggacauuuacaucagucgaagacgccgggggacuuuuacuuggacucucucugauucugaagguaaugaaacaccggguggguauugucuaacaagauggaugcugauugaggccgaguugaaaugcuuugggaacacagcaguugcgaaaugcaaugagaaacaugaugaagaguuuugugacauguuaagauuguuugacuuuaacaaacaagcuauaaggaggcuaaagacacccgcacagaugaguauccagcugauaaacaaagcagugaacgcacugaucaaugaccagcugauuaugaaaaaucauuugagagauaucaugugcauuccuuacugcaauuacagcaaguacugguaucuaaaucauacuguaacagggaagacaucguugccaaggugcuggcuugugucaaaugguuccuaccugaaugagacacauuuuucugaugacauugaacaacaagcagacaauaugauaacagaacugcugcaaaaggaguacauagacaggcaagggaaaacaccuuuaggguuaguagaucuuuuugucuucagcaccagcuuuuaucucauuagcaucuuccuccaccugguuaaaaucccaacccacagacaugucauaggaaaacccugcccuaaaccacacagacuuaaucacaugggcauauguucauguggucuauacaaacauccuggugugccagucaaguggaaaagauagggacuagugcaucacauuuaaaagcaucucagccuaccaugagaauaagagaaagaaaaugaagaucaauagcuuauucaucucuuuuucuuuuucguugguguaaagccaacacccugucuaaaaaacauaaauuucuuuaaucauuuugccucuuuucucugugcuucaauuaauaaaaaauggaaagaaccuagaucuaaaaaaaaaaaaaaaaaaaaaaaaaaaaaaaaaaaaaaaaaaaaaaaaaaaaaaaaaaaaaaaaugcaucccccccccccccccccccccccccccccccaaaggcucuuuucagagccaccagaauu

SEQ ID NO: 6985 - RNA, 1855 nt, Artificial Sequence
  mRNA product Design i-2 comprising derived and/or modified sequence from LASV(LASV003-NIG-2008;Clade II)__AIT17580__GPCstabilized (wt)
ggggcgcugccuacggagguggcagccaucuccuucucggcaucaagcuuaccauggggcaaaucauaacauuuuuccaggaagugccucaugucauagaagaagugaugaacauuguccugauugcccucagccuuuuggcaauauugaaagggaucuacaauguugcuacuuguggccucuuuggacugguguccuuucuucucuuauguggaagaucaugcucaacaacuuacaaagguguuuaugagcuacaaacucuagagcuagacauggcaagccuuaauaugacaaugcccuuaucuugcacaaagaauaauagccaccauuacaucauggucggaaaugaaacuggcuuagagcugacuuuaacaaauacaaguaucaucaaccacaaguuuuguaaccuuucugaugcacauaaaaagaaucuuuaugaccaugcuuuaaugagcaucaucucaaccuuccacuuauccauuccuaacuuuaaucaauaugaagcaaugaguugugacuucaauggggggaagauaaguguucaguacaaccuuagccacacuuaugcuguagaugcagcuaaccacugugggacuauugccaauggcguucuucagacuuucaugaggauggcuugggguggcagcuacauagcacuugauuccggaugcgggaguugggauuguauaaugacuuccuaccaauaucugauaauccagaacaccacuugggaagaucauugccaguuuucucgcccaucccccaucgguuaucuggggcuacugucacaaaggaccagggacauuuacaucagucgaagacgccgggggacuuuuacuuggacccucucugauucugaaagcaaugaaacuccagguggguauugucuaacaagguggauguugauugaggccgagcugaagugcuuugggaacacagcaguugcgaaaugcaaugaaaaacaugaugaagaguuuugugacaugcuaagauuguuugacuuuaacaaacaagcuauaaggaggcugaaagcacccgcacagaugagcauccaacuaauaaacaaagcagugaaugcacugaucaaugaccagcugauaaugaagaaucauuuaagagauaucaugugcauuccuuacugcaauuacagcaaauauugguacuugaaucacacuguaacagggaggacaucguuaccaagaugcuggcuugugucaaaugguuccuaccugaaugagacacauuuuucugacgacauugaacaacaagcagacaauaugauaacagaacuguugcagaaggaguacauggacaggcaagggaaaacaccuuuaggguuaguagaucuuuuugucuucagcaccagcuuuuaucucaucagcaucuuccuccaccugguuaaaaucccaacccacagacaugucauagggaaacccugcccuaaaccacacagacucaaccacaugggcauaugcucauguggucuguacaaacauccuggugugccagucaaguggaaaagauagggacuagugcaucacauuuaaaagcaucucagccuaccaugagaauaagagaaagaaaaugaagaucaauagcuuauucaucucuuuuucuuuuucguugguguaaagccaacacccugucuaaaaaacauaaauuucuuuaaucauuuugccucuuuucucugugcuucaauuaauaaaaaauggaaagaaccuagaucuaaaaaaaaaaaaaaaaaaaaaaaaaaaaaaaaaaaaaaaaaaaaaaaaaaaaaaaaaaaaaaaaugcaucccccccccccccccccccccccccccccccaaaggcucuuuucagagccaccagaauu

SEQ ID NO: 6986 - RNA, 1855 nt, Artificial Sequence
  mRNA product Design i-2 comprising derived and/or modified sequence from LASV(LASV035-NIG-2009;Clade II)__AIT17588__GPCstabilized (wt)
ggggcgcugccuacggagguggcagccaucuccuucucggcaucaagcuuaccauggggcaaaucauaacauuuuuccaggaagugccucaugucauugaggaggugaugaacauugucuuaauugcucucagucuucuagcaauacugaaagggauuuacaauguugcuaccuguggccucuuuggguugguguccuuucuucucuuauguggaaggucaugcucaacaacuuacaaggguguuuaugagcuucaaacucuagagcuggauauggcaagccuuaauaugacaaugcccuuauccugcacgaagaacaacagccaccacuacaucaugguuggaaaugagacuggcuuggagcugacuuugacaaacacaaguaucaucaaccacaaguucugcaaccuuuccgaugcacauaaaaagaaucucuaugaccaugcuuuaaugagcaucaucucaacuuuccaccuauccaucccuaacuuuaaucaguaugaagcaaugaguugugacuucaauggggggaagauaaguguucaguacaaccucagccacgcuuaugcuguagaugcagcuaaccauugugggaccauugccaauggaguucuucaaacuuuuaugaggauggcuugggguggcaguuacauagcacuugauucuggaugcgggaguugggauuguauaaugacuuccuaccaauauuugauaauccaaaacaccacuugggaagaucacugccaguuuucucgcccauccccuauugguuaucuggggcuacugucacaaagaaccagggauauuuacaucagccgaagacgccggggaacuuuuacuuggacucucucugauucugaaggcaaugaaacaccggguggauauuguuuaacaagauggaugcugauugaggccgaauuaaagugcuuugggaacacagcaguugcgaaaugcaaugagaaacaugaugaagaguuuugugacauguuaagguuguuugacuuuaacaaacaggcuauaaggaggcuaaaggcacccgcacagaugagcauccaacuaauaaacaaagcagugaacgcacugaucaaugaccagcucauuaugaagaaucauuuaagagauaucaugugcauuccuuacugcaauuacagcaaguauugguauuuaaaucacacuguaacagggaagacaucguugccaagaugcuggcuuguaucaaaugguuccuaccugaaugaaacacauuuuucugaugacauugaacaacaagcagauaacaugauaacagaauuguuacagaaagaguacauugacaggcaagggaaaacacccuuaggguugguggaucuuuuugucuucagcacuagcuucuaccuuauuagcaucuuccuccaccugguuaaaaucccaacccacagacaugucauagggaagcccugccccaagccacacagacucaaccacaugggcauaugcucauguggucuguacaaacauccugguguaccagucaaguggaaaagauagggacuagugcaucacauuuaaaagcaucucagccuaccaugagaauaagagaaagaaaaugaagaucaauagcuuauucaucucuuuuucuuuuucguugguguaaagccaacacccugucuaaaaaacauaaauuucuuuaaucauuuugccucuuuucucugugcuucaauuaauaaaaaauggaaagaaccuagaucuaaaaaaaaaaaaaaaaaaaaaaaaaaaaaaaaaaaaaaaaaaaaaaaaaaaaaaaaaaaaaaaaugcaucccccccccccccccccccccccccccccccaaaggcucuuuucagagccaccagaauu

SEQ ID NO: 6987 - RNA, 1855 nt, Artificial Sequence
  mRNA product Design i-2 comprising derived and/or modified sequence from LASV(LASV1000-NIG-2009;Clade II)__AIT17782__GPCstabilized (wt)
ggggcgcugccuacggagguggcagccaucuccuucucggcaucaagcuuaccaugggacaaaucauaacauuuuuccaggaaguuccucaugucauagaggaagugaugaacauuguccugauugcucucagccuccuggcaauacuaaaagggaucuacaauguugcuaccuguggccucuuuggauugguguccuuccuccucuuauguggaagaucaugcucaacaacuuacaaggguguuuaugagcugcaaacucuagagcuagacauggcaagccuuaauaugacaaugccucuaucuugcacgaagaauaacagccaccauuacaucauggucggaaaugagacuggcuuggagcugacuuuaacaaacacaaguauuaucaaucacaaguuuuguaaccuuucugaugcacacaaaaagaaucuuuaugaccaugcuuuaaugagcaucaucucaaccuuccauuuaucuauucccaacuucaaucaguaugaagcaaugaguugugacuucaaugggggaaagauaaguguucaguacaaccuuagccacacuuaugcuguagaugcagccaaccacugugggacuaucgccaauggcguccuucagaccuuuaugaggauggcuugggguggcaguuacauagcacuugauuccggaugcgggaguugggacuguauaaugacuuccuaucaauaucugauaauccaaaacaccacuugggaagaucacugccaguuuucucgcccaucuccuaucgguuaucuggggcuacugucacaaaggaccagagacauuuacaucagucgaagacgccgggggacuuucacuuggacucucucugauucugaagguaaugaaacaccggguggguacugucuaacaagguggaugcugauugaggccgaguugaagugcuuugggaacacagcaguugcgaaaugcaaugagaaacaugaugaagaguuuugugacauguuaagauuguuugacuuuaacaaacaagcuauaaagaggcugaagacacccgcacagaugaguauucaacugauaaacaaagcagugaacgcacugaucaaugaccagcugauuaugaagaaucauuugagagacaucaugugcauuccuuacuguaauuacagcaaguauugguaucuaaaucacaccguaacagggaagacaucguugccaaggugcuggcuugugucaaaugguuccuaccugaaugagacacacuuuucugaugacauugaacaacaagcagauaacaugauaacagaacuauugcaaaaggaguacauagacaggcaagggaaaacacccuuaggguuaguagaccuuuuugucuuuagcaccagcuuuuaucucauuagcaucuuccuccaccuggucaaaaucccaacccauagacaugucguagggaaacccugcccuaaaccacacagacucaaccacaugggcauaugcucauguggucuauacaaacauccugguguaccagucaaauggaaaagauagggacuagugcaucacauuuaaaagcaucucagccuaccaugagaauaagagaaagaaaaugaagaucaauagcuuauucaucucuuuuucuuuuucguugguguaaagccaacacccugucuaaaaaacauaaauuucuuuaaucauuuugccucuuuucucugugcuucaauuaauaaaaaauggaaagaaccuagaucuaaaaaaaaaaaaaaaaaaaaaaaaaaaaaaaaaaaaaaaaaaaaaaaaaaaaaaaaaaaaaaaaugcaucccccccccccccccccccccccccccccccaaaggcucuuuucagagccaccagaauu

SEQ ID NO: 6988 - RNA, 1855 nt, Artificial Sequence
  mRNA product Design i-2 comprising derived and/or modified sequence from LASV(LASV221-NIG-2010;Clade II)__AIT17624__GPCstabilized (wt)
ggggcgcugccuacggagguggcagccaucuccuucucggcaucaagcuuaccaugggacaaaucauaacauuuuuccaggaaguaccucaugucauagaggaagugaugaacauuguccugauugcucucagccuucuggcaauacugaaagggaucuacaauguugcuaccuguggccucuuuggauugguguccuuccuccucuuauguggaagaucaugcucaacaacuuacaaggguguuuaugagcuacaaacucuagagcuagacauggcaagccuuaauaugacaaugcccuuaucuugcacgaagaacaacucccaccauuacaucauggucggaaaugagacuggcuuggagcugacuuugacaaauacaagcauuaucaaccacaaguuuuguaaccuuucugaugcgcauaaaaagaaucuuuaugaccaugcuuuaaugaguaucaucucaaccuuccacuuguccauuccuaacuuuaaucaguaugaagcaaugaguugugauuucaaugggggaaagauaaguguucaguacaaccuuagccacacuuaugcuauagaugcagccaaccacugugggaccauugccaauggcguucuucagacuuucaugagaauggcuugggguggcaguuacauagcacuugauuccggaugcgggagcugggauugcauaaugacuuccuaccaauauuugauaauccaaaacaccacaugggaagaucacugccaguuuucucgcccaucccccaucgguuaucuggggcuacuaucacaaagaaccagggacauuuacauuagucgaagacgccgggggacuuucacuuggacucucucugacucugaagguaaugaaacaccggguggguauugucuaacaagauggaugcugauugaggccgaguugaagugcuuuggaaacacagcaguugcaaaaugcaaugaaaaacaugaugaagaguuuugugauauguugagauuguuugacuucaacaaacaagcuauaaggaggcuaaagacacccgcacagaugaguauccaacugauaaacaaagcggugaacgcacugaucaaugaccagcugaucaugaagaaucauuugagagauaucaugugcauuccuuacugcaauuacagcaaguauugguaucuaaaucacacuguaacagggaagacaucguugccaagaugcuggcuugugucgaaugguucuuaccugaaugagacacauuuuucugaugacauugaacaacaagcagacaacaugauaacagaaauguugcaaaaggaguacauggacaggcaagggaaaacacccuuaggguuaguagaucuuuuugucuucagcaccagcuuuuaucucauuagcaucuuccuccaccuaguuaaaauuccaacccacagacaugucauagggaaacccugcccuaaaccacacagacucaaccacaugggcauauguucauguggucuguauaagcauccuggcgugccagucaaguggaaaagauagggacuagugcaucacauuuaaaagcaucucagccuaccaugagaauaagagaaagaaaaugaagaucaauagcuuauucaucucuuuuucuuuuucguugguguaaagccaacacccugucuaaaaaacauaaauuucuuuaaucauuuugccucuuuucucugugcuucaauuaauaaaaaauggaaagaaccuagaucuaaaaaaaaaaaaaaaaaaaaaaaaaaaaaaaaaaaaaaaaaaaaaaaaaaaaaaaaaaaaaaaaugcaucccccccccccccccccccccccccccccccaaaggcucuuuucagagccaccagaauu

SEQ ID NO: 6989 - RNA, 1855 nt, Artificial Sequence
  mRNA product Design i-2 comprising derived and/or modified sequence from LASV(LASV237-NIG-2010;Clade II)__AIT17638__GPCstabilized (wt)
ggggcgcugccuacggagguggcagccaucuccuucucggcaucaagcuuaccaugggacaaaucauaacauuuuuccaggaaguaccucaugucauagaggaagugaugaacauuguccugauugcucucagccuucuggcaauacugaaggggaucuacaauguugccaccuguggccuauuuggacugguguccuuucuccucuuauguggaagaucaugcucaacaacuuauaaggguguuuaugagcuacaaacucuagagcuggauauggcaagccuuaauaugacaaugccccuaucuugcacaaagaacaacagucaccauuacaucauggucggaaaugagacuggcuuggagcugacuuuaacaaauacaaguauuaucaaccacaaguuuuguaaccuuucugaugcacauaaaaaggaucucuaugaccaugcuuuaaugaguaucaucucaaccuuccacuuaucuauuccuaauuuuaaucaguaugaagcaaugaguugugacuucaauggggggaagauaaguguucaguacaaccuuagccacacuuaugcuguagaugcagccaaucacugugggacuaucgccaauggcguucuucagacuuuuaugaggauggcuugggguggcaguuacauagcacuugauuccggaugcgggaguugggauuguauaaugacuuccuaccaauauuugauaauccagaacaccacuugggaagaucacugccaguuuucucgcccauccccuaucgguuaucuggggcuacugucacaaaggaccagagacauuuacaucagucgaagacgccgggggacuuuuacuuggacucucucugauucugaagguaaugaaacaccggguggguacugucuaacaagauggaugcugauugaggccgaguugaagugcuuugggaacacagcaguugcgaaaugcaaugagaaacaugaugaagaguuuugugacauguuaagacuguuugauuucaacaaacaagcuauaaggaggcuaaagacacccgcacagaugaguauccaacugauaaacaaagcagugaaugcauugaucaaugaccagcuuauuaugaagaaucacuugagagauaucaugugcauuccuuacugcaauuacagcaaguacugguaucugaaucacacuguaacagggaagacaucguugccgaggugcuggcuugugucaaaugguuccuaccugaaugagacacauuuuucugaugacauugaacaacaggcagacaacaugauaacagaacuguugcaaaaggaguacauggacaggcaagggaaaacacccuuaggguuaguagaccuuuuugucuucagcaccagcuuuuaucucauuagcaucuuccuccaccugaucaaaaucccaacccacagacauaucacagggaaacccugcccuaaaccacacagacuuaaccacaugggcauaugcucauguggucuauacaaacauccugguguaccagucaaguggaaaagauagggacuagugcaucacauuuaaaagcaucucagccuaccaugagaauaagagaaagaaaaugaagaucaauagcuuauucaucucuuuuucuuuuucguugguguaaagccaacacccugucuaaaaaacauaaauuucuuuaaucauuuugccucuuuucucugugcuucaauuaauaaaaaauggaaagaaccuagaucuaaaaaaaaaaaaaaaaaaaaaaaaaaaaaaaaaaaaaaaaaaaaaaaaaaaaaaaaaaaaaaaaugcaucccccccccccccccccccccccccccccccaaaggcucuuuucagagccaccagaauu

SEQ ID NO: 6990 - RNA, 1855 nt, Artificial Sequence
  mRNA product Design i-2 comprising derived and/or modified sequence from LASV(LASV253-NIG-2011;Clade II)__AIT17670__GPCstabilized (wt)
ggggcgcugccuacggagguggcagccaucuccuucucggcaucaagcuuaccauggggcaaaucauaacauuuuuucaggaagugccucaugucauagaagaagugaugaacauuguccugauugcccucagccuucuggcaauauugaaagggaucuacaauguugcuacuuguggccucuuuggacugguguccuuucuucucuuauguggaagaucaugcucaacaacuuacaaagguguuuaugagcuacaaacucuagagcuagacauggcaagccuuaauaugacaaugcccuuaucuugcacaaagaauaauagccaccauuacaucauggucggaaaugaaacuggcuuagagcugacuuuaacaaauacaaguaucaucaaccacaaguuuuguaaccuuucugaugcacauaaaaagaaucuuuaugaccaugcuuuaaugagcaucaucucaaccuuccacuuauccauuccuaacuucaaucaauaugaagcaaugaguugugacuucaauggggggaagauaaguguucaguacaaccuuagccacacuuaugcuguagaugcagcuaaccacugugggacuauugccaauggcguucuucagacuuuuaugaggauggcuugggguggcagcuacauagcacuugauuccggaugcgggagcugggauuguauaaugacuuccuaccaauauuugauaauccagaacaccacuugggaggaucacugccaguuuucucgcccaucccccaucgguuaucuggggcuacugucacaaaggaccagggacauuuacaucagucgaagacgccggggaacuuuuacuuggacccucucugauucugaaggcaaugaaacuccagguggguauugucuaacaagguggauguugauugaggccgaguugaagugcuuugggaacacagcaguugcgaaaugcaaugagaaacaugaugaagaguuuugugacaugcuaagauuguuugacuuuaauaaacaagcuauaaggagacugaaagcacccgcacagaugaguauucaacuaauaaacaaagcagugaaugcacugaucaaugaccagcugauaaugaagaaucauuuaagagauaucaugugcauuccuuacugcaauuacagcaaguauugguaucugaaucacacuguaacaggaaggacaucguuaccaagaugcuggcuugugucaaaugguuccuaccugaaugagacacauuuuucugacgacauugaacaacaagcagacaacaugauaacagaacuguugcagaaggaguacauagacaggcaagggaaaacaccuuuaggguuaguggaucuuuuugucuucagcaccagcuuuuaucucaucagcaucuuccuccaccugguuaaaaucccaacccacagacauaucauagggaaacccugcccuaaaccacacagacucaaccacaugggcauaugcucauguggucuguacaaacauccuggugugccaguuaaguggaaaagauagggacuagugcaucacauuuaaaagcaucucagccuaccaugagaauaagagaaagaaaaugaagaucaauagcuuauucaucucuuuuucuuuuucguugguguaaagccaacacccugucuaaaaaacauaaauuucuuuaaucauuuugccucuuuucucugugcuucaauuaauaaaaaauggaaagaaccuagaucuaaaaaaaaaaaaaaaaaaaaaaaaaaaaaaaaaaaaaaaaaaaaaaaaaaaaaaaaaaaaaaaaugcaucccccccccccccccccccccccccccccccaaaggcucuuuucagagccaccagaauu

SEQ ID NO: 6991 - RNA, 1855 nt, Artificial Sequence
  mRNA product Design i-2 comprising derived and/or modified sequence from LASV(LASV254-NIG-2011;Clade II)__AIT17674__GPCstabilized (wt)
ggggcgcugccuacggagguggcagccaucuccuucucggcaucaagcuuaccaugggacaaaucauaacauuuuuccaggaaguaccucaugucauagaggaagugaugaacauuguucugauugcucucagccuucuggcaauauugaaagggaucuacaauguugcuaccuguggccucuuuggauugguguccuuucuucucuuauguggaagaucaugcucaacaacuuacaaggguguuuaugagcuacaaacucuagagcuagacaugacaaaccucaauaugacaaugccuuuauccugcacgaaaaacaacagccaccauuacaucauggucggaaaugagacuggucuggagcugacuuuaacaaauacaagcaucaucaaccacaaguuuuguaaccuuucugaugcacauaaaaagaaucuuuauaaccaugcuuuaaugaguauuauuucaacuuuccacuuauccauuccuaacuuuaaucaguaugaagcaaugaguugugacuucaaugggggcaagauaaguguccaguacaaccuuagccauaguuaugcuguggaugcagcuaaccacugugggaccauugccaauggcgugcuucagacuuuuaugaggauggcuugggguggcaguuacauagcacuugauuccggaugcgggaauugggauuguauaaugaccuccuaccaauauuugauaauccaaaacaccacuugggaagaucacugucaguuuucucgcccauccccuauugguuaucugggguuacugucacaaaggaccagggacauuuacaucagucgaagacgccgggggacuuuuacuuggacucucucugauucugaagguaaugaaacaccagguggguauugucuaacaagauggaugcugauugaggccgaguugaagugcuuugggaacacagcaguugcgaaauguaaugagaaacaugaugaggaguuuugugacauguuaagauuguuugacuuuaacaaacaagcuauaaggaggcugaagacacccgcacaggcgaauauccaacugauaaauaaagcagugaacgcacugaucaaugaccagcugaucaugaagaaucauuugagagauaucaugugcauuccuuacugcaauuacagcaaguauugguacuuaaaucacacuguaacagggaagacaucguugccaagaugcuggcuugugucaaauggcuccuacuugaaugagacacauuuuucugaugacauugaacaacaagcagacaauaugauaacagaacuguugcagaaggaguacauggacaggcaagggaaaacacccuuaggguugguagaucuuuuugucuucagcaccagcuuuuaucucauuagcaucuuccuccaccugguuaaaaucccaacccacagacaugucauagggaaacccugcccuaaaccacacagacucaaccacaugggcauaugcucauguggucuguacaaacauccugguguaccagucaaguggaaaagauagggacuagugcaucacauuuaaaagcaucucagccuaccaugagaauaagagaaagaaaaugaagaucaauagcuuauucaucucuuuuucuuuuucguugguguaaagccaacacccugucuaaaaaacauaaauuucuuuaaucauuuugccucuuuucucugugcuucaauuaauaaaaaauggaaagaaccuagaucuaaaaaaaaaaaaaaaaaaaaaaaaaaaaaaaaaaaaaaaaaaaaaaaaaaaaaaaaaaaaaaaaugcaucccccccccccccccccccccccccccccccaaaggcucuuuucagagccaccagaauu

SEQ ID NO: 6992 - RNA, 1855 nt, Artificial Sequence
  mRNA product Design i-2 comprising derived and/or modified sequence from LASV(Nig08-A19;Clade III)__ADU56618__GPCstabilized (wt)
ggggcgcugccuacggagguggcagccaucuccuucucggcaucaagcuuaccaugggacaaauugugacauucuuccaggaagucccucauguuaucgaggaagugaugaauaucguccucauagcauugucaauuuuggcaauccuaaaaggacucuacaacauugcuacauguggcuugauaggccuugucacauuccucuuacuuucuggaaggucauguucaaugaccuacaaaggaguuuaugaacuacagacccuugaacugaacaugaacacucugaauaugacuaugccgcuaucuuguacaaagaacaauagucaccacuacaucauggugggaaacgagacagggcuugagcucaccuuaaccaacacaagcuugcuccaucacaaauucugcaaccuaucagaugcucauaagaaaaaucuuuaugaucacacucucaugagcauuaucuccacauuccauuuguccauuccuaacuuuaaucaguaugaggcaaugaguugugauuuuaaugguggcaagaucacugugcaauacaaucugagucauagcuaugcaauugaugcagcaaaccauuguggcacaguggcaaacgguguguugcaaacauuuaugaggauggcuuggggagguaguuacauugcccuugauuccggaugcgggaaaugggauuguauaaugaccaguuaucaauacuuaaucauccagaacacaaccugggaagaucauugucaauuuuccagaccauccccaauuggauaucuugggcuccucucacagagaacuagagacauauacauuaguagaagacgccggggaacauuuacuuggacacuuucugacucagaaggaaaugagacaccaggagguuacugucucacuagauggauguugauugaggcugaacuaaaguguuucgggaauacagcuguagcuaagugcaaugaaaaacacgaugaagaguuuugugacaugcuaaggcuauuugacuucaauaagcaagcuauaaggagguuaaaggcacccgcccaaaugagcauacagcugaucaacaaagcaguuaaugcucuaauaaacgaucagcugaucaugaagaaucaucuaagggacaucaugugcauaccauacugcaauuacagcaaguacugguaucucaaucacaccucaacagggaggaccucauuaccgagauguuggcuuguuucaaaugggucauaucucaaugaaacucacuuuucagaugacauugagcagcaagcugauaacaugauaacugaaauguugcaaaaagaauaccuggacagacaaggaaagaccccauugggauugguagaucuuuuugucuucaguacaaguuuuuacuuaaucaguauuuuccuccaucuggucaaaauaccaacccauagacacauuguagggaagccuugccccaaaccucauagguugaaccacaugggcaucugcucuuguggucuauauaaacagccaggaguacccguuagauggaagagauaaggacuagugcaucacauuuaaaagcaucucagccuaccaugagaauaagagaaagaaaaugaagaucaauagcuuauucaucucuuuuucuuuuucguugguguaaagccaacacccugucuaaaaaacauaaauuucuuuaaucauuuugccucuuuucucugugcuucaauuaauaaaaaauggaaagaaccuagaucuaaaaaaaaaaaaaaaaaaaaaaaaaaaaaaaaaaaaaaaaaaaaaaaaaaaaaaaaaaaaaaaaugcaucccccccccccccccccccccccccccccccaaaggcucuuuucagagccaccagaauu

SEQ ID NO: 6993 - RNA, 1858 nt, Artificial Sequence
  mRNA product Design i-2 comprising derived and/or modified sequence from LASV(G1180-SLE-2010;Clade IV)__AIT17168__GPCstabilized (wt)
ggggcgcugccuacggagguggcagccaucuccuucucggcaucaagcuuaccaugggacagauagugacauucuuccaggaagugccucauguaauagaagaggugaugaacauuguucucauugcacugucuauacuagcagugcugaaaggucuguacaauuuugcaacauguggccucguuggucuacucacuuuccuccuguuguguggcagaucuugcacagcuagucguuacaaagggguuuaugagcuucagacucuggaacuaaacauggagacacucaauaugaccaugccucucuccugcacaaagaacaacagucaucauuauauaaugguggguaaugagacaggacuagaacugacuuugacuaacacgagcaucauuaaucauaaauuuugcaaucugucugaugcccacaaaaagaaccuuuaugaccacgcucuuaugagcauaauuucaacuuuccacuuauccauccccaacuucaaucaguaugaggcaaugagcugcgauuuuaaugggggaaagauuagugugcaguacaaccugagucacagcuaugcuggggaugcagccaaucauugugguacuguugcaaauggugucuugcagaccuucaugaggauggcuuggggugggagcuacauugcucuugacucaggcugcggcaguugggacuguauuaugacuaguuaucaauaucugauaauccaaaauacaaccugggaagaucacugccaguucucaagaccaucucccauugguuaucucgggcuccuuucacaaagaaccagagauauuuacauuaguagaagacgccggggcacauucacauggacacugucagauucugaaggcaaggacacaccagggggauauugucugaccagauggaugcuaauugaagcugaacuaaaaugcuucgggaacacagcuguggcaaaauguaaugagaagcaugaugaggaauuuugugacaugcugaggcuguuugacuucaacaaacaagccauucaaagguugaaagcucccgcacaaaugagcauucaauugaucaacaaggcaguaaaugcuuugauaaaugaccaacuuauaaugaagaaccauuuacgagacaucaugugcaucccauacuguaauuacagcaaguauugguaccucaaccacacaaccacugggaaaacaucacugccuaaguguuggcuuguaucaaaugguucauacuuaaaugagacccacuuuucugaugauauugagcaacaagcugacaacaugaucacugagauguuacagaaggaguauauggaaaggcagggcaagacaccauugggccuaguugaccucuuuguguuuagcacaaguuucuaucucauuagcaucuuccuucaccuggucaaaauaccaacucauaggcauauuguaggcaagucgugucccaaaccucauagauugaaucacaugggcauauguuccuguggacucuacaaacagcccggugugccugugaaauggaagagaugaggacuagugcaucacauuuaaaagcaucucagccuaccaugagaauaagagaaagaaaaugaagaucaauagcuuauucaucucuuuuucuuuuucguugguguaaagccaacacccugucuaaaaaacauaaauuucuuuaaucauuuugccucuuuucucugugcuucaauuaauaaaaaauggaaagaaccuagaucuaaaaaaaaaaaaaaaaaaaaaaaaaaaaaaaaaaaaaaaaaaaaaaaaaaaaaaaaaaaaaaaaugcaucccccccccccccccccccccccccccccccaaaggcucuuuucagagccaccagaauu

SEQ ID NO: 6994 - RNA, 1858 nt, Artificial Sequence
  mRNA product Design i-2 comprising derived and/or modified sequence from LASV(G1442-SLE-2011;Clade IV)__AIT17180__GPCstabilized (wt)
ggggcgcugccuacggagguggcagccaucuccuucucggcaucaagcuuaccaugggacaaauagugacauucuuucaggaagugccucaugugauagaggagguaaugaacauugugcucauugcacuauccauacuggcagugcugaagggucuauacaauguugcaacaugcggccugauugguuuagucaccuuccuauuguuaugugguaggucuugcacaacaacucuuuacaaaggaguuuacgaacuucagacucuggaauuaaacauggagacacucaauaugacuaugccucucucuuguacaaagaacaacagucaccacuauauaaggguggguaaugagacaggacuagaguugacccugaccaacacaagcaucaucaaucacaaguuuugcaaucuaucugaugcucacaaaaagaaccucuaugaucaugcuuugaugagcauaaucucgacuuuucacuuguccauucccaacuucaaccaauaugaggcaaugagcugugacuucaauggagggaagauuagugugcaguauaaccugagucacagcuaugcuggagaugcagccaaccauugugguacaguugcaaaugguguuuuacaaaccuucaugaggauggcuuggggugggaguuacaucgcccuugacucagguugcggcaauugggacuguauuaugacuaguuaucaauaccuaauaauucagaauacgaccugggaugaucauugccaauucucaagaccaucccccaucgguuaucuugggcuccucucacaaaggaccagagauguuuauaucaguagaagacgccggggcacauucacauggacacugucagauucugaaggcaaggacacaccaggaggguacugucugaccagguggaugcuaauugaagcugaacugaaaugcuuuggcaacacagcuguagcaaaauguaaugagaaacaugaugaagaauucugugacaugcuaaggcuguuugacuucaauaaacaagcuauucagagguugaaagcccccgcacaaaugaguauucaguugaucaacaaagcagugaaugcuuugauaaaugaccaacuaauaaugaaaaaccaucuacgggacaucaugugcauuccauacugcaauuacagcaaguacugguaucucaacaacacagccacugggaaaacaucacugcccaaauguuggcuuauaucaaauggcucauauuugaacgaaacucacuucucugaugacauugaacaggaagcugacaauaugaucacugagauguuacaaaaagaauacauggagaggcaggggaagacaccauuaggucugguugaccucuuuguguucagcacaaguuucuaucucauuagcaucuuccuucaccuagucaaaauaccaacucacaggcauauugugggcaaaucauguccuaaaccccauagguugaaucacauggguauuugcucuuguggacuuuauaaacaacccggugugccuguaagauggaagagaugaggacuagugcaucacauuuaaaagcaucucagccuaccaugagaauaagagaaagaaaaugaagaucaauagcuuauucaucucuuuuucuuuuucguugguguaaagccaacacccugucuaaaaaacauaaauuucuuuaaucauuuugccucuuuucucugugcuucaauuaauaaaaaauggaaagaaccuagaucuaaaaaaaaaaaaaaaaaaaaaaaaaaaaaaaaaaaaaaaaaaaaaaaaaaaaaaaaaaaaaaaaugcaucccccccccccccccccccccccccccccccaaaggcucuuuucagagccaccagaauu

SEQ ID NO: 6995 - RNA, 1858 nt, Artificial Sequence
  mRNA product Design i-2 comprising derived and/or modified sequence from LASV(G3010-SLE-2013;Clade IV)__AIT17344__GPCstabilized (wt)
ggggcgcugccuacggagguggcagccaucuccuucucggcaucaagcuuaccaugggacagauaguaacauucuuccaggaagugccucaugugauagaagaggugaugaacauuguucucauugcacugucuauauuagcagugcugaaaggucuguacaauuuugcaacauguggccucguugguuugguuaccuuccuccuguuaugugguaggucuugcacaaccagucuuuacaaagggguuuaugagcuucagacucuggaacuaaacauggagacacucaauaugaccaugccucucuccuguacaaagaacaacagucaucauuauauuaugguggguaaugagacaggacuagaacugaccuugaccaacacgagcaucauuaaucauaaauuuugcaaucugucugaugcccacaaaaagaaccucuauaaucacgcucuuaugagcauaauuucaacuuuccaucuguccauucccaacuucaaucaguaugaggcaaugagcugcgauuucaaugggggaaagauuagugugcaguacaaccugagucacaguuaugcuggggaugcggccagccauuguggcacuguugcaaauggugucuuacagacuuucaugaggauggcuugggguggaagcuauauugcucuugacucaggcugcggcaagugggacugcauuaugacuaguuaucaguaccugauaauucaaaauacaaccugggaagaucacugccaauucucaagaccaucucccauuggcuaucucgggcuccucucacaaaggaccagagauauuuauauuaguagaagacgccggggcacauucacauggacacugucggauucugaagguaaggacacaccagggggauauuguuugaccagauggaugcuaauugaagcugaacuaaagugcuucgggaacacagcuguagcaaaauguaaugagaagcaugaugaggaauuuugugacaugcugaggcuguuugacuucaacaaacaagccauucaaagauugaaaacucccgcacaaaugagcauucaguugaucaacaaggcaguaaaugccuuaauaaaugaccagcuuauaaugaagaaccaucuacgagacauaaugugcauuccauacuguaacuacagcaaguauugguaccucaaccacacaaccacugggaaaacaucacugccuaaauguuggcuuguaucaaauggcucauacuugaaugagacccacuuuucugaugauauugaacaacaggcugacaacaugaucacugagauguuacagaaagaguacauggagaggcaggggaagacaccauugggccuggucgaccuuuuuguguucagcacaaguuucuaucucaucaguaucuuucuucaccuagucaaaauaccaacucauagacauauuguaggaaagucgugucccaaaccucacagauugaaucacaugggcauauguuccuguggacucuacaaacagcccggugugccugugagauggaagagaugaggacuagugcaucacauuuaaaagcaucucagccuaccaugagaauaagagaaagaaaaugaagaucaauagcuuauucaucucuuuuucuuuuucguugguguaaagccaacacccugucuaaaaaacauaaauuucuuuaaucauuuugccucuuuucucugugcuucaauuaauaaaaaauggaaagaaccuagaucuaaaaaaaaaaaaaaaaaaaaaaaaaaaaaaaaaaaaaaaaaaaaaaaaaaaaaaaaaaaaaaaaugcaucccccccccccccccccccccccccccccccaaaggcucuuuucagagccaccagaauu

SEQ ID NO: 6996 - RNA, 1858 nt, Artificial Sequence
  mRNA product Design i-2 comprising derived and/or modified sequence from LASV(G502-SLE-2009;Clade IV)__AIT17126__GPCstabilized (wt)
ggggcgcugccuacggagguggcagccaucuccuucucggcaucaagcuuaccaugggacagauagugacauucuuccaggaaguaccucauguaauagaagaggugaugaacauuguucucauugcacugucuauacuagcagugcugaaaggucuguauaauuuugcaacauguggccucguuggucuacucaccuuccuccuauuguguggcaggucuugcacaaccggacuuuacaaagggguuuaugagcuucaaacucuggaacuaaacauggagacacucaauaugaccaugccucucuccugcacaaagaacaacagucaucauuauauaaugguggguaaugagacaggacuagaacugacuuugacuaacacgagcaucauuaaucauaaauuuugcaaucugucugaugcccacaaaaagaaccuuuaugaccacgcucuuaugagcauaauuucaacuuuccacuuguccauccccaacuucaaucaguaugaggcaaugagcugcgauuuuaaugggggaaagauuaguguacaguacaaccugagccacaguuaugcuggggaugcggcugaucauuguggcacuguugcaaauggugucuugcagacuuucaugaggauggccuggggugggagcuacauugcucuugacucagguugcggcaggugggacuguauuaugacuaguuaucaauauuugauaauccaaaauacaaccugggaagaucacugccaguucucaagaccaucucccaucgguuaucucgggcuccucucacaaagaacuagagacauuuacauuaguagaaggcgccggggcacauucacauggacacugucagauucugaaggcaaggacacaccaggaggauauugucugacuagauggaugcugauugaggcugaauuaaaaugcuucgggaacacagcuguagcaaaauguaaugagaagcaugaugaggaauuuugugacaugcugaggcuguuugacuucaacaaacaagccauucaaagguuaaaagcucccgcacagaugagcauucaauugaucaacaaggcaguaaaugcuuugauaaaugaccaacuuguaaugaagaaccacuuacgggacaucaugugcauuccauacuguaauuacagcagguauugguaucucaaccacacaaccacuggaagaacaucacugccuaaauguuggcuugugucaaauggcucauacuuaaacgagacccacuuuucugaugauauugagcaacaagcugacaacaugaucacugagauguuacagaaggaauauauggaaaggcagggaaagacaccauuaggucugguugaccucuuuguguucagcacaaguuucuaucuuauuagcaucuuccuucaccuggucaagauaccaacucauaggcauauugugggcaagucgugucccaaaccucauagauugaaucacaugggcauauguuccuguggacucuacaaacagcccgguguaccugugaaauggaagagaugaggacuagugcaucacauuuaaaagcaucucagccuaccaugagaauaagagaaagaaaaugaagaucaauagcuuauucaucucuuuuucuuuuucguugguguaaagccaacacccugucuaaaaaacauaaauuucuuuaaucauuuugccucuuuucucugugcuucaauuaauaaaaaauggaaagaaccuagaucuaaaaaaaaaaaaaaaaaaaaaaaaaaaaaaaaaaaaaaaaaaaaaaaaaaaaaaaaaaaaaaaaugcaucccccccccccccccccccccccccccccccaaaggcucuuuucagagccaccagaauu

SEQ ID NO: 6997 - RNA, 1858 nt, Artificial Sequence
  mRNA product Design i-2 comprising derived and/or modified sequence from LASV(G733-SLE-2010;Clade IV)__AIT17154__GPCstabilized (wt)
ggggcgcugccuacggagguggcagccaucuccuucucggcaucaagcuuaccaugggacagauagugacauucuuccaggaagugccucauguaauagaagaggugaugaacauuguucucauugcacugucuauacuagcaguccugaagggucuguacaacuuugcaacauguggcaucguugguuuggucagcuuucuccuguuguguggcaggucuugcacaaccagucuuuacaaagggguuuaugagcuucagacucuggagcuaaacauggagacacuuaacaugaccaugccucucucuugcacaaagaacaacagucaucauuauauaauggugggcaaugagacgggauuggaacugaccuugaccaacacgagcauuaucaaucauaaauuuugcaaucuaucugaugcccauaagaagaaccucuaugaccacgcccuuaugaguauaaucucaaccuuccacuuguccauccccaacuucaaucaguaugaagcaaugagcugugauuucaaugggggaaagauuaguguacaguacaaccugagucacagcuaugcuggggaugcagccaaccauuguggcacaauugcaaauggugucuuacagacuuucaugaggauggccuggggugggagcuacauugcucuugacucaggcugcgacaggugggacugcauaaugaccaguuaucaauaucugauaauccaaaacacaaccugggaagaucacugccaauucucaagaccaucucccaucgguuaucuugggcuccucucacaaaggaccagagauauauauauuaguaggagacgccggggcacauuuacauggacauugucagauucugaagguaaggacacaccaggaggguauugucuaaccagauggaugcugauugaggcugagcugaaaugcuuugggaacacagcuguggcaaaaugcaaugagaaacaugaugaggaauuuugugauaugcuaaggcuguuugacuucaacaaacaagccauucaaagguuaaaagcucccgcacaaaugagcauucaguugaucaacaaagcagugaaugcuuugauaaacgaccaacuaauaaugaagaaccaucuacgggacaucaugugcauuccauacuguaauuacagcaaguacugguaccucaaccacacaacuacugggaaaacaucacugccuaaauguuggcuugugucgaaugguucauacuuaaacgagacucacuuuucugaugacauugaacaacaagcugacaauaugaucacugagauguuacagaaggaauacauggaaaggcaggggaagacaccauugggucuaguugaccucuuuguguucagcacaaguuucuaucucauuagcaucuuccuucauuuggucaaaauaccaacucauaggcauguuguaggcaagucgugucccaagccucacagauugaaucacaugggcauaugcuccugcggacucuauggacagccugguguaccugugaaauggaagagaugaggacuagugcaucacauuuaaaagcaucucagccuaccaugagaauaagagaaagaaaaugaagaucaauagcuuauucaucucuuuuucuuuuucguugguguaaagccaacacccugucuaaaaaacauaaauuucuuuaaucauuuugccucuuuucucugugcuucaauuaauaaaaaauggaaagaaccuagaucuaaaaaaaaaaaaaaaaaaaaaaaaaaaaaaaaaaaaaaaaaaaaaaaaaaaaaaaaaaaaaaaaugcaucccccccccccccccccccccccccccccccaaaggcucuuuucagagccaccagaauu

SEQ ID NO: 6998 - RNA, 1858 nt, Artificial Sequence
  mRNA product Design i-2 comprising derived and/or modified sequence from MOPV/LASV reassortant(IGS-1;Clade IV)__AFY05576__GPCstabilized (wt)
ggggcgcugccuacggagguggcagccaucuccuucucggcaucaagcuuaccaugggacaaauagugacauucuuccaggaagugccucauguaauagaagaggugaugaacauuguucucauugcacugucuguacuagcagugcugaaaggucuguacaauuuugcaacguguggccuuguugguuuggucacuuuccuccuguugugugguaggucuugcacaaccagucuuuauaaagggguuuaugagcuucagacucuggaacuaaacauggagacacucaauaugaccaugccucucuccugcacaaagaacaacagucaucauuauauaauggugggcaaugagacaggacuagaacugaccuugaccaacacgagcauuauuaaucacaaauuuugcaaucugucugaugcccacaaaaagaaccucuaugaccacgcucuuaugagcauaaucucaacuuuccacuuguccauccccaacuucaaucaguaugaggcaaugagcugcgauuuuaaugggggaaagauuagugugcaguacaaccugagucacagcuaugcuggggaugcagccaaccauugugguacuguugcaaaugguguguuacagacuuuuaugaggauggcuuggggugggagcuacauugcucuugacucaggcugcggcaacugggacuguauuaugacuaguuaucaauaucugauaauccaaaauacaaccugggaagaucacugccaauucucgagaccaucucccaucgguuaucucgggcuccucucacaaaggacuagagauauuuauauuaguagaagacgccggggcacauucacauggacacugucagauucugaaggugaagacacaccagggggauauugucugaccagguggaugcuaauugaggcugaacuaaaaugcuucgggaacacagcuguggcaaaauguaaugagaagcaugaugaggaauuuugugacaugcugaggcuguuugacuucaacaaacaagccauucaaagguugaaagcucccgcacaaaugagcauucaguugaucaacaaagcaguaaaugcuuugauaaaugaccaacuuauaaugaagaaccaucuacgggacaucaugugcauuccauacuguaauuacagcaaguauugguaccucaaccacacaacuacugggagaacaucacugcccaaauguuggcuuguaucaaaugguucauacuugaacgagacccacuuuucugaugauauugaacaacaagcugacaauaugaucacugagauguuacagaaggaguauauggagaggcaggggaagacaccauugggucuaguugaccucuuuguguucagcacaaguuucuaucuuauuagcaucuuccuucaccuagucaaaauaccaacucauaggcauauuguaggcaagucgugucccaaaccucacagauugaaucauaugggcauuuguuccuguggacucuacaaacagccuggugugccugugaaauggaagagaugaggacuagugcaucacauuuaaaagcaucucagccuaccaugagaauaagagaaagaaaaugaagaucaauagcuuauucaucucuuuuucuuuuucguugguguaaagccaacacccugucuaaaaaacauaaauuucuuuaaucauuuugccucuuuucucugugcuucaauuaauaaaaaauggaaagaaccuagaucuaaaaaaaaaaaaaaaaaaaaaaaaaaaaaaaaaaaaaaaaaaaaaaaaaaaaaaaaaaaaaaaaugcaucccccccccccccccccccccccccccccccaaaggcucuuuucagagccaccagaauu

SEQ ID NO: 6999 - RNA, 1858 nt, Artificial Sequence
  mRNA product Design i-2 comprising derived and/or modified sequence from LASV(LM765-SLE-2012;Clade IV)__AIT17814__GPCstabilized (wt)
ggggcgcugccuacggagguggcagccaucuccuucucggcaucaagcuuaccaugggacaaauagugacauucuuccaggaagugccccaugucauagaagaggugaugaacauuguucucauugcacuguccauacuagcagugcugaaaggucuguacaauuuugcaacauguggccucguuggcuuggucacuuuccuccuguuguguggcaggucuuguacaacuagccuuuacaaagggguuuaugagcuucagacucuggaacuaaacauggaaacacucaauaugaccaugccucucuccugcacaaagaacaauagucaucauuauauaauggugggcaaugagacaggacuagaacugaccuugaccaacacgagcauuauugaucauaaauuuugcaaucugucugaugcccacagaaagaaccucuaugaccacgcucuuaugagcauuaucucaacuuuccacuugucuaucccuaacuucaaucaguaugaggcaaugagcugcgauuucaaugggggaaagauuaguguacaguacaaccugagucacagcuaugccaaggacgcagccgaccauuguggaacuguugcaaaugguguauuacagacuuucaugaggauggcuuggggugggagcuacaucgcucuugacucaggcugcggcaggugggacuguauuaugacuaguuaucaauaucugauaauccaaaauacaaccugggaagaucacugccaauucucgagaccaucucccaucgguuaucucgggcuccucucacagaggaccagagauauuuauauuaguagaaggcgccggggcacauucacauggacacugucagauucugaaggcaaggacacaccagggggauauugucuaaccagauggaugcuaauugaggcugagcuaaagugcuucgggaauacagcuguggcaaaauguaaugagaagcaugaugaggaauuuugugacaugcugagguuguuugacuuuaacaagcaagccauucaaagguugaaagcucccgcacaaaugagcauucaguugaucaacaaagcaguaaaugcuuugauaaaugaccaacuuauaaugaagaaccaucuacgggacaucaugugcauuccauacuguaauuacagcaaguauugguaccucaaccacacaacuacuggaaaaacaucacugcccaaguguuggcuuguaucaaaugguucauaccugaacgagacccacuuuucugaugacauugaacaacaagcugacaacaugaucaccgagauguuacagaaggaguauauggagaggcaggggaagacaccauugggucugguugaccucuuuguguucagcacaagcuucuaucucauuagcaucuuccuucaccuaguuaaaauaccaacucauaggcauauuguaggcaagccgugucccaaaccucacagguugaaucauaugggcauuuguuccuguggacucuauaaacagccuggugugccuguaaaauggaagagaugaggacuagugcaucacauuuaaaagcaucucagccuaccaugagaauaagagaaagaaaaugaagaucaauagcuuauucaucucuuuuucuuuuucguugguguaaagccaacacccugucuaaaaaacauaaauuucuuuaaucauuuugccucuuuucucugugcuucaauuaauaaaaaauggaaagaaccuagaucuaaaaaaaaaaaaaaaaaaaaaaaaaaaaaaaaaaaaaaaaaaaaaaaaaaaaaaaaaaaaaaaaugcaucccccccccccccccccccccccccccccccaaaggcucuuuucagagccaccagaauu

SEQ ID NO: 7000 - RNA, 1858 nt, Artificial Sequence
  mRNA product Design i-2 comprising derived and/or modified sequence from LASV(LM776-SLE-2012;Clade IV)__AIT17824__GPCstabilized (wt)
ggggcgcugccuacggagguggcagccaucuccuucucggcaucaagcuuaccaugggacagauagugacauucuuccaggaagugccucauguaauagaagaggugaugaacauuguccucauugcgcugucuauauuagcagugcugaaaggucuguacaacuuugcaacauguggccucguugguuugguuacuuuccuccuguuguguggcaggucuugcacaaccaguguuuauaaaggggucuaugagcuucagacucuggaguuaaacauggagacacucaauaugaccaugccucucuccugcacaaagaauaacagucaucauuauauaaugguagguaaugagacaggacuagaacugaccuugaccaacacaagcauuauuaaucauaaauuuugcaaucugucugaugcccacaaaaagaaccucuaugaccaugcccuuaugagcauaauuucaacuuuccacuuguccauccccaacuucaaucaguaugaagcaaugagcugugauuucaaugggggaaagauuagugugcaguacaaccugagucacagcuaugcuggggaugcugccaaccauuguggcacuguugcaaauggugucuuacagacuuucaugaggauggcuuggggugggagcuacauugcucuugacucaggcugcggcaagugggacuguauuaugacuaguuaucaauaucugauaauccaaaauacaaccugggaagaucacugccaauucucaagaccaucuccuaucgguuaucuugggcuucucucacaaaggaccagagauauuuauaucaguagaagacgccggggcacauucacauggacacugucagauucugaaggcaaggacacaccagggggauauugucugaccagauggaugcugauugaagcugaauuaaaaugcuucgggaacacagcuguagcaaaauguaaugagaagcaugaugaggaauuuugugacauguugaggcuguuugacuucaacaaacaagccauucaaagguugaaagcucccgcacaaaugagcauucaguugaucaacaaggcaguaaaugccuugauaaaugaucaacuuauaaugaagaaccaucuacgggacaucaugugcaucccauacuguaauuacagcaaauauugguaccucaaccacacaacuacugggaaaacaucacugccuaaauguuggcuugucucaaaugggucauacuugaacgagacccacuuuucugaugauauugaacaacaagcugacaacaugaucacugagauguuacagaaggaguauauggagaggcaggggaagacaccauugggccuaguugaccucuuuguguucagcacaaguuucuaucucaucagcaucuuccuucaccuagucaaaauaccaacucauaggcauauuguaggcaagucguguccuaaaccucacagauugaaucacaugggcauauguuccuguggacucuacaaacagcccggugugccugugagauggaaaagaugaggacuagugcaucacauuuaaaagcaucucagccuaccaugagaauaagagaaagaaaaugaagaucaauagcuuauucaucucuuuuucuuuuucguugguguaaagccaacacccugucuaaaaaacauaaauuucuuuaaucauuuugccucuuuucucugugcuucaauuaauaaaaaauggaaagaaccuagaucuaaaaaaaaaaaaaaaaaaaaaaaaaaaaaaaaaaaaaaaaaaaaaaaaaaaaaaaaaaaaaaaaugcaucccccccccccccccccccccccccccccccaaaggcucuuuucagagccaccagaauu

SEQ ID NO: 7001 - RNA, 1858 nt, Artificial Sequence
  mRNA product Design i-2 comprising derived and/or modified sequence from LASV(Mad39;Clade IV)__ANH09722__GPCstabilized (wt)
ggggcgcugccuacggagguggcagccaucuccuucucggcaucaagcuuaccauggggcaaauugugacauucuuucaggaagugccucauguaauugaggaggugaugaacauuguacucauugcacuauccauacuggcagugcuaaagggucuguacaauguugcaacauguggccucauuggcuugguuaccuuccuccugcugugugguagaucuuguacaaccacucuuuauaaagggguuuaugagcuucaagcucuggaacuaaacauggaaacacucaacaugacuaugccucucucuugcacaaaaaacaacucucaucacuauauaagggugggcaaugaaacaggccuagaacugaccuugaccaacacaagccucauaaaucacaaguucugcaaucugucugaugcucacaaaaagaaccucuaugaucaugcucuuaugagcauaaucucaacuuuccauuuguccauccccaacuucaaucaguaugaagcaaugagcugugauuucaaugaugggaagaucaguguacaguacaaccuaagccacaccuacgcuggggauacagccaaccacugugguacuguugcgaacgguguuuuacagacuuucaugaggauggcuuggggugggaguuacauugcucuugauucaggcugcgguggaugggacugcauuaugaccagcuaucaauauuugauaauucagaacacaaccugggaagaucacugucaguucucaagaccaucucccaucggguaccuugggcuccucucacaaagaaccagagacauuuauaucaguagaagacgccggggcacauucacauggacacuaucagauucugaggguaaagacacaccagggggguacugucuaacuagguggaugcugauugaagcugaauugaaaugcuuuggcaacacagcuguagcaaaaugcaaugagaagcaugaugaggaauuuugugauauguugaggcuauuugacuuuaacaaacaagccauucaaagauugaaagcucccgcacaaaugaguauucagcugaucaacaaagcagugaaugccuugauaaaugaucaacugauaaugaaaaaccauuugcgggacauuaugugcauuccguacugcaacuacagcaaguauugguaucuuaaucacacagucaccggaaagacaucauuacccaaaugcuggcuuguaucaaauggcucauaccuaaacgagacccacuucucugaugauauugagcagcaagcugauaacaugauuacugagaugcuacagaaggaauacauggagagacaggggaagacaccacuuggucugguugaccucuuuguauuuagcacaaguuucuaucucauuagcauuuuccuucaccuagugaaaauaccaacucauaggcauguugugggcaaaccguguccuaaaccucacagacugaaccacauggguauauguucuuguggguucuacaagcaaccuggugugccugugagauggaagagaugaggacuagugcaucacauuuaaaagcaucucagccuaccaugagaauaagagaaagaaaaugaagaucaauagcuuauucaucucuuuuucuuuuucguugguguaaagccaacacccugucuaaaaaacauaaauuucuuuaaucauuuugccucuuuucucugugcuucaauuaauaaaaaauggaaagaaccuagaucuaaaaaaaaaaaaaaaaaaaaaaaaaaaaaaaaaaaaaaaaaaaaaaaaaaaaaaaaaaaaaaaaugcaucccccccccccccccccccccccccccccccaaaggcucuuuucagagccaccagaauu

SEQ ID NO: 7002 - RNA, 1858 nt, Artificial Sequence
  mRNA product Design i-2 comprising derived and/or modified sequence from LASV(Z0947-SLE-2011;Clade IV)__AIT17840__GPCstabilized (wt)
ggggcgcugccuacggagguggcagccaucuccuucucggcaucaagcuuaccaugggacaaauagugacauucuuccaggaagugccccaugucauagaagaggugaugaacaucguucucauugcacugucuauacuagcaguguugaaaggucuguacaauuuugcaacauguggccucguuggcuuggucacuuuccuccuguuguguggcaggucuugcacaauuagccuuuacaaggggguuuaugagcuucagacucuggaacuaaacauggaaacacucaauaugaccaugccucucuccuguacaaagaacaacagucaucauuauauaauggugggcaaugagacaggacuagaacugaccuugaccaacacgagcauuauuaaucauaaauuuugcaaucugucugaugcccacaaaaagaaccucuaugaccaugcucuuaugagcauuaucucaacuuuccacuuguccaucccuaacuucaaucaguaugaggcaaugagcugcgauuucaaugggggaaagauuagugugcaguacaaccugagucacagcuaugccggggacgcagccaaccauugugguacuguugcaaaugguguauuacagacuuucaugaggauggcuuggggugggagcuacaucgcucuugacucaggcugcgacaggugggacuguauuaugacuaguuaucaauaucugauaauccaaaauacaaccugggaagaucacugccaauucucgagaccaucucccaucgguuaucucgggcuccucucacaaaggaccagagauauuuauauuaguagaaggcgccggggcacauucacauggacacugucagauucugaaggcaaggacacaccagggggauauugucuaaccagauggaugcuaauugaggcugagcuaaagugcuucgggaacacagccguggcaaaauguaaugagaagcaugaugaggaauuuugugacaugcugagguuguuugacuuuaacaaacaagccauucaaagguugaaagcucccgcacaaaugagcauucaguugaucaacaaagcaguaaaugcuuugauaaaugaccaacuuauaaugaagaaccaucuacgggacaucaugugcauuccauacuguaauuacagcaaguauugguaccucaaccacacaacuacuggaaaaacaucacugcccaaguguuggcuuguaucaaaugguucauaccugaacgagacccacuuuucugaugacaucgaacaacaagcugacaacaugaucacugagauguuacagaaggaguauauggagaggcaggggaagacaccauugggucugguugaccucuuuguguucagcacaagcuucuaucucauuagcaucuuccuucaccuaguuaaaauaccaacucauaggcauauuguaggcaagccgugucccaaaccucacagguugaaucauaugggcauuuguuccuguggacucuauaaacagccuggugugccugugaaauggaagagaugaggacuagugcaucacauuuaaaagcaucucagccuaccaugagaauaagagaaagaaaaugaagaucaauagcuuauucaucucuuuuucuuuuucguugguguaaagccaacacccugucuaaaaaacauaaauuucuuuaaucauuuugccucuuuucucugugcuucaauuaauaaaaaauggaaagaaccuagaucuaaaaaaaaaaaaaaaaaaaaaaaaaaaaaaaaaaaaaaaaaaaaaaaaaaaaaaaaaaaaaaaaugcaucccccccccccccccccccccccccccccccaaaggcucuuuucagagccaccagaauu

SEQ ID NO: 7003 - RNA, 1858 nt, Artificial Sequence
  mRNA product Design i-2 comprising derived and/or modified sequence from LASV(Josiah;Clade IV)__NP_694870__GPCstabilized (opt1)
ggggcgcugccuacggagguggcagccaucuccuucucggcaucaagcuuaccaugggccagaucgugaccuucuuccaggaggucccccacgugaucgaggaggugaugaacaucguccugaucgcccucagcgugcuggccgugcugaaggggcucuacaacuucgcgaccugcggccuggucgggcuggugacguuccuccugcugugcggccgcuccugcaccaccagccucuacaaggggguguacgagcugcagacccuggagcucaacauggagacgcugaacaugaccaugccgcuguccugcaccaagaacaacagccaccacuacaucauggucggcaacgagaccggccucgagcugacgcugaccaacaccuccaucaucaaccacaaguucugcaaccucagcgacgcccacaagaagaaccuguacgaccacgcccugauguccaucaucagcaccuuccaccucuccauccccaacuucaaccaguacgaggccaugagcugcgacuucaacgggggcaagaucuccgugcaguacaaccugagccacuccuacgccggggacgcggccaaccacugcggcacgguggccaacgggguccugcagaccuucaugcggauggccuggggcggcagcuacaucgcgcucgacuccgggugcggcaacugggacugcaucaugaccagcuaccaguaccugaucauccagaacaccacgugggaggaccacugccaguucucccggcccagccccaucggguaccugggccuccugucccagcgcacccgggacaucuacaucagccgccggcgccggggcaccuucaccuggacgcugagcgacuccgaggggaaggacaccccgggcggguacugccugacccgcuggaugcucaucgaggccgagcugaagugcuucggcaacaccgccguggccaagugcaacgagaagcacgacgaggaguucugcgacaugcugcggcuguucgacuucaacaagcaggccauccagcgccugaaggcgcccgcccagaugagcauccagcugaucaacaaggccgugaacgcccucaucaacgaccagcugaucaugaagaaccaccuccgggacaucaugugcauccccuacugcaacuacuccaaguacugguaccucaaccacacgaccaccggccgcaccagccugcccaagugcuggcuggucuccaacggcagcuaccucaacgagacgcacuucuccgacgacaucgagcagcaggccgacaacaugaucaccgagaugcugcagaaggaguacauggagcggcaggggaagacgccccugggccucguggaccuguucguguucagcaccuccuucuaccugaucagcaucuuccugcaccucgucaagaucccgacccaccgccacaucguggggaaguccugccccaagccccaccggcugaaccacaugggcaucugcagcugcgggcuguacaagcagcccggcgugccggucaaguggaagcgcugaggacuagugcaucacauuuaaaagcaucucagccuaccaugagaauaagagaaagaaaaugaagaucaauagcuuauucaucucuuuuucuuuuucguugguguaaagccaacacccugucuaaaaaacauaaauuucuuuaaucauuuugccucuuuucucugugcuucaauuaauaaaaaauggaaagaaccuagaucuaaaaaaaaaaaaaaaaaaaaaaaaaaaaaaaaaaaaaaaaaaaaaaaaaaaaaaaaaaaaaaaaugcaucccccccccccccccccccccccccccccccaaaggcucuuuucagagccaccagaauu

SEQ ID NO: 7004 - RNA, 1855 nt, Artificial Sequence
  mRNA product Design i-2 comprising derived and/or modified sequence from LASV(LP;Clade I)__AAF86701__GPCstabilized (opt1)
ggggcgcugccuacggagguggcagccaucuccuucucggcaucaagcuuaccaugggccagaucaucaccuucuuccaggaggugccccacgucaucgaggaggugaugaacaucgugcugaucgcccucagccugcuggccauccucaaggggcuguacaacaucgcgaccugcggcaucaucgggcuggucgccuuccucuuccugugcggcaaguccugcagccugacgcucaagggcggguacgagcugcagacccuggagcucaacauggagacccugaacaugaccaugccgcuguccugcacgaagaacagcucccaccacuacauccgcgugggcaacgagaccgggcucgagcugacccugaccaacacgagcaucaucaaccacaaguucugcaaccucuccgacgcccacaagaagaaccuguacgaccacgcccugaugagcaucaucuccaccuuccaccucagcauccccaacuucaaccaguacgaggccauguccugcgacuucaacggcgggaagaucagcgugcaguacaaccugucccacagcuacgcgggcgacgccgccgagcacugcgggaccgucgccaacggcgugcugcagaccuucaugcggauggcguggggcgggcgcuacaucgcccucgacuccggcugcgggaacugggacugcaucaugacgagcuaccaguaccugaucauccagaacaccaccugggaggaccacugccaguucucccggcccagccccaucggcuaccugggccuccugucccagcgcacccgggacaucuacaucagccgccggcgccgggggacguucaccuggacccugagcgacuccgagggcaacgagacccccgggggcuacugccugacgcgcuggaugcucaucgaggccgagcugaagugcuucgggaacaccgccguggccaagugcaacgagaagcacgacgaggaguucugcgacaugcugcggcuguucgacuucaacaagcaggcgauccgccggcugaaggcccccgcccagaugagcauccagcugaucaacaaggccgucaacgcccucaucaacgaccagcugaucaugaagaaccaccuccgcgacaucaugugcauccccuacugcaacuacuccaaguacugguaccucaaccacaccagcuccggccggaccagccugcccaagugcuggcugaucuccaacgggagcuaccucaacgagacgcaguucuccgacgacaucgagcagcaggcggacaacaugaucaccgagaugcugcagaaggaguacaucgagcgccagggcaagaccccgcuggggcucguggacaucuucaucuucagcaccuccuucuaccugaucagcaucuuccugcaccugaucaagaucccgacgcaccggcacaucgugggcaagcccugccccaagccccaccgccucaaccacaugggggucugcuccugcggccuguacaagcacccgggcgugcccaccaaguggaagcggugaggacuagugcaucacauuuaaaagcaucucagccuaccaugagaauaagagaaagaaaaugaagaucaauagcuuauucaucucuuuuucuuuuucguugguguaaagccaacacccugucuaaaaaacauaaauuucuuuaaucauuuugccucuuuucucugugcuucaauuaauaaaaaauggaaagaaccuagaucuaaaaaaaaaaaaaaaaaaaaaaaaaaaaaaaaaaaaaaaaaaaaaaaaaaaaaaaaaaaaaaaaugcaucccccccccccccccccccccccccccccccaaaggcucuuuucagagccaccagaauu

SEQ ID NO: 7005 - RNA, 1855 nt, Artificial Sequence
  mRNA product Design i-2 comprising derived and/or modified sequence from LASV(803213;Clade II)__AAF86703__GPCstabilized (opt1)
ggggcgcugccuacggagguggcagccaucuccuucucggcaucaagcuuaccaugggccagaucaucaccuucuuccaggaggugccccacgucaucgaggaggugaugaacaucgugcugaucgcccucagccugcuggccauccucaaggggaucuacaacgucgcgaccugcggccuguucgggcugaucuccuuccuccugcugugcggccgcagcugcuccgugacguacaaggggguguacgagcuccagacccuggagcugaacauggccaaccucaacaugaccaugccgcugagcugcaccaagaacaacucccaccacuacaucauggucggcaacgagacgggccuggagcucacccugaccaacaccagcaucaucaaccacaaguucugcaaccuguccgacgcccacaagaagaaccucuacgaccacgcccugaugagcaucaucuccacguuccaccugagcauccccaacuucaaccaguacgaggccauguccugcgacuucaacgggggcaagaucagcgugcaguacaaccucucccacagcuucgcgguggacgccgccaaccacugcgggaccaucgccaacggcguccugcagaccuucaugcggauggcguggggcggguccuacaucgcccuggacagcggcugcgggaacugggacugcaucaugaccuccuaccaguaccucaucauccagaacacgaccugggaggaccacugccaguucagccgccccucccccaucggcuaccuggggcugcucagccagcggacccgcgacaucuacaucagccggcgccgccggggcaccuucacguggacccucuccgacagcgagggcaacgaggcccccgggggcuacugccugacccgguggaugcugaucgaggccgagcucaagugcuucgggaacaccgccguggcgaagugcaacgagaagcacgacgaggaguucugcgacaugcugcgccuguucgacuucaacaagcaggccaucaagcggcucaagacgcccgcccagauguccauccagcugaucaacaaggccgugaacgcccugaucaacgaccagcucaucaugaagaaccaccuccgcgacaucaugugcauccccuacugcaacuacagccgguacugguaccugaaccacaccgucaccgggaagaccucccugccccgcugcuggcuggugagcaacggcuccuaccugaacgagacgcacuucagcgacgacaucgagcagcaggcggacaacaugaucaccgagaugcuccagaaggaguacauggaccggcagggcaagaccccgcuggggcugguggaccucuucgucuucuccaccagcuucuaccugaucuccaucuuccugcaccuggugaagaucccgacgcaccgccacaucgugggcaagcccugccccaagccccaccggcucaaccacauggggaucugcagcugcggccuguacaagcacccggggguccccgugaaguggaagcgcugaggacuagugcaucacauuuaaaagcaucucagccuaccaugagaauaagagaaagaaaaugaagaucaauagcuuauucaucucuuuuucuuuuucguugguguaaagccaacacccugucuaaaaaacauaaauuucuuuaaucauuuugccucuuuucucugugcuucaauuaauaaaaaauggaaagaaccuagaucuaaaaaaaaaaaaaaaaaaaaaaaaaaaaaaaaaaaaaaaaaaaaaaaaaaaaaaaaaaaaaaaaugcaucccccccccccccccccccccccccccccccaaaggcucuuuucagagccaccagaauu

SEQ ID NO: 7006 - RNA, 1855 nt, Artificial Sequence
  mRNA product Design i-2 comprising derived and/or modified sequence from LASV(GA391;Clade III)__CAA36645__GPCstabilized (opt1)
ggggcgcugccuacggagguggcagccaucuccuucucggcaucaagcuuaccaugggccagaucgugaccuucuuccaggaggucccccacgugaucgaggaggugaugaacaucguccugaucgcccucagcauccuggccauccugaaggggcucuacaacguggcgaccugcggccugaucgggcuggugacguuccuccugcuguccggccgcagcugcucccucaucuacaaggggaccuacgagcugcagacccuggagcucaacauggagacccugaacaugacgaugccgcugagcugcaccaagaacaacucccaccacuacauccgggucggcaacgagaccggccucgagcugacccugacgaacaccagcauccucaaccacaaguucugcaaccuguccgacgcccacaagcgcaaccuguacgaccacagccucauguccaucaucagcaccuuccaccuguccauccccaacuucaaccaguacgaggccaugagcugcgacuucaacgggggcaagaucaccgugcaguacaaccugucccacagcuucgccguggacgccgcggggcacugcggcacgcucgccaacgggguccugcagaccuucaugcggauggccuggggcggcuccuacaucgcccuggacagcgggugcggcaacugggacugcaucaugaccuccuaccaguaccucaucauccagaacaccacgugggacgaccacugccaguucagccggcccucccccaucggguaccugggccugcucagccagcgcacccgggacaucuacaucagccgccggcgccggggcaccuucaccuggacgcucuccgacagcgaggggaacgagaccccgggcggguacugccugacccgcuggaugcugaucgaggcggagcucaagugcuucggcaacaccgccguggccaagugcaacgagaagcacgacgaggaguucugcgacaugcugcggcuguucgacuucaacaagcaggccauccgccggcucaagacgcccgcccagauguccauccagcugaucaacaaggcggugaacgcccugaucaacgaccagcucaucaugaagaaccaccuccgcgacaucaugugcauccccuacugcaacuacagccgguacugguaccugaaccacaccuccaccggcaagaccagccugccccgcugcuggcugaucuccaacggcagcuaccugaacgagacgaaguucuccgacgacaucgagcagcaggccgacaacaugaucaccgagaugcuccagaaggaguacaucgaccggcaggggaagacgccccugggccuggucgaccuguucguguucagcaccuccuucuaccucaucagcaucuuccugcaccuggugaagaucccgacccaccgccacaucgucgggaagcccugccccaagccccaccggcucaaccacaugggcaucugcuccugcgggcuguacaagcagccgggcgugcccgugcgcuggaagcggugaggacuagugcaucacauuuaaaagcaucucagccuaccaugagaauaagagaaagaaaaugaagaucaauagcuuauucaucucuuuuucuuuuucguugguguaaagccaacacccugucuaaaaaacauaaauuucuuuaaucauuuugccucuuuucucugugcuucaauuaauaaaaaauggaaagaaccuagaucuaaaaaaaaaaaaaaaaaaaaaaaaaaaaaaaaaaaaaaaaaaaaaaaaaaaaaaaaaaaaaaaaugcaucccccccccccccccccccccccccccccccaaaggcucuuuucagagccaccagaauu

SEQ ID NO: 7007 - RNA, 1858 nt, Artificial Sequence
  mRNA product Design i-2 comprising derived and/or modified sequence from LASV(AV;Clade V)__CCA30314__GPCstabilized (opt1)
ggggcgcugccuacggagguggcagccaucuccuucucggcaucaagcuuaccaugggccagaucgugaccuucuuccaggaggucccccacgugaucgaggaggugaugaacaucguccugaucgcccucagcauccuggccgugcugaaggggcucuacaacaucgcgaccugcggccugaucgggcugaucacguuccuccugcugugcggccgcuccugcagcuccaaccucuacaaggggguguacgagcugcagagccuggaccucaacauggagacccugaacaugaccaugccgcuguccugcaccaagaacaacagccaccacuacauccgggucggcaacgacacgggccucgagcugacccugaccaacaccuccauccucaaccacaaguucugcaaccugagcgacgcccacaagaaggaccuguacgaccacgcccucauguccaucaucagcacguuccaccuguccauccccaacuucaaccaguacgaggccaugagcugcgacuucaacgggggcaagaucuccgugcaguacaaccugagccacuccuacgccaucgacgcggccaaccacugcgggaccguggccaacggcauccuccagaccuucaugcgcauggccuggggcgggagcuacaucgcgcuggacuccggcugcgggaacugggacugcaucaugaccagcuaccaguaccugaucauccagaacacgaccugggagaaccacugccaguucucccgccccagccccaucggcuaccucgggcugcugagccagcggacccgcgacaucuacaucucccggcgccgccggggcaccuucacguggacccugagcgacuccgagggcaacgccacccccgggggcuacugccucacccgguggaugcugaucgaggccgagcugaagugcuucgggaacacggccgucgccaagugcaacgagaagcacgacgaggaguucugcgacaugcuccgccuguucgacuucaacaagcaggcgaucagccggcugaagucccccgcccagaugagcauccagcucaucaacaaggccgugaacgcccugaucaacgaccagcugaucaugaagaaccaccuccgcgacaucaugugcauccccuacugcaacuacuccaaguacugguaccugaaccacaccaucaccgggaagaccagccugcccaagugcuggcucguguccaacggcagcuaccugaacgagacgcacuucuccgacgacaucgagcagcaggccgacaacaugaucaccgagaugcugcagaaggaguacauggagcggcagggcaagaccccgcucgggcuggucgaccuguucguguucagcaccuccuucuaccugaucagcaucuuccuccgccuggugaagaucccgacgcaccggcacaucgucggcaagcccugccccaagccccaccgccugaaccacauggggaucugcuccugcggccucuacaagcagccgggggugcccgugcgguggaagcgcugaggacuagugcaucacauuuaaaagcaucucagccuaccaugagaauaagagaaagaaaaugaagaucaauagcuuauucaucucuuuuucuuuuucguugguguaaagccaacacccugucuaaaaaacauaaauuucuuuaaucauuuugccucuuuucucugugcuucaauuaauaaaaaauggaaagaaccuagaucuaaaaaaaaaaaaaaaaaaaaaaaaaaaaaaaaaaaaaaaaaaaaaaaaaaaaaaaaaaaaaaaaugcaucccccccccccccccccccccccccccccccaaaggcucuuuucagagccaccagaauu

SEQ ID NO: 7008 - RNA, 1855 nt, Artificial Sequence
  mRNA product Design i-2 comprising derived and/or modified sequence from LASV(Togo/2016/7082;Clade VI)__AMR44577__GPCstabilized (opt1)
ggggcgcugccuacggagguggcagccaucuccuucucggcaucaagcuuaccaugggccagaucaucaccuucuuccaggaggugccccacgucaucgaggaggugaugaacaucgugcugaucgcccucagccugcuggccauccucaagggggucuacaacguggcgaccugcggcaucaucgggcuggugacguuccuguuccucugcggccgcuccugcagccugaucuacaagggguccuacgagcugcagacccucgagcugaacauggagacccugaacaugaccaugccgcucagcugcacgaagaacuccagccaccacuacauccgggucggcaacgagaccggccuggagcugacccucaccaacacguccaucaucaaccacaaguucugcaaccugagcgacgcccacaagcgcaaccuguacgaccacgcccucauguccauccugagcaccuuccaccuguccauccccaacuucaaccaguacgaggccaugagcugcgacuucaacgggggcaagaucuccgugcaguacaaccucagccacgccuacgcgguggacgccgccgagcacugcgggaccgucgccaacggcgugcugcagaccuucaugcggauggcguggggcggguccuacaucgcccuggacagcggcugcgggaacugggacugcaucaugacguccuaccaguaccucaucauccagaacaccaccugggaggaccacugccaguucagccggcccucccccaucggcuaccuggggcugcucagccagcgcacccgggacaucuacaucagccgccggcgccggggcacguucaccuggacccucuccgacagcgagggcaacgagacccccgggggcuacugccugacgcgcuggaugcugaucgaggccgagcucaagugcuucgggaacaccgccguggccaagugcaacgagaagcacgacgaggaguucugcgacaugcugcggcuguucgacuucaacaagcaggcgauccagcgccucaagucccccgcccagaugagcauccagcugaucaacaaggccgucaacgcccugaucaacgaccagcucaucaugaagaaccaccuccgggacaugaugugcauccccuacugcaacuacuccaaguacugguaccugaaccacaccagcuccgggcgcaccagccugcccaagugcuggcugguguccaacggcagcuaccugaacgagacgcacuucuccgacgacaucgagcagcaggccgacaacaugaucaccgagaugcuccagaaggaguacaucgaccggcagggcaagaccccgcuggggcugguggaccucuucgucuucagcaccuccuucuaccugaucagcaucuuccugcaccugaucaagaucccgacgcaccgccacaucgugggcaagcccugccccaagccccaccggcucaaccacauggggaucugcuccugcggccuguacaagcagccgggggugcccacccgcuggaagcggugaggacuagugcaucacauuuaaaagcaucucagccuaccaugagaauaagagaaagaaaaugaagaucaauagcuuauucaucucuuuuucuuuuucguugguguaaagccaacacccugucuaaaaaacauaaauuucuuuaaucauuuugccucuuuucucugugcuucaauuaauaaaaaauggaaagaaccuagaucuaaaaaaaaaaaaaaaaaaaaaaaaaaaaaaaaaaaaaaaaaaaaaaaaaaaaaaaaaaaaaaaaugcaucccccccccccccccccccccccccccccccaaaggcucuuuucagagccaccagaauu

SEQ ID NO: 7009 - RNA, 1855 nt, Artificial Sequence
  mRNA product Design i-2 comprising derived and/or modified sequence from LASV(KAK-428;Clade n.d. (VII))__ANH09740__GPCstabilized (opt1)
ggggcgcugccuacggagguggcagccaucuccuucucggcaucaagcuuaccaugggccagaucgugaccuucuuccaggaggucccccacgugaucgaggaggugaugaacaucguccugaucgcccucagccugcuggccauccucaaggggcuguacaacuucgcgaccugcggcgugaucgggcugaucacguuccuccugcugugcggccgcuccugcagcgccaccuacaaggggcaguacgagcuccagacccuggagcugaacauggagucccucaacaugaccaugccgcugagcugcacgaagaacaacucccaccacuacauccgggccggcaacaacaccggccuggagcucacccugaccaacacgagcaucaucucccacaaguucugcaaccugagcgacgcccacaagaagaaccucuacgaccacacccugauguccaucaucaccaccuuccaccugagcauccccaacuucaaccaguacgaggccauguccugcgacuucaacgggggcaagaucagcauccaguacaaccucucccacagcuacgcgggggacgccgcccagcacugcggcacgguggccaacgggguccugcagaccuucaugcgcauggcguggggcggcuccuaccuggcccucgacagcgggugccgcggcugggacugcaucaucuccagcuaccaguaccugaucauccagaacaccaccugggacgaccacugccaguucucccggcccagccccaucggguaccugggcuucgugagccagaagacgcgcgacaucuacaucucccggcgccgccggggcaccuucaccuggacccugagcgacuccgaggggcacgacaugccgggcggguacugccucacgcgguggaugcugaucgaggccgaccugaagugcuucggcaacaccgccguggccaagugcaacgagaagcacgacgaggaguucugcgacauguggcgccucuucgacuucaacaagcaggcgauccagcggcugaaggcccccgcccagaugaacauccagcugaucaacaaggccgucaacgcccucaucaacgaccagcugaugaugaagaaccaccuccgcgacaucaugugcauccccuacugcaacuacagcaaguucugguaccugaacaacaccaccacgggccggaccucccugccccgcugcuggcugaucagcaacggcuccuaccucaacgagacccacuucagcgacgacaucgagcagcaggcggacaacaugaucaccgagaugcugcagaaggaguacauggaccggcaggggaagacgccccugggccucguggaccuguucguguucuccaccagcuucuaccugaucaccaucuuccuccaccuggucaagaucccgacccaccgccacaucguggggaagcccugccccaagccccaccggcugaaccacaugggcaucugcuccugcgggcuguacaagcagccgggcgugcccguccgcuggaagcggugaggacuagugcaucacauuuaaaagcaucucagccuaccaugagaauaagagaaagaaaaugaagaucaauagcuuauucaucucuuuuucuuuuucguugguguaaagccaacacccugucuaaaaaacauaaauuucuuuaaucauuuugccucuuuucucugugcuucaauuaauaaaaaauggaaagaaccuagaucuaaaaaaaaaaaaaaaaaaaaaaaaaaaaaaaaaaaaaaaaaaaaaaaaaaaaaaaaaaaaaaaaugcaucccccccccccccccccccccccccccccccaaaggcucuuuucagagccaccagaauu

SEQ ID NO: 7010 - RNA, 1855 nt, Artificial Sequence; identical to SEQ ID NO: 7004
  mRNA product Design i-2 comprising derived and/or modified sequence from LASV(Pinneo-NIG-1969;Clade I)__AIT17836__GPCstabilized (opt1)

SEQ ID NO: 7011 - RNA, 1855 nt, Artificial Sequence
  mRNA product Design i-2 comprising derived and/or modified sequence from LASV(ISTH0009-NIG-2011;Clade II)__AIT17404__GPCstabilized (opt1)
ggggcgcugccuacggagguggcagccaucuccuucucggcaucaagcuuaccaugggccagaucaucaccuucuuccaggaggugccccacgucaucgaggaggugaugaacaucgugcugaucgcccucagccugcuggccauccucaaggggaucuacaacgucgcgaccugcggccuguucgggcugguguccuuccuccugcugugcggccgcagcugcuccacgaccuacaaggggguguacgagcuccagacccuggagcuggacauggccagccucaacaugaccaugccgcuguccugcacgaagaacaacagccaccacuacaucauggucggcaacgagaccggccuggagcucacccugaccaacacguccaucaucaaccacaaguucugcaaccugagcgacgcccacaagaagaaccucuacgaccacgcccugauguccaucaucagcaccuuccaccuguccauccccaacuucaaccaguacgaggccaugagcugcgacuucaacgggggcaagaucuccgugcaguacaaccucagccacgcguacgccguggacgccgccaaccacugcgggaccaucgcgaacggcguccugcagaccuucaugcggauggccuggggcggguccuacaucgcccuggacagcggcugcggguccugggacugcaucaugacgagcuaccaguaccucaucauccagaacaccaccugggaggaccacugccaguucucccgccccagccccaucggcuaccuggggcugcucagccagcggacccgcgacaucuacaucucccggcgccgccggggcacguucaccuggacccucagcgacuccgagggcaacgagacccccgggggcuacugccugacgcgguggaugcugaucgaggccgagcucaagugcuucgggaacaccgccguggcgaagugcaacgagaagcacgacgaggaguucugcgacaugcugcgccuguucgacuucaacaagcaggccauccggcgccucaagacccccgcccagaugagcauccagcugaucaacaaggccgugaacgcccugaucaacgaccagcucaucaugaagaaccaccuccgggacaucaugugcaucccguacugcaacuacuccaaguacugguaccugaaccacaccgucacggggaagaccagccugccccgcugcuggcugguguccaacggcagcuaccugaacgagacccacuucuccgacgacaucgagcagcaggcggacaacaugaucaccgagcuccugcagaaggaguacauggaccggcagggcaagacgccccuggggcucguggaccuguucgucuucagcaccuccuucuaccugaucagcaucuuccugcaccucaucaagaucccgacccaccgccacaucaccggcaagcccugccccaagccccaccggcugaaccacauggggaucugcuccugcggccuguacaagcacccgggggugcccgugaaguggaagcgcugaggacuagugcaucacauuuaaaagcaucucagccuaccaugagaauaagagaaagaaaaugaagaucaauagcuuauucaucucuuuuucuuuuucguugguguaaagccaacacccugucuaaaaaacauaaauuucuuuaaucauuuugccucuuuucucugugcuucaauuaauaaaaaauggaaagaaccuagaucuaaaaaaaaaaaaaaaaaaaaaaaaaaaaaaaaaaaaaaaaaaaaaaaaaaaaaaaaaaaaaaaaugcaucccccccccccccccccccccccccccccccaaaggcucuuuucagagccaccagaauu

SEQ ID NO: 7012 - RNA, 1855 nt, Artificial Sequence
  mRNA product Design i-2 comprising derived and/or modified sequence from LASV(ISTH2010-NIG-2012;Clade II)__AIT17482__GPCstabilized (opt1)
ggggcgcugccuacggagguggcagccaucuccuucucggcaucaagcuuaccaugggccagaucaucaccuucuuccaggaggugccccacgucaucgaggaggugaugaacaucgugcugaucgcccucagccugcuggccauccucaaggggaucuacaacgucgcgaccugcggccuguucgggcugguguccuuccuccugcugugcggccgcagcugcuccacgaccuacaaggggguguacgagcuccagacccuggagcuggacauggccagccucaacaugaccaugccgcuguccugcacgaagaacaacagccaccacuacaucauggucggcaacgagaccggccuggagcucacccugaccaacacguccaucaucaaccacaaguucugcaaccugagcgacgcccacaagaagaaccucuacgaccacgcccugauguccaucaucagcaccuuccaccuguccauccccaacuucaaccaguacgaggccaugagcugcgacuucaacgggggcaagaucuccgugcaguacaaccucagccacgcguacgccguggacgccgccaaccacugcgggaccaucgcgaacggcguccugcagaccuucaugcggauggccuggggcggguccuacaucgcccuggacagcggcugcggguccugggacugcaucaugacgagcuaccaguaccucaucauccagaacaucaccugggaggaccacugccaguucucccgccccagccccaucggcuaccuggggcugcucagccagcggacccgcgacaucuacaucucccggcgccgccggggcaccuucacguggacccucagcgacuccgagggcaacgagacccccgggggcuacugccugacccgguggaugcugaucgaggccgagcucaagugcuucgggaacacggccguggcgaagugcaacgagaagcacgacgaggaguucugcgacaugcugcgccuguucgacuucaacaagcaggccauccggcgccucaagacccccgcccagaugagcauccagcugaucaacaaggccgugaacgcccugaucaacgaccagcucaucaugaagaaccaccuccgggacaucaugugcauccccuacugcaacuacuccaaguacugguaccugaaccacaccgucaccgggaagacgagccugccccgcugcuggcugguguccaacggcagcuaccugaacgagacccacuucuccgacgacaucgagcagcaggcggacaacaugaucaccgagcuccugcagaaggaguacaucgaccggcagggcaagaccccgcuggggcucguggaccuguucgucuucagcacguccuucuaccugaucagcaucuuccugcaccucgugaagaucccgacccaccgccacguggucggcaagcccugccccaagccccaccggcugaaccacauggggaucugcuccugcggccuguacaagcacccgggggugcccgugaaguggaagcgcugaggacuagugcaucacauuuaaaagcaucucagccuaccaugagaauaagagaaagaaaaugaagaucaauagcuuauucaucucuuuuucuuuuucguugguguaaagccaacacccugucuaaaaaacauaaauuucuuuaaucauuuugccucuuuucucugugcuucaauuaauaaaaaauggaaagaaccuagaucuaaaaaaaaaaaaaaaaaaaaaaaaaaaaaaaaaaaaaaaaaaaaaaaaaaaaaaaaaaaaaaaaugcaucccccccccccccccccccccccccccccccaaaggcucuuuucagagccaccagaauu

SEQ ID NO: 7013 - RNA, 1855 nt, Artificial Sequence
  mRNA product Design i-2 comprising derived and/or modified sequence from LASV(Lassa virus/H.sapiens-wt/NGA/2015/ISTH_0543;Clade II)__AVO03639__GPCstabilized (opt1)
ggggcgcugccuacggagguggcagccaucuccuucucggcaucaagcuuaccaugggccagaucaucaccuucuuccaggaggugccccacgucaucgaggaggugaugaacaucgugcugaucgcccucagccugcuggccauccucaaggggaucuacaacgucgcgaccugcggccuguucgggcugguguccuuccuccugcugugcggccgcagcugcuccacgaccuacaaggggguguacgagcuccagacccuggagcuggacauggccaaccucaacaugaccaugccgcugagcugcacgaagaacaacucccaccacuacaucauggucggcaacgagaccggccuggagcucacccugaccaacacgagcaucaucaaccacaaguucugcaaccuguccgacgcccacaagaagaaccucuacgaccacgcccugaugagcaucaucuccaccuuccaccugagcauccccaacuucaaccaguacgaggccauguccugcgacuucaacgggggcaagaucagcgugcaguacaaccucucccacaccuacgcgguggacgccgccaaccacugcgggaccaucgccaacggcguccugcagacguucaugcggauggcguggggcgggagcuacaucgcccuggacuccggcugcgggagcugggacugcaucaugaccuccuaccaguaccucgugauccagaacaccaccugggaggaccacugccaguucagccgccccucccccaucggcuaccuggggcugcucagccagcggacgcgcgacaucuacaucagccggcgccgccggggcaccuucaccuggacccucuccgacagcgagggcaacgagacgcccgggggcuacugccugacccgguggaugcugaucgaggccgagcucaagugcuucgggaacaccgccguggccaagugcaacgagaagcacgacgaggaguucugcgacaugcugcgccuguucgacuucaacaagcaggcgauccggcgccucaagacccccgcccagauguccauccagcugaucaacaaggccgucaacgcccugaucaacgaccagcucaucaugaagaaccaccuccgggacaucaugugcauccccuacugcaacuacagcaaguacugguaccugaaccacacggugaccgggaagaccucccugccccgcugcuggcuggugagcaacggcuccuaccugaacgagacccacuucagcgacgacaucgagcagcaggccgacaacaugaucacggagcuccugcagaaggaguacaucgaccggcagggcaagaccccgcuggggcucgucgaccuguucguguucuccaccagcuucuaccugaucuccaucuuccugcaccucgugaagaucccgacccaccgccacaucacgggcaagcccugccccaagccccaccggcugaaccacauggggaucugcagcugcggccuguacaagcacccggggguccccgugaaguggaagcgcugaggacuagugcaucacauuuaaaagcaucucagccuaccaugagaauaagagaaagaaaaugaagaucaauagcuuauucaucucuuuuucuuuuucguugguguaaagccaacacccugucuaaaaaacauaaauuucuuuaaucauuuugccucuuuucucugugcuucaauuaauaaaaaauggaaagaaccuagaucuaaaaaaaaaaaaaaaaaaaaaaaaaaaaaaaaaaaaaaaaaaaaaaaaaaaaaaaaaaaaaaaaugcaucccccccccccccccccccccccccccccccaaaggcucuuuucagagccaccagaauu

SEQ ID NO: 7014 - RNA, 1855 nt, Artificial Sequence
  mRNA product Design i-2 comprising derived and/or modified sequence from LASV(Lassa virus/H.sapiens-wt/NGA/2016/ISTH_0009;Clade II)__AVO03571__GPCstabilized (opt1)
ggggcgcugccuacggagguggcagccaucuccuucucggcaucaagcuuaccaugggccagaucaucaccuucuuccaggaggugccccacgucaucgaggaggugaugaacaucgugcugaucgcccucagccugcuggccauccucaaggggaucuacaacgucgcgaccugcggccugcuggggcucguguccuuccugcugcucugcggccgcagcugcuccacgaccuacaaggggguguacgagcugcagacccuggagcucgacauggccagccugaacaugaccaugccgcuguccugcacgaagaacaacagccaccacuacaucauggucggcaacgagaccggccucgagcugacccugaccaacacguccaucaucaaccacaaguucugcaaccucagcgacgcccacaagaagaaccuguacgaccacgcccugauguccaucaucagcaccuuccaccucuccauccccaacuucaaccaguacgaggccaugagcugcgacuucaacgggggccggaucuccgugcaguacaaccugagccacuccuacgcgguggacgccgccaaccacugcgggaccaucgccaacggcguccugcagaccuucaugcgcauggcguggggcgggagcuacaucgcccucgacuccggcugcgggagcugggacugcaucaugacguccuaccaguaccugaucauccagaacaccaccugggaggaccacugccaguucagccggcccagccccaucggcuaccuggggcuccugucccagcgcacccgggacaucuacaucagccgccggcgccggggcacguucaccuggacccuguccgacagcgagggcaacgagacccccgggggcuacugccugacgcgcuggaugcucaucgaggccgagcugaagugcuucgggaacaccgccguggccaagugcaacgagaagcacgacgaggaguucugcgacaugcugcggcuguucgacuucaacaagcaggcgauccgccggcugaagacccccgcccagauguccauccagcugaucaacaaggccgugaacgcccucaucaacgaccagcugaucaugaagaaccaccuccgcgacaucaugugcaucccguacugcaacuacagcaaguacugguaccucaaccacaccgucacggggaagaccucccugccccggugcuggcuggugagcaacggcuccuaccucaacgagacccacuucagcgacgacaucgagcagcaggccgacaacaugaucaccgagcugcugcagaaggaguacaucgaccgccagggcaagacgccccucgggcugguggaccuguucgucuucuccaccagcuucuaccugaucuccaucuuccuccaccuggugaagaucccgacccaccggcacaucaccggcaagcccugccccaagccccaccgccugaaccacauggggaucugcagcugcggccucuacaaccacccgggggugcccgucaaguggaagcggugaggacuagugcaucacauuuaaaagcaucucagccuaccaugagaauaagagaaagaaaaugaagaucaauagcuuauucaucucuuuuucuuuuucguugguguaaagccaacacccugucuaaaaaacauaaauuucuuuaaucauuuugccucuuuucucugugcuucaauuaauaaaaaauggaaagaaccuagaucuaaaaaaaaaaaaaaaaaaaaaaaaaaaaaaaaaaaaaaaaaaaaaaaaaaaaaaaaaaaaaaaaugcaucccccccccccccccccccccccccccccccaaaggcucuuuucagagccaccagaauu

SEQ ID NO: 7015 - RNA, 1855 nt, Artificial Sequence
  mRNA product Design i-2 comprising derived and/or modified sequence from LASV(Lassa virus/H.sapiens-wt/NGA/2016/ISTH_0017;Clade II)__AVO03567__GPCstabilized (opt1)
ggggcgcugccuacggagguggcagccaucuccuucucggcaucaagcuuaccaugggccagaucaucaccuucuuccaggaggugccccacgucaucgaggaggugaugaacaucgugcugaucgcccucagccugcuggccauccucaaggggaucuacaacgucgcgaccugcggccuguucgggcugguguccuuccuccugcugugcggccgcagcugcuccacgaccuacaaggggguguacgagcuccagacccuggagcuggacauggccagccucaacaugaccaugccgcuguccugcacgaagaacaacagccaccacuacaucauggucggcaacgagaccggccuggagcucacccugaccaacacguccaucaucaaccacaaguucugcaaccugagcgacgcccacaagaagaaccucuacgaccacgcccugauguccaucaucagcaccuuccaccuguccauccccaacuucaaccaguacgaggccaugagcugcgacuucaacgggggcaagaucuccgugcaguacaaccucagccacaccuacgcgaucgacgccgccaaccacugcgggaccaucgccaacggcgugcugcagacguucaugcggauggcguggggcggguccuacaucgcccuggacagcggcugcggguccugggacugcaucaugaccagcuaccaguaccucaucauccagaacaccaccugggaggaccacugccaguucucccgccccagccccaucggcuaccuggggcugcucagccagcggacgcgcgacaucuacaucucccggcgccgccggggcaccuucaccuggacccucagcgacuccgagggcaacgagacgcccgggggcuacugccugacccgguggaugcugaucgaggccgagcucaagugcuucgggaacaccgccgucgccaagugcaacgagaagcacgacgaggaguucugcgacaugcugcgccuguucgacuucaacaagcaggcgauccggcgccucaagacccccgcccagaugagcauccagcugaucaacaaggccgugaacgcccugaucaacgaccagcucaucaugaagaaccaccuccgggacaucaugugcauccccuacugcaacuacuccaaguacugguaccugaaccacacggugaccgggaagaccagccugccccgcugcuggcuggucuccaacggcagcuaccugaacgagacccacuucuccgacgacaucgagcagcaggccgacaacaugaucacggagcuccugcagaaggaguacauggaccggcagggcaagaccccgcuggggcucguggaccuguucguguucagcaccuccuucuaccugaucagcaucuuccugcaccucguccgcaucccgacccaccggcacgugaucggcaagcccugccccaagccccaccgccugaaccacauggggaucugcuccugcggccuguacaagcacccgggggugcccgucaaguggaagcggugaggacuagugcaucacauuuaaaagcaucucagccuaccaugagaauaagagaaagaaaaugaagaucaauagcuuauucaucucuuuuucuuuuucguugguguaaagccaacacccugucuaaaaaacauaaauuucuuuaaucauuuugccucuuuucucugugcuucaauuaauaaaaaauggaaagaaccuagaucuaaaaaaaaaaaaaaaaaaaaaaaaaaaaaaaaaaaaaaaaaaaaaaaaaaaaaaaaaaaaaaaaugcaucccccccccccccccccccccccccccccccaaaggcucuuuucagagccaccagaauu

SEQ ID NO: 7016 - RNA, 1855 nt, Artificial Sequence
  mRNA product Design i-2 comprising derived and/or modified sequence from LASV(Lassa virus/H.sapiens-wt/NGA/2018/ISTH_0959;Clade II)__AVV65099__GPCstabilized (opt1)
ggggcgcugccuacggagguggcagccaucuccuucucggcaucaagcuuaccaugggccagaucaucaccuucuuccaggaggugccccacgucaucgaggaggugaugaacaucgugcugaucgcccucagccugcuggccauccucaaggggaucuacaacgucgugaccugcggccuguucgggcugguguccuuccuccugcugugcggccgcagcugcuccacgaccuacaagggggucuacgagcuccagacccuggagcuggacauggcgagccucaacaugaccaugccgcuguccugcacgaagaacaacagccaccacuacaucauggugggcaacgagaccggccuggagcucacccugaccaacacguccaucaucaaccacaaguucugcaaccugagcgacgcccacaagaagaaccucuacgaccacgcccugauguccaucaucagcaccuuccaccuguccauccccaacuucaaccaguacgaggccaugagcugcgacuucaacgggggcaagaucuccgugcaguacaaccucagccacgccuacgcgaucgacgccgccaaccacugcgggaccaucgccaacggcguccugcagaccuucaugcggauggcguggggcggguccuacaucgcccuggacagcggcugcggguccugggacugcaucaugacgagcuaccaguaccucaucauccagaacaccaccugggaggaccacugccaguucucccgccccagccccaucggcuaccuggggcugcucagccagcggacccgcgacaucuacaucucccggcgccgccggggcacguucaccuggacccucagcgacuccgagggcaacgagacccccgggggcuacugccugacgcgguggaugcugaucgaggccgagcucaagugcuucgggaacaccgccguggccaagugcaacgagaagcacgacgaggaguucugcgacaugcugcgccuguucgacuucaacaagcaggcgauccggcgccucaagacccccgcccagaugagcauccagcugaucaacaaggccgugaacgcccugaucaacgaccagcucaucaugaagaaccaccuccgggacaucaugugcaucccguacugcaacuacuccaaguacugguaccugaaccacaccgucacggggaagaccagccugccccgcugcuggcugguguccaacggcagcuaccugaacgagacccacuucuccgacgacaucgagcagcaggccgacaacaugaucaccgagcuccugcagaaggaguacaucgaccggcagggcaagacgccccuggggcucguggaccuguucgucuucagcaccuccuucuaccugaucagcaucuuccugcaccucgugaagaucccgacccaccgccacgugaucggcaagcccugccccaagccccaccggcugaaccacauggggaucugcuccugcggccuguacaagcacccggggguccccgugaaguggaagcgcugaggacuagugcaucacauuuaaaagcaucucagccuaccaugagaauaagagaaagaaaaugaagaucaauagcuuauucaucucuuuuucuuuuucguugguguaaagccaacacccugucuaaaaaacauaaauuucuuuaaucauuuugccucuuuucucugugcuucaauuaauaaaaaauggaaagaaccuagaucuaaaaaaaaaaaaaaaaaaaaaaaaaaaaaaaaaaaaaaaaaaaaaaaaaaaaaaaaaaaaaaaaugcaucccccccccccccccccccccccccccccccaaaggcucuuuucagagccaccagaauu

SEQ ID NO: 7017 - RNA, 1855 nt, Artificial Sequence
  mRNA product Design i-2 comprising derived and/or modified sequence from LASV(LASV003-NIG-2008;Clade II)__AIT17580__GPCstabilized (opt1)
ggggcgcugccuacggagguggcagccaucuccuucucggcaucaagcuuaccaugggccagaucaucaccuucuuccaggaggugccccacgucaucgaggaggugaugaacaucgugcugaucgcccucagccugcuggccauccucaaggggaucuacaacgucgcgaccugcggccuguucgggcugguguccuuccuccugcugugcggccgcagcugcuccacgaccuacaaggggguguacgagcuccagacccuggagcuggacauggccagccucaacaugaccaugccgcuguccugcacgaagaacaacagccaccacuacaucauggucggcaacgagaccggccuggagcucacccugaccaacacguccaucaucaaccacaaguucugcaaccugagcgacgcccacaagaagaaccucuacgaccacgcccugauguccaucaucagcaccuuccaccuguccauccccaacuucaaccaguacgaggccaugagcugcgacuucaacgggggcaagaucuccgugcaguacaaccucagccacaccuacgcgguggacgccgccaaccacugcgggaccaucgccaacggcguccugcagacguucaugcggauggcguggggcggguccuacaucgcccuggacagcggcugcggguccugggacugcaucaugaccagcuaccaguaccucaucauccagaacaccaccugggaggaccacugccaguucucccgccccagccccaucggcuaccuggggcugcucagccagcggacgcgcgacaucuacaucucccggcgccgccggggcaccuucaccuggacccucagcgacuccgagagcaacgagacgccgggcggguacugccugacccgguggaugcugaucgaggccgagcucaagugcuucggcaacaccgccguggccaagugcaacgagaagcacgacgaggaguucugcgacaugcugcgccuguucgacuucaacaagcaggcgauccggcgccucaaggcccccgcccagauguccauccagcugaucaacaaggccgugaacgcccugaucaacgaccagcucaucaugaagaaccaccuccgggacaucaugugcauccccuacugcaacuacagcaaguacugguaccugaaccacaccgucacgggccgcaccucccugccccggugcuggcuggugagcaacggguccuaccugaacgagacccacuucagcgacgacaucgagcagcaggcggacaacaugaucaccgagcuccugcagaaggaguacauggaccgccagggcaagacgccccugggccucguggaccuguucgucuucuccaccagcuucuaccugaucuccaucuuccugcaccucgugaagaucccgacccaccggcacgugaucgggaagcccugccccaagccccaccgccugaaccacaugggcaucugcagcugcgggcuguacaagcacccgggcguccccgugaaguggaagcggugaggacuagugcaucacauuuaaaagcaucucagccuaccaugagaauaagagaaagaaaaugaagaucaauagcuuauucaucucuuuuucuuuuucguugguguaaagccaacacccugucuaaaaaacauaaauuucuuuaaucauuuugccucuuuucucugugcuucaauuaauaaaaaauggaaagaaccuagaucuaaaaaaaaaaaaaaaaaaaaaaaaaaaaaaaaaaaaaaaaaaaaaaaaaaaaaaaaaaaaaaaaugcaucccccccccccccccccccccccccccccccaaaggcucuuuucagagccaccagaauu

SEQ ID NO: 7018 - RNA, 1855 nt, Artificial Sequence
  mRNA product Design i-2 comprising derived and/or modified sequence from LASV(LASV035-NIG-2009;Clade II)__AIT17588__GPCstabilized (opt1)
ggggcgcugccuacggagguggcagccaucuccuucucggcaucaagcuuaccaugggccagaucaucaccuucuuccaggaggugccccacgucaucgaggaggugaugaacaucgugcugaucgcccucagccugcuggccauccucaaggggaucuacaacgucgcgaccugcggccuguucgggcugguguccuuccuccugcugugcggccgcagcugcuccacgaccuacaaggggguguacgagcuccagacccuggagcuggacauggccagccucaacaugaccaugccgcuguccugcacgaagaacaacagccaccacuacaucauggucggcaacgagaccggccuggagcucacccugaccaacacguccaucaucaaccacaaguucugcaaccugagcgacgcccacaagaagaaccucuacgaccacgcccugauguccaucaucagcaccuuccaccuguccauccccaacuucaaccaguacgaggccaugagcugcgacuucaacgggggcaagaucuccgugcaguacaaccucagccacgcguacgccguggacgccgccaaccacugcgggaccaucgcgaacggcguccugcagaccuucaugcggauggccuggggcggguccuacaucgcccuggacagcggcugcggguccugggacugcaucaugacgagcuaccaguaccucaucauccagaacaccaccugggaggaccacugccaguucucccgccccagccccaucggcuaccuggggcugcucagccagcggacccgcgacaucuacaucucccggcgccgccggggcacguucaccuggacccucagcgacuccgagggcaacgagacccccgggggcuacugccugacgcgguggaugcugaucgaggccgagcucaagugcuucgggaacaccgccguggcgaagugcaacgagaagcacgacgaggaguucugcgacaugcugcgccuguucgacuucaacaagcaggccauccggcgccucaaggcccccgcccagaugagcauccagcugaucaacaaggccgugaacgcgcugaucaacgaccagcucaucaugaagaaccaccuccgggacaucaugugcauccccuacugcaacuacuccaaguacugguaccugaaccacaccgucaccgggaagacgagccugccccgcugcuggcugguguccaacggcagcuaccugaacgagacccacuucuccgacgacaucgagcagcaggccgacaacaugaucaccgagcuccugcagaaggaguacaucgaccggcagggcaagaccccgcuggggcucguggaccuguucgucuucagcacguccuucuaccugaucagcaucuuccugcaccucgugaagaucccgacccaccgccacgugaucggcaagcccugccccaagccccaccggcugaaccacauggggaucugcuccugcggccuguacaagcacccggggguccccgugaaguggaagcgcugaggacuagugcaucacauuuaaaagcaucucagccuaccaugagaauaagagaaagaaaaugaagaucaauagcuuauucaucucuuuuucuuuuucguugguguaaagccaacacccugucuaaaaaacauaaauuucuuuaaucauuuugccucuuuucucugugcuucaauuaauaaaaaauggaaagaaccuagaucuaaaaaaaaaaaaaaaaaaaaaaaaaaaaaaaaaaaaaaaaaaaaaaaaaaaaaaaaaaaaaaaaugcaucccccccccccccccccccccccccccccccaaaggcucuuuucagagccaccagaauu

SEQ ID NO: 7019 - RNA, 1855 nt, Artificial Sequence
  mRNA product Design i-2 comprising derived and/or modified sequence from LASV(LASV1000-NIG-2009;Clade II)__AIT17782__GPCstabilized (opt1)
ggggcgcugccuacggagguggcagccaucuccuucucggcaucaagcuuaccaugggccagaucaucaccuucuuccaggaggugccccacgucaucgaggaggugaugaacaucgugcugaucgcccucagccugcuggccauccucaaggggaucuacaacgucgcgaccugcggccuguucgggcugguguccuuccuccugcugugcggccgcagcugcuccacgaccuacaaggggguguacgagcuccagacccuggagcuggacauggccagccucaacaugaccaugccgcuguccugcacgaagaacaacagccaccacuacaucauggucggcaacgagaccggccuggagcucacccugaccaacacguccaucaucaaccacaaguucugcaaccugagcgacgcccacaagaagaaccucuacgaccacgcccugauguccaucaucagcaccuuccaccuguccauccccaacuucaaccaguacgaggccaugagcugcgacuucaacgggggcaagaucuccgugcaguacaaccucagccacaccuacgcgguggacgccgccaaccacugcgggaccaucgccaacggcguccugcagacguucaugcggauggcguggggcggguccuacaucgcccuggacagcggcugcggguccugggacugcaucaugaccagcuaccaguaccucaucauccagaacaccaccugggaggaccacugccaguucucccgccccagccccaucggcuaccuggggcugcucagccagcggacgcgcgacaucuacaucucccggcgccgccggggcaccuucaccuggacccucagcgacuccgagggcaacgagacgcccgggggcuacugccugacccgguggaugcugaucgaggccgagcucaagugcuucgggaacaccgccguggccaagugcaacgagaagcacgacgaggaguucugcgacaugcugcgccuguucgacuucaacaagcaggcgaucaagcggcucaagacccccgcccagaugagcauccagcugaucaacaaggccgugaacgcccugaucaacgaccagcucaucaugaagaaccaccuccgcgacaucaugugcauccccuacugcaacuacuccaaguacugguaccugaaccacacggucaccgggaagaccagccugccccggugcuggcugguguccaacggcagcuaccugaacgagacccacuucuccgacgacaucgagcagcaggccgacaacaugaucacggagcuccugcagaaggaguacaucgaccgccagggcaagaccccgcuggggcucguggaccuguucgucuucagcaccuccuucuaccugaucagcaucuuccugcaccucgugaagaucccgacccaccggcacguggucggcaagcccugccccaagccccaccgccugaaccacauggggaucugcuccugcggccuguacaagcacccgggggugcccgugaaguggaagcggugaggacuagugcaucacauuuaaaagcaucucagccuaccaugagaauaagagaaagaaaaugaagaucaauagcuuauucaucucuuuuucuuuuucguugguguaaagccaacacccugucuaaaaaacauaaauuucuuuaaucauuuugccucuuuucucugugcuucaauuaauaaaaaauggaaagaaccuagaucuaaaaaaaaaaaaaaaaaaaaaaaaaaaaaaaaaaaaaaaaaaaaaaaaaaaaaaaaaaaaaaaaugcaucccccccccccccccccccccccccccccccaaaggcucuuuucagagccaccagaauu

SEQ ID NO: 7020 - RNA, 1855 nt, Artificial Sequence
  mRNA product Design i-2 comprising derived and/or modified sequence from LASV(LASV221-NIG-2010;Clade II)__AIT17624__GPCstabilized (opt1)
ggggcgcugccuacggagguggcagccaucuccuucucggcaucaagcuuaccaugggccagaucaucaccuucuuccaggaggugccccacgucaucgaggaggugaugaacaucgugcugaucgcccucagccugcuggccauccucaaggggaucuacaacgucgcgaccugcggccuguucgggcugguguccuuccuccugcugugcggccgcagcugcuccacgaccuacaaggggguguacgagcuccagacccuggagcuggacauggccagccucaacaugaccaugccgcuguccugcacgaagaacaacagccaccacuacaucauggucggcaacgagaccggccuggagcucacccugaccaacacguccaucaucaaccacaaguucugcaaccugagcgacgcccacaagaagaaccucuacgaccacgcccugauguccaucaucagcaccuuccaccuguccauccccaacuucaaccaguacgaggccaugagcugcgacuucaacgggggcaagaucuccgugcaguacaaccucagccacaccuacgcgaucgacgccgccaaccacugcgggaccaucgccaacggcgugcugcagacguucaugcggauggcguggggcggguccuacaucgcccuggacagcggcugcggguccugggacugcaucaugaccagcuaccaguaccucaucauccagaacaccaccugggaggaccacugccaguucucccgccccagccccaucggcuaccuggggcugcucagccagcggacgcgcgacaucuacaucucccggcgccgccggggcaccuucaccuggacccucagcgacuccgagggcaacgagacgcccgggggcuacugccugacccgguggaugcugaucgaggccgagcucaagugcuucgggaacaccgccgucgccaagugcaacgagaagcacgacgaggaguucugcgacaugcugcgccuguucgacuucaacaagcaggcgauccggcgccucaagacccccgcccagaugagcauccagcugaucaacaaggccgugaacgcccugaucaacgaccagcucaucaugaagaaccaccuccgggacaucaugugcauccccuacugcaacuacuccaaguacugguaccugaaccacacggugaccgggaagaccagccugccccgcugcuggcuggucuccaacggcagcuaccugaacgagacccacuucuccgacgacaucgagcagcaggccgacaacaugaucacggagaugcuccagaaggaguacauggaccggcagggcaagaccccgcuggggcugguggaccucuucguguucagcaccuccuucuaccugaucagcaucuuccugcaccuggucaagaucccgacccaccgccacgugaucggcaagcccugccccaagccccaccggcucaaccacauggggaucugcuccugcggccuguacaagcacccgggggugcccgucaaguggaagcgcugaggacuagugcaucacauuuaaaagcaucucagccuaccaugagaauaagagaaagaaaaugaagaucaauagcuuauucaucucuuuuucuuuuucguugguguaaagccaacacccugucuaaaaaacauaaauuucuuuaaucauuuugccucuuuucucugugcuucaauuaauaaaaaauggaaagaaccuagaucuaaaaaaaaaaaaaaaaaaaaaaaaaaaaaaaaaaaaaaaaaaaaaaaaaaaaaaaaaaaaaaaaugcaucccccccccccccccccccccccccccccccaaaggcucuuuucagagccaccagaauu

SEQ ID NO: 7021 - RNA, 1855 nt, Artificial Sequence
  mRNA product Design i-2 comprising derived and/or modified sequence from LASV(LASV237-NIG-2010;Clade II)__AIT17638__GPCstabilized (opt1)
ggggcgcugccuacggagguggcagccaucuccuucucggcaucaagcuuaccaugggccagaucaucaccuucuuccaggaggugccccacgucaucgaggaggugaugaacaucgugcugaucgcccucagccugcuggccauccucaaggggaucuacaacgucgcgaccugcggccuguucgggcugguguccuuccuccugcugugcggccgcagcugcuccacgaccuacaaggggguguacgagcuccagacccuggagcuggacauggccagccucaacaugaccaugccgcuguccugcacgaagaacaacagccaccacuacaucauggucggcaacgagaccggccuggagcucacccugaccaacacguccaucaucaaccacaaguucugcaaccugagcgacgcccacaagaaggaccucuacgaccacgcccugauguccaucaucagcaccuuccaccuguccauccccaacuucaaccaguacgaggccaugagcugcgacuucaacgggggcaagaucuccgugcaguacaaccucagccacaccuacgcgguggacgccgccaaccacugcgggaccaucgccaacggcguccugcagacguucaugcggauggcguggggcggguccuacaucgcccuggacagcggcugcggguccugggacugcaucaugaccagcuaccaguaccucaucauccagaacaccaccugggaggaccacugccaguucucccgccccagccccaucggcuaccuggggcugcucagccagcggacgcgcgacaucuacaucucccggcgccgccggggcaccuucaccuggacccucagcgacuccgagggcaacgagacgcccgggggcuacugccugacccgguggaugcugaucgaggccgagcucaagugcuucgggaacaccgccguggccaagugcaacgagaagcacgacgaggaguucugcgacaugcugcgccuguucgacuucaacaagcaggcgauccggcgccucaagacccccgcccagaugagcauccagcugaucaacaaggccgugaacgcccugaucaacgaccagcucaucaugaagaaccaccuccgggacaucaugugcauccccuacugcaacuacuccaaguacugguaccugaaccacacggucaccgggaagaccagccugccccgcugcuggcugguguccaacggcagcuaccugaacgagacccacuucuccgacgacaucgagcagcaggccgacaacaugaucacggagcuccugcagaaggaguacauggaccggcagggcaagaccccgcuggggcucguggaccuguucgucuucagcaccuccuucuaccugaucagcaucuuccugcaccucaucaagaucccgacccaccgccacaucacgggcaagcccugccccaagccccaccggcugaaccacauggggaucugcuccugcggccuguacaagcacccgggggugcccgugaaguggaagcgcugaggacuagugcaucacauuuaaaagcaucucagccuaccaugagaauaagagaaagaaaaugaagaucaauagcuuauucaucucuuuuucuuuuucguugguguaaagccaacacccugucuaaaaaacauaaauuucuuuaaucauuuugccucuuuucucugugcuucaauuaauaaaaaauggaaagaaccuagaucuaaaaaaaaaaaaaaaaaaaaaaaaaaaaaaaaaaaaaaaaaaaaaaaaaaaaaaaaaaaaaaaaugcaucccccccccccccccccccccccccccccccaaaggcucuuuucagagccaccagaauu

SEQ ID NO: 7022 - RNA, 1855 nt, Artificial Sequence
  mRNA product Design i-2 comprising derived and/or modified sequence from LASV(LASV253-NIG-2011;Clade II)__AIT17670__GPCstabilized (opt1)
ggggcgcugccuacggagguggcagccaucuccuucucggcaucaagcuuaccaugggccagaucaucaccuucuuccaggaggugccccacgucaucgaggaggugaugaacaucgugcugaucgcccucagccugcuggccauccucaaggggaucuacaacgucgcgaccugcggccuguucgggcugguguccuuccuccugcugugcggccgcagcugcuccacgaccuacaaggggguguacgagcuccagacccuggagcuggacauggccagccucaacaugaccaugccgcuguccugcacgaagaacaacagccaccacuacaucauggucggcaacgagaccggccuggagcucacccugaccaacacguccaucaucaaccacaaguucugcaaccugagcgacgcccacaagaagaaccucuacgaccacgcccugauguccaucaucagcaccuuccaccuguccauccccaacuucaaccaguacgaggccaugagcugcgacuucaacgggggcaagaucuccgugcaguacaaccucagccacaccuacgcgguggacgccgccaaccacugcgggaccaucgccaacggcguccugcagacguucaugcggauggcguggggcggguccuacaucgcccuggacagcggcugcggguccugggacugcaucaugaccagcuaccaguaccucaucauccagaacaccaccugggaggaccacugccaguucucccgccccagccccaucggcuaccuggggcugcucagccagcggacgcgcgacaucuacaucucccggcgccgccggggcaccuucaccuggacccucagcgacuccgagggcaacgagacgcccgggggcuacugccugacccgguggaugcugaucgaggccgagcucaagugcuucgggaacaccgccguggccaagugcaacgagaagcacgacgaggaguucugcgacaugcugcgccuguucgacuucaacaagcaggcgauccggcgccucaaggcccccgcccagaugagcauccagcugaucaacaaggccgugaacgcccugaucaacgaccagcucaucaugaagaaccaccuccgggacaucaugugcaucccguacugcaacuacuccaaguacugguaccugaaccacaccgucacggggcgcaccagccugccccggugcuggcugguguccaacggcagcuaccugaacgagacccacuucuccgacgacaucgagcagcaggcggacaacaugaucaccgagcuccugcagaaggaguacaucgaccgccagggcaagacgccccuggggcucguggaccuguucgucuucagcaccuccuucuaccugaucagcaucuuccugcaccucgugaagaucccgacccaccggcacaucaucggcaagcccugccccaagccccaccgccugaaccacauggggaucugcuccugcggccuguacaagcacccgggggugcccgucaaguggaagcggugaggacuagugcaucacauuuaaaagcaucucagccuaccaugagaauaagagaaagaaaaugaagaucaauagcuuauucaucucuuuuucuuuuucguugguguaaagccaacacccugucuaaaaaacauaaauuucuuuaaucauuuugccucuuuucucugugcuucaauuaauaaaaaauggaaagaaccuagaucuaaaaaaaaaaaaaaaaaaaaaaaaaaaaaaaaaaaaaaaaaaaaaaaaaaaaaaaaaaaaaaaaugcaucccccccccccccccccccccccccccccccaaaggcucuuuucagagccaccagaauu

SEQ ID NO: 7023 - RNA, 1855 nt, Artificial Sequence
  mRNA product Design i-2 comprising derived and/or modified sequence from LASV(LASV254-NIG-2011;Clade II)__AIT17674__GPCstabilized (opt1)
ggggcgcugccuacggagguggcagccaucuccuucucggcaucaagcuuaccaugggccagaucaucaccuucuuccaggaggugccccacgucaucgaggaggugaugaacaucgugcugaucgcccucagccugcuggccauccucaaggggaucuacaacgucgcgaccugcggccuguucgggcugguguccuuccuccugcugugcggccgcagcugcuccacgaccuacaaggggguguacgagcuccagacccuggagcuggacaugaccaaccucaacaugacgaugccgcugagcugcaccaagaacaacucccaccacuacaucauggucggcaacgagaccggccuggagcucacccugacgaacaccagcaucaucaaccacaaguucugcaaccuguccgacgcccacaagaagaaccucuacaaccacgcccugaugagcaucaucuccaccuuccaccugagcauccccaacuucaaccaguacgaggccauguccugcgacuucaacgggggcaagaucagcgugcaguacaaccucucccacagcuacgccguggacgcggccaaccacugcgggaccaucgccaacggcguccugcagacguucaugcggauggccuggggcggguccuacaucgcgcuggacagcggcugcgggaacugggacugcaucaugaccuccuaccaguaccucaucauccagaacaccaccugggaggaccacugccaguucagccgccccucccccaucggcuaccuggggcugcucagccagcggacgcgcgacaucuacaucagccggcgccgccggggcaccuucaccuggacccucuccgacagcgagggcaacgagacgcccgggggcuacugccugacccgguggaugcugaucgaggccgagcucaagugcuucgggaacaccgccguggccaagugcaacgagaagcacgacgaggaguucugcgacaugcugcgccuguucgacuucaacaagcaggccauccggcgccucaagacccccgcgcaggccaacauccagcugaucaacaaggccgugaacgcccugaucaacgaccagcucaucaugaagaaccaccuccgggacaucaugugcauccccuacugcaacuacuccaaguacugguaccugaaccacacggucaccgggaagaccagccugccccgcugcuggcugguguccaacggcagcuaccugaacgagacccacuucuccgacgacaucgagcagcaggccgacaacaugaucacggagcuccugcagaaggaguacauggaccggcagggcaagaccccgcuggggcucguggaccuguucgucuucagcaccuccuucuaccugaucagcaucuuccugcaccucgugaagaucccgacccaccgccacgugaucggcaagcccugccccaagccccaccggcugaaccacauggggaucugcuccugcggccuguacaagcacccggggguccccgugaaguggaagcgcugaggacuagugcaucacauuuaaaagcaucucagccuaccaugagaauaagagaaagaaaaugaagaucaauagcuuauucaucucuuuuucuuuuucguugguguaaagccaacacccugucuaaaaaacauaaauuucuuuaaucauuuugccucuuuucucugugcuucaauuaauaaaaaauggaaagaaccuagaucuaaaaaaaaaaaaaaaaaaaaaaaaaaaaaaaaaaaaaaaaaaaaaaaaaaaaaaaaaaaaaaaaugcaucccccccccccccccccccccccccccccccaaaggcucuuuucagagccaccagaauu

SEQ ID NO: 7024 - RNA, 1855 nt, Artificial Sequence
  mRNA product Design i-2 comprising derived and/or modified sequence from LASV(Nig08-A19;Clade III)__ADU56618__GPCstabilized (opt1)
ggggcgcugccuacggagguggcagccaucuccuucucggcaucaagcuuaccaugggccagaucgugaccuucuuccaggaggucccccacgugaucgaggaggugaugaacaucguccugaucgcccucagcauccuggccauccugaaggggcucuacaacaucgcgaccugcggccugaucgggcuggugacguuccuccugcuguccggccgcagcugcuccaugaccuacaaggggguguacgagcuccagacccuggagcugaacaugaacacccucaacaugacgaugccgcugagcugcaccaagaacaacucccaccacuacaucauggucggcaacgagaccggccuggagcucacccugacgaacaccagccugcuccaccacaaguucugcaaccuguccgacgcccacaagaagaaccuguacgaccacacccucaugagcaucaucuccaccuuccaccugagcauccccaacuucaaccaguacgaggccauguccugcgacuucaacgggggcaagaucacggugcaguacaaccugagccacuccuacgccaucgacgccgcgaaccacugcgggaccguggccaacggcguccuccagaccuucaugcggauggccuggggcgggagcuacaucgcccuggacuccggcugcgggaagugggacugcaucaugaccagcuaccaguaccugaucauccagaacacgaccugggaggaccacugccaguucucccggcccagccccaucggcuaccucgggcugcugucccagcgcacccgggacaucuacaucagccgccggcgccggggcaccuucacguggacccugagcgacuccgagggcaacgagacccccgggggcuacugccucacccgcuggaugcugaucgaggcggagcugaagugcuucgggaacacggccguggccaagugcaacgagaagcacgacgaggaguucugcgacaugcuccggcuguucgacuucaacaagcaggccauccgccggcugaaggcccccgcgcagaugagcauccagcucaucaacaaggccgugaacgcccugaucaacgaccagcugaucaugaagaaccaccuccgcgacaucaugugcauccccuacugcaacuacuccaaguacugguaccugaaccacaccagcaccgggcggaccucccugccccgcugcuggcucgucagcaacggcuccuaccugaacgagacgcacuucagcgacgacaucgagcagcaggccgacaacaugaucaccgagaugcugcagaaggaguaccucgaccggcagggcaagaccccgcuggggcugguggaccuguucguguucuccaccagcuucuaccucaucuccaucuuccugcaccuggucaagaucccgacgcaccgccacaucgugggcaagcccugccccaagccccaccggcucaaccacauggggaucugcagcugcggccuguacaagcagccgggggugcccguccgcuggaagcggugaggacuagugcaucacauuuaaaagcaucucagccuaccaugagaauaagagaaagaaaaugaagaucaauagcuuauucaucucuuuuucuuuuucguugguguaaagccaacacccugucuaaaaaacauaaauuucuuuaaucauuuugccucuuuucucugugcuucaauuaauaaaaaauggaaagaaccuagaucuaaaaaaaaaaaaaaaaaaaaaaaaaaaaaaaaaaaaaaaaaaaaaaaaaaaaaaaaaaaaaaaaugcaucccccccccccccccccccccccccccccccaaaggcucuuuucagagccaccagaauu

SEQ ID NO: 7025 - RNA, 1858 nt, Artificial Sequence
  mRNA product Design i-2 comprising derived and/or modified sequence from LASV(G1180-SLE-2010;Clade IV)__AIT17168__GPCstabilized (opt1)
ggggcgcugccuacggagguggcagccaucuccuucucggcaucaagcuuaccaugggccagaucgugaccuucuuccaggaggucccccacgugaucgaggaggugaugaacaucguccugaucgcccucagcauccuggccgugcugaaggggcucuacaacuucgcgaccugcggccugguggggcugcucaccuuccugcugcucugcggccgcuccugcaccgccagccgguacaagggggucuacgagcugcagacccuggagcucaacauggagacccugaacaugacgaugccgcuguccugcaccaagaacaacagccaccacuacaucauggugggcaacgagaccggccucgagcugacccugacgaacaccuccaucaucaaccacaaguucugcaaccucagcgacgcccacaagaagaaccuguacgaccacgcccugauguccaucaucagcaccuuccaccucuccauccccaacuucaaccaguacgaggccaugagcugcgacuucaacgggggcaagaucuccgugcaguacaaccugagccacuccuacgcgggggacgccgccaaccacugcggcaccgucgccaacggggugcugcagacguucaugcgcauggcguggggcggcagcuacaucgcccucgacuccgggugcggcagcugggacugcaucaugaccuccuaccaguaccugaucauccagaacaccaccugggaggaccacugccaguucagccggcccucccccaucggguaccugggccuccugagccagcgcacgcgggacaucuacaucagccgccggcgccggggcaccuucaccuggacccuguccgacagcgaggggaaggacacgccgggcggguacugccugacccgcuggaugcucaucgaggccgagcugaagugcuucggcaacaccgccguggccaagugcaacgagaagcacgacgaggaguucugcgacaugcugcggcuguucgacuucaacaagcaggcgauccagcgccugaaggcccccgcccagauguccauccagcugaucaacaaggccgucaacgcccucaucaacgaccagcugaucaugaagaaccaccuccgggacaucaugugcauccccuacugcaacuacagcaaguacugguaccucaaccacaccacgaccggcaagaccucccugcccaagugcuggcuggugagcaacggcuccuaccucaacgagacccacuucagcgacgacaucgagcagcaggcggacaacaugaucacggagaugcugcagaaggaguacauggagcgccaggggaagacgccccugggccucguggaccuguucgucuucuccaccagcuucuaccugaucuccaucuuccugcaccucgugaagaucccgacccaccggcacaucgugggcaagagcugccccaagccccaccgccugaaccacauggggaucugcuccugcgggcuguacaagcagcccggcgucccggugaaguggaagcggugaggacuagugcaucacauuuaaaagcaucucagccuaccaugagaauaagagaaagaaaaugaagaucaauagcuuauucaucucuuuuucuuuuucguugguguaaagccaacacccugucuaaaaaacauaaauuucuuuaaucauuuugccucuuuucucugugcuucaauuaauaaaaaauggaaagaaccuagaucuaaaaaaaaaaaaaaaaaaaaaaaaaaaaaaaaaaaaaaaaaaaaaaaaaaaaaaaaaaaaaaaaugcaucccccccccccccccccccccccccccccccaaaggcucuuuucagagccaccagaauu

SEQ ID NO: 7026 - RNA, 1858 nt, Artificial Sequence
  mRNA product Design i-2 comprising derived and/or modified sequence from LASV(G1442-SLE-2011;Clade IV)__AIT17180__GPCstabilized (opt1)
ggggcgcugccuacggagguggcagccaucuccuucucggcaucaagcuuaccaugggccagaucgugaccuucuuccaggaggucccccacgugaucgaggaggugaugaacaucguccugaucgcccucagcauccuggccgugcugaaggggcucuacaacguggcgaccugcggccugaucgggcuggucacguuccuccugcugugcggccgcuccugcaccaccacccucuacaaggggguguacgagcugcagacgcuggagcucaacauggagacccugaacaugaccaugccgcugagcugcaccaagaacaacucccaccacuacauccgggugggcaacgagacgggccucgagcugacccugaccaacaccagcaucaucaaccacaaguucugcaaccucuccgacgcccacaagaagaaccuguacgaccacgcccugaugagcaucaucuccacguuccaccucagcauccccaacuucaaccaguacgaggccauguccugcgacuucaacgggggcaagaucagcguccaguacaaccugucccacagcuacgccggggacgcggccaaccacugcggcaccguggccaacggggugcugcagaccuucaugcgcauggccuggggcggcuccuacaucgcgcucgacagcgggugcggcaacugggacugcaucaugaccuccuaccaguaccugaucauccagaacacgaccugggacgaccacugccaguucagccgccccucccccaucggguaccugggccuccugagccagcggacccgcgacgucuacaucucccggcgccgccggggcaccuucacguggacccugagcgacagcgaggggaaggacaccccgggcggguacugccugacccgguggaugcucaucgaggccgagcugaagugcuucggcaacacggccguggccaagugcaacgagaagcacgacgaggaguucugcgacaugcugcgccucuucgacuucaacaagcaggccauccagcggcugaaggcgcccgcccagauguccauccagcugaucaacaaggccgugaacgcccucaucaacgaccagcugaucaugaagaaccaccuccgcgacaucaugugcauccccuacugcaacuacagcaaguacugguaccugaacaacaccgccaccggcaagaccucccugcccaagugcuggcugaucagcaacggcuccuaccucaacgagacgcacuucagcgacgacaucgagcaggaggcggacaacaugaucaccgagaugcugcagaaggaguacauggagcggcaggggaagacgccccugggccucgucgaccuguucguguucuccaccagcuucuaccugaucuccaucuuccugcaccucgugaagaucccgacccaccgccacaucgucggcaagagcugccccaagccccaccggcugaaccacauggggaucugcuccugcgggcuguacaagcagcccggcgugccggugcgcuggaagcggugaggacuagugcaucacauuuaaaagcaucucagccuaccaugagaauaagagaaagaaaaugaagaucaauagcuuauucaucucuuuuucuuuuucguugguguaaagccaacacccugucuaaaaaacauaaauuucuuuaaucauuuugccucuuuucucugugcuucaauuaauaaaaaauggaaagaaccuagaucuaaaaaaaaaaaaaaaaaaaaaaaaaaaaaaaaaaaaaaaaaaaaaaaaaaaaaaaaaaaaaaaaugcaucccccccccccccccccccccccccccccccaaaggcucuuuucagagccaccagaauu

SEQ ID NO: 7027 - RNA, 1858 nt, Artificial Sequence
  mRNA product Design i-2 comprising derived and/or modified sequence from LASV(G3010-SLE-2013;Clade IV)__AIT17344__GPCstabilized (opt1)
ggggcgcugccuacggagguggcagccaucuccuucucggcaucaagcuuaccaugggccagaucgugaccuucuuccaggaggucccccacgugaucgaggaggugaugaacaucguccugaucgcccucagcauccuggccgugcugaaggggcucuacaacuucgcgaccugcggccugguggggcuggucacguuccuccugcugugcggccgcuccugcaccaccagccucuacaaggggguguacgagcugcagacccuggagcucaacauggagacgcugaacaugaccaugccgcuguccugcaccaagaacaacagccaccacuacaucauggugggcaacgagaccggccucgagcugacgcugaccaacaccuccaucaucaaccacaaguucugcaaccucagcgacgcccacaagaagaaccuguacaaccacgcccugauguccaucaucagcaccuuccaccucuccauccccaacuucaaccaguacgaggccaugagcugcgacuucaacgggggcaagaucuccguccaguacaaccugagccacuccuacgccggggacgcggccagccacugcggcacgguggccaacggggugcugcagaccuucaugcggauggccuggggcggcuccuacaucgcgcucgacagcgggugcggcaagugggacugcaucaugaccuccuaccaguaccugaucauccagaacaccacgugggaggaccacugccaguucagccgccccucccccaucggguaccugggccuccugagccagcggacccgcgacaucuacaucagccggcgccgccggggcaccuucaccuggacgcuguccgacagcgaggggaaggacaccccgggcggguacugccugacccgguggaugcucaucgaggccgagcugaagugcuucggcaacaccgccgucgccaagugcaacgagaagcacgacgaggaguucugcgacaugcugcgccucuucgacuucaacaagcaggccauccagcggcugaagacgcccgcgcagauguccauccagcugaucaacaaggccgugaacgcccucaucaacgaccagcugaucaugaagaaccaccuccgcgacaucaugugcauccccuacugcaacuacagcaaguacugguaccugaaccacaccaccaccggcaagacgucccugcccaagugcuggcuggugagcaacggcuccuaccucaacgagacccacuucagcgacgacaucgagcagcaggccgacaacaugaucaccgagaugcugcagaaggaguacauggagcggcaggggaagacgccccugggccucgucgaccuguucguguucuccaccagcuucuaccugaucuccaucuuccugcaccucgugaagaucccgacccaccgccacaucgucggcaagagcugccccaagccccaccggcugaaccacauggggaucugcuccugcgggcuguacaagcagcccggcgugccggugcgcuggaagcggugaggacuagugcaucacauuuaaaagcaucucagccuaccaugagaauaagagaaagaaaaugaagaucaauagcuuauucaucucuuuuucuuuuucguugguguaaagccaacacccugucuaaaaaacauaaauuucuuuaaucauuuugccucuuuucucugugcuucaauuaauaaaaaauggaaagaaccuagaucuaaaaaaaaaaaaaaaaaaaaaaaaaaaaaaaaaaaaaaaaaaaaaaaaaaaaaaaaaaaaaaaaugcaucccccccccccccccccccccccccccccccaaaggcucuuuucagagccaccagaauu

SEQ ID NO: 7028 - RNA, 1858 nt, Artificial Sequence
  mRNA product Design i-2 comprising derived and/or modified sequence from LASV(G502-SLE-2009;Clade IV)__AIT17126__GPCstabilized (opt1)
ggggcgcugccuacggagguggcagccaucuccuucucggcaucaagcuuaccaugggccagaucgugaccuucuuccaggaggucccccacgugaucgaggaggugaugaacaucguccugaucgcccucagcauccuggccgugcugaaggggcucuacaacuucgcgaccugcggccugguggggcugcucacguuccugcugcucugcggccgcuccugcaccaccgggcuguacaagggcgucuacgagcugcagacccucgagcugaacauggagacgcugaacaugaccaugccgcucagcugcaccaagaacaacucccaccacuacaucauggugggcaacgagaccgggcuggagcugacgcucaccaacaccagcaucaucaaccacaaguucugcaaccuguccgacgcccacaagaagaaccuguacgaccacgcccucaugagcaucaucuccaccuuccaccugagcauccccaacuucaaccaguacgaggccauguccugcgacuucaacggcgggaagaucagcgugcaguacaaccugucccacagcuacgccggcgacgcggccgaccacugcgggacggucgccaacggcgugcuccagaccuucaugcggauggccuggggcggguccuacaucgcgcuggacagcggcugcgggcggugggacugcaucaugaccuccuaccaguaccugaucauccagaacaccacgugggaggaccacugccaguucagccgccccucccccaucggcuaccucggccugcugagccagcggacccgcgacaucuacaucucccggcgccgccgggggaccuucaccuggacgcugagcgacagcgagggcaaggacacccccgggggcuacugccucacccgguggaugcugaucgaggccgagcugaagugcuucgggaacaccgccguggccaagugcaacgagaagcacgacgaggaguucugcgacaugcuccgccuguucgacuucaacaagcaggccauccagcggcugaaggcgcccgcccagauguccauccagcucaucaacaaggccgucaacgcccugaucaacgaccagcuggugaugaagaaccaccuccgcgacaucaugugcauccccuacugcaacuacagccgguacugguaccugaaccacacgaccaccggccgcaccucccugcccaagugcuggcucgugagcaacggguccuaccugaacgagacgcacuucagcgacgacaucgagcagcaggccgacaacaugaucaccgagaugcugcagaaggaguacauggagcggcagggcaagaccccgcucgggcuggucgaccuguucguguucuccaccagcuucuaccugaucuccaucuuccuccaccuggugaagaucccgacgcaccgccacaucgucggcaagagcugccccaagccccaccggcugaaccacauggggaucugcuccugcggccucuacaagcagcccggcgugccggugaaguggaagcgcugaggacuagugcaucacauuuaaaagcaucucagccuaccaugagaauaagagaaagaaaaugaagaucaauagcuuauucaucucuuuuucuuuuucguugguguaaagccaacacccugucuaaaaaacauaaauuucuuuaaucauuuugccucuuuucucugugcuucaauuaauaaaaaauggaaagaaccuagaucuaaaaaaaaaaaaaaaaaaaaaaaaaaaaaaaaaaaaaaaaaaaaaaaaaaaaaaaaaaaaaaaaugcaucccccccccccccccccccccccccccccccaaaggcucuuuucagagccaccagaauu

SEQ ID NO: 7029 - RNA, 1858 nt, Artificial Sequence
  mRNA product Design i-2 comprising derived and/or modified sequence from LASV(G733-SLE-2010;Clade IV)__AIT17154__GPCstabilized (opt1)
ggggcgcugccuacggagguggcagccaucuccuucucggcaucaagcuuaccaugggccagaucgugaccuucuuccaggaggucccccacgugaucgaggaggugaugaacaucguccugaucgcccucagcauccuggccgugcugaaggggcucuacaacuucgcgaccugcggcaucguggggcuggucuccuuccugcuccugugcggccgcagcugcacgaccucccuguacaaggggguguacgagcuccagacccuggagcugaacauggagacccucaacaugacgaugccgcugagcugcaccaagaacaacucccaccacuacaucauggugggcaacgagaccggccuggagcucacccugacgaacaccagcaucaucaaccacaaguucugcaaccuguccgacgcccacaagaagaaccucuacgaccacgcccugaugagcaucaucuccaccuuccaccugagcauccccaacuucaaccaguacgaggccauguccugcgacuucaacgggggcaagaucagcguccaguacaaccucucccacagcuacgccggggacgcggccaaccacugcggcaccaucgccaacggggugcugcagacguucaugcggauggccuggggcggcuccuacaucgcgcuggacagcgggugcgaccggugggacugcaucaugaccuccuaccaguaccucaucauccagaacaccaccugggaggaccacugccaguucagccgccccucccccaucggcuaccuggggcugcucagccagcggacgcgcgacaucuacaucagccggcgccgccggggcaccuucaccuggacccucuccgacagcgagggcaaggacacgcccgggggcuacugccugacccgguggaugcugaucgaggccgagcucaagugcuucgggaacaccgccguggccaagugcaacgagaagcacgacgaggaguucugcgacaugcugcgccuguucgacuucaacaagcaggccauccagcggcucaaggcgcccgcccagauguccauccagcugaucaacaaggccgucaacgcccugaucaacgaccagcucaucaugaagaaccaccuccgcgacaucaugugcauccccuacugcaacuacagcaaguacugguaccugaaccacaccacgaccgggaagaccucccugcccaagugcuggcuggugagcaacggcuccuaccugaacgagacccacuucagcgacgacaucgagcagcaggccgacaacaugaucacggagaugcuccagaaggaguacauggagcggcagggcaagaccccgcuggggcugguggaccucuucgucuucuccaccagcuucuaccugaucuccaucuuccugcaccuggugaagaucccgacccaccgccacguggucggcaagagcugccccaagccccaccggcucaaccacauggggaucugcuccugcggccuguacgggcagcccggcgugccggugaaguggaagcgcugaggacuagugcaucacauuuaaaagcaucucagccuaccaugagaauaagagaaagaaaaugaagaucaauagcuuauucaucucuuuuucuuuuucguugguguaaagccaacacccugucuaaaaaacauaaauuucuuuaaucauuuugccucuuuucucugugcuucaauuaauaaaaaauggaaagaaccuagaucuaaaaaaaaaaaaaaaaaaaaaaaaaaaaaaaaaaaaaaaaaaaaaaaaaaaaaaaaaaaaaaaaugcaucccccccccccccccccccccccccccccccaaaggcucuuuucagagccaccagaauu

SEQ ID NO: 7030 - RNA, 1858 nt, Artificial Sequence
  mRNA product Design i-2 comprising derived and/or modified sequence from MOPV/LASV reassortant(IGS-1;Clade IV)__AFY05576__GPCstabilized (opt1)
ggggcgcugccuacggagguggcagccaucuccuucucggcaucaagcuuaccaugggccagaucgugaccuucuuccaggaggucccccacgugaucgaggaggugaugaacaucguccugaucgcccucagcgugcuggccgugcugaaggggcucuacaacuucgcgaccugcggccuggucgggcuggugacguuccuccugcugugcggccgcuccugcaccaccagccucuacaaggggguguacgagcugcagacccuggagcucaacauggagacgcugaacaugaccaugccgcuguccugcaccaagaacaacagccaccacuacaucauggucggcaacgagaccggccucgagcugacgcugaccaacaccuccaucaucaaccacaaguucugcaaccucagcgacgcccacaagaagaaccuguacgaccacgcccugauguccaucaucagcaccuuccaccucuccauccccaacuucaaccaguacgaggccaugagcugcgacuucaacgggggcaagaucuccgugcaguacaaccugagccacuccuacgccggggacgcggccaaccacugcggcacgguggccaacgggguccugcagaccuucaugcggauggccuggggcggcagcuacaucgcgcucgacuccgggugcggcaacugggacugcaucaugaccagcuaccaguaccugaucauccagaacaccacgugggaggaccacugccaguucucccggcccagccccaucggguaccugggccuccugucccagcgcacccgggacaucuacaucagccgccggcgccggggcaccuucaccuggacgcugagcgacuccgagggggaggacaccccgggcggguacugccugacccgcuggaugcucaucgaggccgagcugaagugcuucggcaacaccgccguggccaagugcaacgagaagcacgacgaggaguucugcgacaugcugcggcuguucgacuucaacaagcaggccauccagcgccugaaggcgcccgcccagaugagcauccagcugaucaacaaggccgugaacgcccucaucaacgaccagcugaucaugaagaaccaccuccgggacaucaugugcauccccuacugcaacuacuccaaguacugguaccucaaccacacgaccaccggccgcaccagccugcccaagugcuggcuggucuccaacggcagcuaccucaacgagacgcacuucuccgacgacaucgagcagcaggccgacaacaugaucaccgagaugcugcagaaggaguacauggagcggcaggggaagacgccccugggccucguggaccuguucguguucagcaccuccuucuaccugaucagcaucuuccugcaccucgucaagaucccgacccaccgccacaucguggggaaguccugccccaagccccaccggcugaaccacaugggcaucugcagcugcgggcuguacaagcagcccggcgugccggucaaguggaagcgcugaggacuagugcaucacauuuaaaagcaucucagccuaccaugagaauaagagaaagaaaaugaagaucaauagcuuauucaucucuuuuucuuuuucguugguguaaagccaacacccugucuaaaaaacauaaauuucuuuaaucauuuugccucuuuucucugugcuucaauuaauaaaaaauggaaagaaccuagaucuaaaaaaaaaaaaaaaaaaaaaaaaaaaaaaaaaaaaaaaaaaaaaaaaaaaaaaaaaaaaaaaaugcaucccccccccccccccccccccccccccccccaaaggcucuuuucagagccaccagaauu

SEQ ID NO: 7031 - RNA, 1858 nt, Artificial Sequence
  mRNA product Design i-2 comprising derived and/or modified sequence from LASV(LM765-SLE-2012;Clade IV)__AIT17814__GPCstabilized (opt1)
ggggcgcugccuacggagguggcagccaucuccuucucggcaucaagcuuaccaugggccagaucgugaccuucuuccaggaggucccccacgugaucgaggaggugaugaacaucguccugaucgcccucagcauccuggccgugcugaaggggcucuacaacuucgcgaccugcggccugguggggcuggucacguuccuccugcugugcggccgcuccugcaccaccagccucuacaaggggguguacgagcugcagacccuggagcucaacauggagacgcugaacaugaccaugccgcuguccugcaccaagaacaacagccaccacuacaucauggugggcaacgagaccggccucgagcugacgcugaccaacaccuccaucaucgaccacaaguucugcaaccucagcgacgcccaccggaagaaccuguacgaccacgcccugauguccaucaucagcaccuuccaccucuccauccccaacuucaaccaguacgaggccaugagcugcgacuucaacgggggcaagaucuccguccaguacaaccugagccacuccuacgccaaggacgcggccgaccacugcgggacgguggccaacggcgugcugcagaccuucaugcgcauggccuggggcgggagcuacaucgcgcucgacuccggcugcgggcgcugggacugcaucaugaccagcuaccaguaccugaucauccagaacaccacgugggaggaccacugccaguucucccggcccagccccaucggcuaccuggggcuccugucccagcgcacccgggacaucuacaucagccgccggcgccggggcaccuucaccuggacgcugagcgacuccgagggcaaggacacccccgggggcuacugccugacccgcuggaugcucaucgaggccgagcugaagugcuucgggaacaccgccgucgccaagugcaacgagaagcacgacgaggaguucugcgacaugcugcggcuguucgacuucaacaagcaggccauccagcgccugaaggcgcccgcccagaugagcauccagcugaucaacaaggccgugaacgcccucaucaacgaccagcugaucaugaagaaccaccuccgggacaucaugugcauccccuacugcaacuacuccaaguacugguaccucaaccacacgaccaccgggaagaccagccugcccaagugcuggcugguguccaacggcagcuaccucaacgagacgcacuucuccgacgacaucgagcagcaggccgacaacaugaucaccgagaugcugcagaaggaguacauggagcgccagggcaagaccccgcuggggcucgucgaccuguucguguucagcaccuccuucuaccugaucagcaucuuccugcaccucgugaagaucccgacgcaccggcacaucgucggcaagcccugccccaagccccaccgccugaaccacauggggaucugcuccugcggccuguacaagcagccgggggugcccgugaaguggaagcggugaggacuagugcaucacauuuaaaagcaucucagccuaccaugagaauaagagaaagaaaaugaagaucaauagcuuauucaucucuuuuucuuuuucguugguguaaagccaacacccugucuaaaaaacauaaauuucuuuaaucauuuugccucuuuucucugugcuucaauuaauaaaaaauggaaagaaccuagaucuaaaaaaaaaaaaaaaaaaaaaaaaaaaaaaaaaaaaaaaaaaaaaaaaaaaaaaaaaaaaaaaaugcaucccccccccccccccccccccccccccccccaaaggcucuuuucagagccaccagaauu

SEQ ID NO: 7032 - RNA, 1858 nt, Artificial Sequence
  mRNA product Design i-2 comprising derived and/or modified sequence from LASV(LM776-SLE-2012;Clade IV)__AIT17824__GPCstabilized (opt1)
ggggcgcugccuacggagguggcagccaucuccuucucggcaucaagcuuaccaugggccagaucgugaccuucuuccaggaggucccccacgugaucgaggaggugaugaacaucguccugaucgcccucagcauccuggccgugcugaaggggcucuacaacuucgcgaccugcggccugguggggcuggucacguuccuccugcugugcggccgcuccugcaccaccagcguguacaaggggguguacgagcuccagacccuggagcugaacauggagacgcucaacaugaccaugccgcuguccugcaccaagaacaacagccaccacuacaucauggucggcaacgagaccggccuggagcucacgcugaccaacaccuccaucaucaaccacaaguucugcaaccugagcgacgcccacaagaagaaccucuacgaccacgcccugauguccaucaucagcaccuuccaccuguccauccccaacuucaaccaguacgaggccaugagcugcgacuucaacgggggcaagaucuccgugcaguacaaccucagccacuccuacgccggggacgcggccaaccacugcggcacgguggccaacgggguccugcagaccuucaugcggauggccuggggcggcagcuacaucgcgcuggacuccgggugcggcaagugggacugcaucaugaccagcuaccaguaccucaucauccagaacaccacgugggaggaccacugccaguucucccgccccagccccaucggguaccugggccugcucucccagcggacccgcgacaucuacaucagccggcgccgccggggcaccuucaccuggacgcucagcgacuccgaggggaaggacaccccgggcggguacugccugacccgguggaugcugaucgaggccgagcucaagugcuucggcaacaccgccguggccaagugcaacgagaagcacgacgaggaguucugcgacaugcugcgccuguucgacuucaacaagcaggccauccagcggcucaaggcgcccgcccagaugagcauccagcugaucaacaaggccgugaacgcccugaucaacgaccagcucaucaugaagaaccaccuccgcgacaucaugugcauccccuacugcaacuacuccaaguacugguaccugaaccacacgaccaccggcaagaccagccugcccaagugcuggcuggucuccaacggcagcuaccugaacgagacgcacuucuccgacgacaucgagcagcaggccgacaacaugaucaccgagaugcuccagaaggaguacauggagcggcaggggaagacgccccugggccugguggaccucuucguguucagcaccuccuucuaccugaucagcaucuuccugcaccuggucaagaucccgacccaccgccacaucguggggaaguccugccccaagccccaccggcucaaccacaugggcaucugcagcugcgggcuguacaagcagcccggcgugccgguccgcuggaagcggugaggacuagugcaucacauuuaaaagcaucucagccuaccaugagaauaagagaaagaaaaugaagaucaauagcuuauucaucucuuuuucuuuuucguugguguaaagccaacacccugucuaaaaaacauaaauuucuuuaaucauuuugccucuuuucucugugcuucaauuaauaaaaaauggaaagaaccuagaucuaaaaaaaaaaaaaaaaaaaaaaaaaaaaaaaaaaaaaaaaaaaaaaaaaaaaaaaaaaaaaaaaugcaucccccccccccccccccccccccccccccccaaaggcucuuuucagagccaccagaauu

SEQ ID NO: 7033 - RNA, 1858 nt, Artificial Sequence
  mRNA product Design i-2 comprising derived and/or modified sequence from LASV(Mad39;Clade IV)__ANH09722__GPCstabilized (opt1)
ggggcgcugccuacggagguggcagccaucuccuucucggcaucaagcuuaccaugggccagaucgugaccuucuuccaggaggucccccacgugaucgaggaggugaugaacaucguccugaucgcccucagcauccuggccgugcugaaggggcucuacaacguggcgaccugcggccugaucgggcuggucacguuccuccugcugugcggccgcuccugcaccaccacccucuacaaggggguguacgagcugcaggcccuggagcucaacauggagacgcugaacaugaccaugccgcugagcugcaccaagaacaacucccaccacuacauccgggugggcaacgagaccggccucgagcugacgcugaccaacaccagccucaucaaccacaaguucugcaaccuguccgacgcccacaagaagaaccuguacgaccacgcccucaugagcaucaucuccaccuuccaccugagcauccccaacuucaaccaguacgaggccauguccugcgacuucaacgacgggaagaucagcguccaguacaaccugucccacacguacgcgggcgacaccgccaaccacugcgggaccguggccaacggcgugcuccagaccuucaugcgcauggccuggggcgggagcuacaucgcgcuggacuccggcugcgggggcugggacugcaucaugacgagcuaccaguaccugaucauccagaacaccaccugggaggaccacugccaguucucccggcccagccccaucggguaccucggccugcugucccagcggacccgcgacaucuacaucagccggcgccgccggggcacguucaccuggacccuguccgacagcgaggggaaggacaccccgggcggguacugccucacgcgguggaugcugaucgaggccgagcugaagugcuucggcaacaccgccgucgccaagugcaacgagaagcacgacgaggaguucugcgacaugcuccgccuguucgacuucaacaagcaggccauccagcggcugaaggcgcccgcccagaugagcauccagcucaucaacaaggccgugaacgcccugaucaacgaccagcugaucaugaagaaccaccuccgcgacaucaugugcauccccuacugcaacuacuccaaguacugguaccugaaccacaccgugaccggcaagacgagccugcccaagugcuggcucgucuccaacggcagcuaccugaacgagacccacuucuccgacgacaucgagcagcaggccgacaacaugaucaccgagaugcugcagaaggaguacauggagcggcaggggaagacgccccucggccugguggaccuguucguguucagcaccuccuucuaccugaucagcaucuuccuccaccuggucaagaucccgacccaccgccacgugguggggaagcccugccccaagccccaccggcugaaccacaugggcaucugcuccugcggguucuacaagcagccgggcguccccgugcgcuggaagcggugaggacuagugcaucacauuuaaaagcaucucagccuaccaugagaauaagagaaagaaaaugaagaucaauagcuuauucaucucuuuuucuuuuucguugguguaaagccaacacccugucuaaaaaacauaaauuucuuuaaucauuuugccucuuuucucugugcuucaauuaauaaaaaauggaaagaaccuagaucuaaaaaaaaaaaaaaaaaaaaaaaaaaaaaaaaaaaaaaaaaaaaaaaaaaaaaaaaaaaaaaaaugcaucccccccccccccccccccccccccccccccaaaggcucuuuucagagccaccagaauu

SEQ ID NO: 7034 - RNA, 1858 nt, Artificial Sequence
  mRNA product Design i-2 comprising derived and/or modified sequence from LASV(Z0947-SLE-2011;Clade IV)__AIT17840__GPCstabilized (opt1)
ggggcgcugccuacggagguggcagccaucuccuucucggcaucaagcuuaccaugggccagaucgugaccuucuuccaggaggucccccacgugaucgaggaggugaugaacaucguccugaucgcccucagcauccuggccgugcugaaggggcucuacaacuucgcgaccugcggccugguggggcuggucacguuccuccugcugugcggccgcuccugcaccaucagccucuacaaggggguguacgagcugcagacccuggagcucaacauggagacccugaacaugacgaugccgcuguccugcaccaagaacaacagccaccacuacaucauggugggcaacgagaccggccucgagcugacccugacgaacaccuccaucaucaaccacaaguucugcaaccucagcgacgcccacaagaagaaccuguacgaccacgcccugauguccaucaucagcaccuuccaccucuccauccccaacuucaaccaguacgaggccaugagcugcgacuucaacgggggcaagaucuccguccaguacaaccugagccacuccuacgccggggacgcggccaaccacugcggcaccguggccaacggggugcugcagacguucaugcggauggccuggggcggcagcuacaucgcgcucgacuccgggugcgaccggugggacugcaucaugaccagcuaccaguaccugaucauccagaacaccaccugggaggaccacugccaguucucccgccccagccccaucggcuaccuggggcuccugucccagcggacgcgcgacaucuacaucagccggcgccgccggggcaccuucaccuggacccugagcgacuccgagggcaaggacacgcccgggggcuacugccugacccgguggaugcucaucgaggccgagcugaagugcuucgggaacaccgccgucgccaagugcaacgagaagcacgacgaggaguucugcgacaugcugcgccucuucgacuucaacaagcaggccauccagcggcugaaggcgcccgcccagaugagcauccagcugaucaacaaggccgugaacgcccucaucaacgaccagcugaucaugaagaaccaccuccgcgacaucaugugcauccccuacugcaacuacuccaaguacugguaccugaaccacaccacgaccgggaagaccagccugcccaagugcuggcugguguccaacggcagcuaccucaacgagacccacuucuccgacgacaucgagcagcaggccgacaacaugaucacggagaugcugcagaaggaguacauggagcggcagggcaagaccccgcuggggcucgucgaccuguucguguucagcaccuccuucuaccugaucagcaucuuccugcaccucgugaagaucccgacccaccgccacaucgucggcaagcccugccccaagccccaccggcugaaccacauggggaucugcuccugcggccuguacaagcagccgggggugcccgugaaguggaagcgcugaggacuagugcaucacauuuaaaagcaucucagccuaccaugagaauaagagaaagaaaaugaagaucaauagcuuauucaucucuuuuucuuuuucguugguguaaagccaacacccugucuaaaaaacauaaauuucuuuaaucauuuugccucuuuucucugugcuucaauuaauaaaaaauggaaagaaccuagaucuaaaaaaaaaaaaaaaaaaaaaaaaaaaaaaaaaaaaaaaaaaaaaaaaaaaaaaaaaaaaaaaaugcaucccccccccccccccccccccccccccccccaaaggcucuuuucagagccaccagaauu

SEQ ID NO: 7035 - RNA, 1858 nt, Artificial Sequence
  mRNA product Design i-2 comprising derived and/or modified sequence from LASV(Josiah;Clade IV)__NP_694870__GPCstabilized (opt1)
ggggcgcugccuacggagguggcagccaucuccuucucggcaucaagcuuaccaugggccagaucgugaccuucuuccaggaggucccccacgugaucgaggaggugaugaacaucguccugaucgcccucagcgugcuggccgugcugaaggggcucuacaacuucgcgaccugcggccuggucgggcuggugacguuccuccugcugugcggccgcuccugcaccaccagccucuacaaggggguguacgagcugcagacccuggagcucaacauggagacgcugaacaugaccaugccgcuguccugcaccaagaacaacagccaccacuacaucauggucggcaacgagaccggccucgagcugacgcugaccaacaccuccaucaucaaccacaaguucugcaaccucagcgacgcccacaagaagaaccuguacgaccacgcccugauguccaucaucagcaccuuccaccucuccauccccaacuucaaccaguacgaggccaugagcugcgacuucaacgggggcaagaucuccgugcaguacaaccugagccacuccuacgccggggacgcggccaaccacugcggcacgguggccaacgggguccugcagaccuucaugcggauggccuggggcggcagcuacaucgcgcucgacuccgggugcggcaacugggacugcaucaugaccagcuaccaguaccugaucauccagaacaccacgugggaggaccacugccaguucucccgccccagccccaucggguaccugggccuccugucccagcggacccgcgacaucuacaucagccggcgccggcgcggcaccuucaccuggacgcugagcgacuccgaggggaaggacaccccgggcggguacugccucacccgguggaugcugaucgaggccgagcugaagugcuucggcaacaccgccguggccaagugcaacgagaagcacgacgaggaguucugcgacaugcuccgccuguucgacuucaacaagcaggccauccagcggcugaaggcgcccgcccagaugagcauccagcucaucaacaaggccgugaacgcccugaucaacgaccagcugaucaugaagaaccaccuccgcgacaucaugugcauccccuacugcaacuacuccaaguacugguaccugaaccacacgaccaccgggcggaccagccugcccaagugcuggcucgucuccaacggcagcuaccugaacgagacgcacuucuccgacgacaucgagcagcaggccgacaacaugaucaccgagaugcugcagaaggaguacauggagcgccagggcaagaccccgcucgggcugguggaccuguucguguucagcaccuccuucuaccucaucagcaucuuccugcaccuggucaagauccccacgcaccggcacaucgugggcaaguccugccccaagccccaccgccugaaccacauggggaucugcagcugcggccucuacaagcagccgggggugcccgucaaguggaagcggugaggacuagugcaucacauuuaaaagcaucucagccuaccaugagaauaagagaaagaaaaugaagaucaauagcuuauucaucucuuuuucuuuuucguugguguaaagccaacacccugucuaaaaaacauaaauuucuuuaaucauuuugccucuuuucucugugcuucaauuaauaaaaaauggaaagaaccuagaucuaaaaaaaaaaaaaaaaaaaaaaaaaaaaaaaaaaaaaaaaaaaaaaaaaaaaaaaaaaaaaaaaugcaucccccccccccccccccccccccccccccccaaaggcucuuuucagagccaccagaauu

SEQ ID NO: 7036 - RNA, 1855 nt, Artificial Sequence
  mRNA product Design i-2 comprising derived and/or modified sequence from LASV(LP;Clade I)__AAF86701__GPCstabilized (opt1)
ggggcgcugccuacggagguggcagccaucuccuucucggcaucaagcuuaccaugggccagaucaucaccuucuuccaggaggugccccacgucaucgaggaggugaugaacaucgugcugaucgcccucagccugcuggccauccucaaggggcuguacaacaucgcgaccugcggcaucaucgggcuggucgccuuccucuuccugugcggcaaguccugcagccugacgcucaagggcggguacgagcugcagacccuggagcucaacauggagacccugaacaugaccaugccgcuguccugcacgaagaacagcucccaccacuacauccgcgugggcaacgagaccgggcucgagcugacccugaccaacacgagcaucaucaaccacaaguucugcaaccucuccgacgcccacaagaagaaccuguacgaccacgcccugaugagcaucaucuccaccuuccaccucagcauccccaacuucaaccaguacgaggccauguccugcgacuucaacggcgggaagaucagcgugcaguacaaccugucccacagcuacgcgggcgacgccgccgagcacugcgggaccgucgccaacggcgugcugcagaccuucaugcggauggcguggggcgggcgcuacaucgcccucgacuccggcugcgggaacugggacugcaucaugacgagcuaccaguaccugaucauccagaacaccaccugggaggaccacugccaguucucccggcccagccccaucggcuaccugggccuccugucccagcgcacccgggacaucuacaucagccgccggcgccgggggacguucaccuggacccugagcgacuccgagggcaacgagacccccgggggcuacugccucacgcgcuggaugcugaucgaggccgagcugaagugcuucgggaacaccgccguggccaagugcaacgagaagcacgacgaggaguucugcgacaugcuccggcuguucgacuucaacaagcaggcgauccgccggcugaaggccccggcccagaugagcauccagcucaucaacaaggccgucaacgcccugaucaacgaccagcugaucaugaagaaccaccuccgcgacaucaugugcauccccuacugcaacuacuccaaguacugguaccugaaccacaccagcuccggccggaccagccugcccaagugcuggcucaucuccaacggcagcuaccugaacgagacgcaguucuccgacgacaucgagcagcaggcggacaacaugaucaccgagaugcugcagaaggaguacaucgagcgccaggggaagaccccgcucggccugguggacaucuucaucuucagcaccuccuucuaccugaucagcaucuuccuccaccugaucaagauccccacgcaccggcacaucguggggaagcccugccccaagccgcaccgccugaaccacaugggcgucugcuccugcgggcuguacaagcaccccggcgugcccaccaaguggaagcggugaggacuagugcaucacauuuaaaagcaucucagccuaccaugagaauaagagaaagaaaaugaagaucaauagcuuauucaucucuuuuucuuuuucguugguguaaagccaacacccugucuaaaaaacauaaauuucuuuaaucauuuugccucuuuucucugugcuucaauuaauaaaaaauggaaagaaccuagaucuaaaaaaaaaaaaaaaaaaaaaaaaaaaaaaaaaaaaaaaaaaaaaaaaaaaaaaaaaaaaaaaaugcaucccccccccccccccccccccccccccccccaaaggcucuuuucagagccaccagaauu

SEQ ID NO: 7037 - RNA, 1855 nt, Artificial Sequence
  mRNA product Design i-2 comprising derived and/or modified sequence from LASV(803213;Clade II)__AAF86703__GPCstabilized (opt1)
ggggcgcugccuacggagguggcagccaucuccuucucggcaucaagcuuaccaugggccagaucaucaccuucuuccaggaggugccccacgucaucgaggaggugaugaacaucgugcugaucgcccucagccugcuggccauccucaaggggaucuacaacgucgcgaccugcggccuguucgggcugaucuccuuccuccugcugugcggccgcagcugcuccgugacguacaaggggguguacgagcuccagacccuggagcugaacauggccaaccucaacaugaccaugccgcugagcugcaccaagaacaacucccaccacuacaucauggucggcaacgagacgggccuggagcucacccugaccaacaccagcaucaucaaccacaaguucugcaaccuguccgacgcccacaagaagaaccucuacgaccacgcccugaugagcaucaucuccacguuccaccugagcauccccaacuucaaccaguacgaggccauguccugcgacuucaacgggggcaagaucagcgugcaguacaaccucucccacagcuucgcgguggacgccgccaaccacugcgggaccaucgccaacggcguccugcagaccuucaugcggauggcguggggcggguccuacaucgcccuggacagcggcugcgggaacugggacugcaucaugaccuccuaccaguaccucaucauccagaacacgaccugggaggaccacugccaguucagccgccccucccccaucggcuaccuggggcugcucagccagcggacccgcgacaucuacaucagccggcgccggcgcggcaccuucacguggacccuguccgacagcgagggcaacgaggcccccgggggcuacugccugacccgguggaugcucaucgaggccgagcugaagugcuucgggaacaccgccguggcgaagugcaacgagaagcacgacgaggaguucugcgacaugcugcgccucuucgacuucaacaagcaggccaucaagcggcugaagacgccggcccagauguccauccagcugaucaacaaggccgugaacgcccucaucaacgaccagcugaucaugaagaaccaccuccgcgacaucaugugcauccccuacugcaacuacagccgguacugguaccugaaccacaccgucaccggcaagaccucccugccccgcugcuggcuggugagcaacggguccuaccucaacgagacgcacuucagcgacgacaucgagcagcaggcggacaacaugaucaccgagaugcugcagaaggaguacauggaccggcagggcaagaccccgcugggccucguggaccuguucgucuucuccaccagcuucuaccugaucuccaucuuccuccaccuggugaagauccccacgcaccgccacaucguggggaagcccugccccaagccgcaccggcugaaccacaugggcaucugcagcugcgggcuguacaagcaccccggcguccccgugaaguggaagcgcugaggacuagugcaucacauuuaaaagcaucucagccuaccaugagaauaagagaaagaaaaugaagaucaauagcuuauucaucucuuuuucuuuuucguugguguaaagccaacacccugucuaaaaaacauaaauuucuuuaaucauuuugccucuuuucucugugcuucaauuaauaaaaaauggaaagaaccuagaucuaaaaaaaaaaaaaaaaaaaaaaaaaaaaaaaaaaaaaaaaaaaaaaaaaaaaaaaaaaaaaaaaugcaucccccccccccccccccccccccccccccccaaaggcucuuuucagagccaccagaauu

SEQ ID NO: 7038 - RNA, 1855 nt, Artificial Sequence
  mRNA product Design i-2 comprising derived and/or modified sequence from LASV(GA391;Clade III)__CAA36645__GPCstabilized (opt1)
ggggcgcugccuacggagguggcagccaucuccuucucggcaucaagcuuaccaugggccagaucgugaccuucuuccaggaggucccccacgugaucgaggaggugaugaacaucguccugaucgcccucagcauccuggccauccugaaggggcucuacaacguggcgaccugcggccugaucgggcuggugacguuccuccugcuguccggccgcagcugcucccucaucuacaaggggaccuacgagcugcagacccuggagcucaacauggagacccugaacaugacgaugccgcugagcugcaccaagaacaacucccaccacuacauccgggucggcaacgagaccggccucgagcugacccugacgaacaccagcauccucaaccacaaguucugcaaccuguccgacgcccacaagcgcaaccuguacgaccacagccucauguccaucaucagcaccuuccaccuguccauccccaacuucaaccaguacgaggccaugagcugcgacuucaacgggggcaagaucaccgugcaguacaaccugucccacagcuucgccguggacgccgcggggcacugcggcacgcucgccaacgggguccugcagaccuucaugcggauggccuggggcggcuccuacaucgcccuggacagcgggugcggcaacugggacugcaucaugaccuccuaccaguaccucaucauccagaacaccacgugggacgaccacugccaguucagccgccccucccccaucggguaccugggccugcucagccagcggacccgcgacaucuacaucagccggcgccggcgcggcaccuucaccuggacgcuguccgacagcgaggggaacgagaccccgggcggguacugccugacccgguggaugcucaucgaggcggagcugaagugcuucggcaacaccgccguggccaagugcaacgagaagcacgacgaggaguucugcgacaugcugcgccucuucgacuucaacaagcaggccauccggcgccugaagacgcccgcccagauguccauccagcugaucaacaaggcggugaacgcccucaucaacgaccagcugaucaugaagaaccaccuccgggacaucaugugcauccccuacugcaacuacagccgcuacugguaccugaaccacaccuccaccgggaagaccagccugccccggugcuggcugaucuccaacggcagcuaccucaacgagacgaaguucuccgacgacaucgagcagcaggccgacaacaugaucaccgagaugcugcagaaggaguacaucgaccgccagggcaagaccccgcuggggcucgucgaccuguucguguucagcaccuccuucuaccugaucagcaucuuccugcaccucgugaagauccccacgcaccggcacaucgucggcaagcccugccccaagccgcaccgccugaaccacauggggaucugcuccugcggccuguacaagcagcccggggugcccgugcgguggaagcgcugaggacuagugcaucacauuuaaaagcaucucagccuaccaugagaauaagagaaagaaaaugaagaucaauagcuuauucaucucuuuuucuuuuucguugguguaaagccaacacccugucuaaaaaacauaaauuucuuuaaucauuuugccucuuuucucugugcuucaauuaauaaaaaauggaaagaaccuagaucuaaaaaaaaaaaaaaaaaaaaaaaaaaaaaaaaaaaaaaaaaaaaaaaaaaaaaaaaaaaaaaaaugcaucccccccccccccccccccccccccccccccaaaggcucuuuucagagccaccagaauu

SEQ ID NO: 7039 - RNA, 1858 nt, Artificial Sequence
  mRNA product Design i-2 comprising derived and/or modified sequence from LASV(AV;Clade V)__CCA30314__GPCstabilized (opt1)
ggggcgcugccuacggagguggcagccaucuccuucucggcaucaagcuuaccaugggccagaucgugaccuucuuccaggaggucccccacgugaucgaggaggugaugaacaucguccugaucgcccucagcauccuggccgugcugaaggggcucuacaacaucgcgaccugcggccugaucgggcugaucacguuccuccugcugugcggccgcuccugcagcuccaaccucuacaaggggguguacgagcugcagagccuggaccucaacauggagacccugaacaugaccaugccgcuguccugcaccaagaacaacagccaccacuacauccgggucggcaacgacacgggccucgagcugacccugaccaacaccuccauccucaaccacaaguucugcaaccugagcgacgcccacaagaaggaccuguacgaccacgcccucauguccaucaucagcacguuccaccuguccauccccaacuucaaccaguacgaggccaugagcugcgacuucaacgggggcaagaucuccgugcaguacaaccugagccacuccuacgccaucgacgcggccaaccacugcgggaccguggccaacggcauccuccagaccuucaugcgcauggccuggggcgggagcuacaucgcgcuggacuccggcugcgggaacugggacugcaucaugaccagcuaccaguaccugaucauccagaacacgaccugggagaaccacugccaguucucccggcccagccccaucggcuaccucgggcugcugagccagcgcacccgggacaucuacaucucccgccggcgccggggcaccuucacguggacccucagcgacuccgagggcaacgccacccccgggggcuacugccugacccgcuggaugcugaucgaggccgagcucaagugcuucgggaacacggccgucgccaagugcaacgagaagcacgacgaggaguucugcgacaugcugcggcuguucgacuucaacaagcaggcgaucagccgccucaaguccccggcccagaugagcauccagcugaucaacaaggccgugaacgcccugaucaacgaccagcucaucaugaagaaccaccuccgggacaucaugugcauccccuacugcaacuacuccaaguacugguaccugaaccacaccaucaccggcaagaccagccugcccaagugcuggcugguguccaacgggagcuaccugaacgagacgcacuucuccgacgacaucgagcagcaggccgacaacaugaucaccgagaugcuccagaaggaguacauggagcgccagggcaagaccccgcugggccuggucgaccucuucguguucagcaccuccuucuaccugaucagcaucuuccugcggcuggugaagauccccacgcaccgccacaucgucgggaagcccugccccaagccgcaccggcucaaccacaugggcaucugcuccugcgggcuguacaagcagcccggcgugcccgugcgcuggaagcggugaggacuagugcaucacauuuaaaagcaucucagccuaccaugagaauaagagaaagaaaaugaagaucaauagcuuauucaucucuuuuucuuuuucguugguguaaagccaacacccugucuaaaaaacauaaauuucuuuaaucauuuugccucuuuucucugugcuucaauuaauaaaaaauggaaagaaccuagaucuaaaaaaaaaaaaaaaaaaaaaaaaaaaaaaaaaaaaaaaaaaaaaaaaaaaaaaaaaaaaaaaaugcaucccccccccccccccccccccccccccccccaaaggcucuuuucagagccaccagaauu

SEQ ID NO: 7040 - RNA, 1855 nt, Artificial Sequence
  mRNA product Design i-2 comprising derived and/or modified sequence from LASV(Togo/2016/7082;Clade VI)__AMR44577__GPCstabilized (opt1)
ggggcgcugccuacggagguggcagccaucuccuucucggcaucaagcuuaccaugggccagaucaucaccuucuuccaggaggugccccacgucaucgaggaggugaugaacaucgugcugaucgcccucagccugcuggccauccucaagggggucuacaacguggcgaccugcggcaucaucgggcuggugacguuccuguuccucugcggccgcuccugcagccugaucuacaagggguccuacgagcugcagacccucgagcugaacauggagacccugaacaugaccaugccgcucagcugcacgaagaacuccagccaccacuacauccgggucggcaacgagaccggccuggagcugacccucaccaacacguccaucaucaaccacaaguucugcaaccugagcgacgcccacaagcgcaaccuguacgaccacgcccucauguccauccugagcaccuuccaccuguccauccccaacuucaaccaguacgaggccaugagcugcgacuucaacgggggcaagaucuccgugcaguacaaccucagccacgccuacgcgguggacgccgccgagcacugcgggaccgucgccaacggcgugcugcagaccuucaugcggauggcguggggcggguccuacaucgcccuggacagcggcugcgggaacugggacugcaucaugacguccuaccaguaccucaucauccagaacaccaccugggaggaccacugccaguucagccgccccucccccaucggcuaccuggggcugcucagccagcggacccgcgacaucuacaucagccggcgccggcgcggcacguucaccuggacccuguccgacagcgagggcaacgagacccccgggggcuacugccugacgcgguggaugcucaucgaggccgagcugaagugcuucgggaacaccgccguggccaagugcaacgagaagcacgacgaggaguucugcgacaugcugcgccucuucgacuucaacaagcaggcgauccagcggcugaaguccccggcccagaugagcauccagcugaucaacaaggccgucaacgcccucaucaacgaccagcugaucaugaagaaccaccuccgcgacaugaugugcauccccuacugcaacuacuccaaguacugguaccugaaccacaccagcuccggccggaccagccugcccaagugcuggcugguguccaacgggagcuaccucaacgagacgcacuucuccgacgacaucgagcagcaggccgacaacaugaucaccgagaugcugcagaaggaguacaucgaccgccagggcaagaccccgcugggccucguggaccuguucgucuucagcaccuccuucuaccugaucagcaucuuccuccaccugaucaagauccccacgcaccggcacaucguggggaagcccugccccaagccgcaccgccugaaccacaugggcaucugcuccugcgggcuguacaagcagcccggcgugcccacccgguggaagcgcugaggacuagugcaucacauuuaaaagcaucucagccuaccaugagaauaagagaaagaaaaugaagaucaauagcuuauucaucucuuuuucuuuuucguugguguaaagccaacacccugucuaaaaaacauaaauuucuuuaaucauuuugccucuuuucucugugcuucaauuaauaaaaaauggaaagaaccuagaucuaaaaaaaaaaaaaaaaaaaaaaaaaaaaaaaaaaaaaaaaaaaaaaaaaaaaaaaaaaaaaaaaugcaucccccccccccccccccccccccccccccccaaaggcucuuuucagagccaccagaauu

SEQ ID NO: 7041 - RNA, 1855 nt, Artificial Sequence
  mRNA product Design i-2 comprising derived and/or modified sequence from LASV(KAK-428;Clade n.d. (VII))__ANH09740__GPCstabilized (opt1)
ggggcgcugccuacggagguggcagccaucuccuucucggcaucaagcuuaccaugggccagaucgugaccuucuuccaggaggucccccacgugaucgaggaggugaugaacaucguccugaucgcccucagccugcuggccauccucaaggggcuguacaacuucgcgaccugcggcgugaucgggcugaucacguuccuccugcugugcggccgcuccugcagcgccaccuacaaggggcaguacgagcuccagacccuggagcugaacauggagucccucaacaugaccaugccgcugagcugcacgaagaacaacucccaccacuacauccgggccggcaacaacaccggccuggagcucacccugaccaacacgagcaucaucucccacaaguucugcaaccugagcgacgcccacaagaagaaccucuacgaccacacccugauguccaucaucaccaccuuccaccugagcauccccaacuucaaccaguacgaggccauguccugcgacuucaacgggggcaagaucagcauccaguacaaccucucccacagcuacgcgggggacgccgcccagcacugcggcacgguggccaacgggguccugcagaccuucaugcgcauggcguggggcggcuccuaccuggcccucgacagcgggugccggggcugggacugcaucaucuccagcuaccaguaccugaucauccagaacaccaccugggacgaccacugccaguucucccgccccagccccaucggguaccugggcuucgugagccagaagacgcgggacaucuacaucucccgccggcgccggggcaccuucaccuggacccucagcgacuccgaggggcacgacaugccgggcggguacugccugacgcgcuggaugcugaucgaggccgaccucaagugcuucggcaacaccgccguggccaagugcaacgagaagcacgacgaggaguucugcgacauguggcggcuguucgacuucaacaagcaggcgauccagcgccugaaggcccccgcccagaugaacauccagcucaucaacaaggccgucaacgcccugaucaacgaccagcugaugaugaagaaccaccuccgggacaucaugugcauccccuacugcaacuacagcaaguucugguaccugaacaacaccaccacggggcgcaccucccugccccggugcuggcucaucagcaacggcuccuaccugaacgagacccacuucagcgacgacaucgagcagcaggcggacaacaugaucaccgagaugcugcagaaggaguacauggaccgccagggcaagacgccgcucgggcugguggaccuguucguguucuccaccagcuucuaccucaucaccaucuuccugcaccuggucaagauccccacccaccggcacaucgugggcaagcccugccccaagccgcaccgccucaaccacauggggaucugcuccugcggccuguacaagcagcccggggugcccguccgguggaagcgcugaggacuagugcaucacauuuaaaagcaucucagccuaccaugagaauaagagaaagaaaaugaagaucaauagcuuauucaucucuuuuucuuuuucguugguguaaagccaacacccugucuaaaaaacauaaauuucuuuaaucauuuugccucuuuucucugugcuucaauuaauaaaaaauggaaagaaccuagaucuaaaaaaaaaaaaaaaaaaaaaaaaaaaaaaaaaaaaaaaaaaaaaaaaaaaaaaaaaaaaaaaaugcaucccccccccccccccccccccccccccccccaaaggcucuuuucagagccaccagaauu

SEQ ID NO: 7042 - RNA, 1855 nt, Artificial Sequence; identical to SEQ ID NO: 7036
  mRNA product Design i-2 comprising derived and/or modified sequence from LASV(Pinneo-NIG-1969;Clade I)__AIT17836__GPCstabilized (opt1)

SEQ ID NO: 7043 - RNA, 1855 nt, Artificial Sequence
  mRNA product Design i-2 comprising derived and/or modified sequence from LASV(ISTH0009-NIG-2011;Clade II)__AIT17404__GPCstabilized (opt1)
ggggcgcugccuacggagguggcagccaucuccuucucggcaucaagcuuaccaugggccagaucaucaccuucuuccaggaggugccccacgucaucgaggaggugaugaacaucgugcugaucgcccucagccugcuggccauccucaaggggaucuacaacgucgcgaccugcggccuguucgggcugguguccuuccuccugcugugcggccgcagcugcuccacgaccuacaaggggguguacgagcuccagacccuggagcuggacauggccagccucaacaugaccaugccgcuguccugcacgaagaacaacagccaccacuacaucauggucggcaacgagaccggccuggagcucacccugaccaacacguccaucaucaaccacaaguucugcaaccugagcgacgcccacaagaagaaccucuacgaccacgcccugauguccaucaucagcaccuuccaccuguccauccccaacuucaaccaguacgaggccaugagcugcgacuucaacgggggcaagaucuccgugcaguacaaccucagccacgcguacgccguggacgccgccaaccacugcgggaccaucgcgaacggcguccugcagaccuucaugcggauggccuggggcggguccuacaucgcccuggacagcggcugcggguccugggacugcaucaugacgagcuaccaguaccucaucauccagaacaccaccugggaggaccacugccaguucucccgccccagccccaucggcuaccuggggcugcucagccagcggacccgcgacaucuacaucucccggcgccggcgcggcacguucaccuggacccugagcgacuccgagggcaacgagacccccgggggcuacugccugacgcgguggaugcucaucgaggccgagcugaagugcuucgggaacaccgccguggcgaagugcaacgagaagcacgacgaggaguucugcgacaugcugcgccucuucgacuucaacaagcaggccauccggcgccugaagaccccggcccagaugagcauccagcugaucaacaaggccgugaacgcccucaucaacgaccagcugaucaugaagaaccaccuccgggacaucaugugcauccccuacugcaacuacuccaaguacugguaccugaaccacaccgucacgggcaagaccagccugccccgcugcuggcugguguccaacgggagcuaccucaacgagacccacuucuccgacgacaucgagcagcaggcggacaacaugaucaccgagcugcugcagaaggaguacauggaccggcagggcaagacgccgcucggccugguggaccuguucgucuucagcaccuccuucuaccucaucagcaucuuccugcaccugaucaagauccccacccaccgccacaucaccgggaagcccugccccaagccgcaccggcugaaccacaugggcaucugcuccugcgggcucuacaagcaccccggcgugcccgugaaguggaagcgcugaggacuagugcaucacauuuaaaagcaucucagccuaccaugagaauaagagaaagaaaaugaagaucaauagcuuauucaucucuuuuucuuuuucguugguguaaagccaacacccugucuaaaaaacauaaauuucuuuaaucauuuugccucuuuucucugugcuucaauuaauaaaaaauggaaagaaccuagaucuaaaaaaaaaaaaaaaaaaaaaaaaaaaaaaaaaaaaaaaaaaaaaaaaaaaaaaaaaaaaaaaaugcaucccccccccccccccccccccccccccccccaaaggcucuuuucagagccaccagaauu

SEQ ID NO: 7044 - RNA, 1855 nt, Artificial Sequence
  mRNA product Design i-2 comprising derived and/or modified sequence from LASV(ISTH2010-NIG-2012;Clade II)__AIT17482__GPCstabilized (opt1)
ggggcgcugccuacggagguggcagccaucuccuucucggcaucaagcuuaccaugggccagaucaucaccuucuuccaggaggugccccacgucaucgaggaggugaugaacaucgugcugaucgcccucagccugcuggccauccucaaggggaucuacaacgucgcgaccugcggccuguucgggcugguguccuuccuccugcugugcggccgcagcugcuccacgaccuacaaggggguguacgagcuccagacccuggagcuggacauggccagccucaacaugaccaugccgcuguccugcacgaagaacaacagccaccacuacaucauggucggcaacgagaccggccuggagcucacccugaccaacacguccaucaucaaccacaaguucugcaaccugagcgacgcccacaagaagaaccucuacgaccacgcccugauguccaucaucagcaccuuccaccuguccauccccaacuucaaccaguacgaggccaugagcugcgacuucaacgggggcaagaucuccgugcaguacaaccucagccacgcguacgccguggacgccgccaaccacugcgggaccaucgcgaacggcguccugcagaccuucaugcggauggccuggggcggguccuacaucgcccuggacagcggcugcggguccugggacugcaucaugacgagcuaccaguaccucaucauccagaacaucaccugggaggaccacugccaguucucccgccccagccccaucggcuaccuggggcugcucagccagcggacccgcgacaucuacaucucccggcgccggcgcggcaccuucacguggacccugagcgacuccgagggcaacgagacccccgggggcuacugccugacccgguggaugcucaucgaggccgagcugaagugcuucgggaacacggccguggcgaagugcaacgagaagcacgacgaggaguucugcgacaugcugcgccucuucgacuucaacaagcaggccauccggcgccugaagaccccggcccagaugagcauccagcugaucaacaaggccgugaacgcccucaucaacgaccagcugaucaugaagaaccaccuccgggacaucaugugcauccccuacugcaacuacuccaaguacugguaccugaaccacaccgucaccggcaagacgagccugccccgcugcuggcugguguccaacgggagcuaccucaacgagacccacuucuccgacgacaucgagcagcaggcggacaacaugaucaccgagcugcugcagaaggaguacaucgaccggcagggcaagaccccgcucggccugguggaccuguucgucuucagcacguccuucuaccucaucagcaucuuccugcaccuggugaagauccccacccaccgccacguggucgggaagcccugccccaagccgcaccggcugaaccacaugggcaucugcuccugcgggcucuacaagcaccccggcgugcccgugaaguggaagcgcugaggacuagugcaucacauuuaaaagcaucucagccuaccaugagaauaagagaaagaaaaugaagaucaauagcuuauucaucucuuuuucuuuuucguugguguaaagccaacacccugucuaaaaaacauaaauuucuuuaaucauuuugccucuuuucucugugcuucaauuaauaaaaaauggaaagaaccuagaucuaaaaaaaaaaaaaaaaaaaaaaaaaaaaaaaaaaaaaaaaaaaaaaaaaaaaaaaaaaaaaaaaugcaucccccccccccccccccccccccccccccccaaaggcucuuuucagagccaccagaauu

SEQ ID NO: 7045 - RNA, 1855 nt, Artificial Sequence
  mRNA product Design i-2 comprising derived and/or modified sequence from LASV(Lassa virus/H.sapiens-wt/NGA/2015/ISTH_0543;Clade II)__AVO03639__GPCstabilized (opt1)
ggggcgcugccuacggagguggcagccaucuccuucucggcaucaagcuuaccaugggccagaucaucaccuucuuccaggaggugccccacgucaucgaggaggugaugaacaucgugcugaucgcccucagccugcuggccauccucaaggggaucuacaacgucgcgaccugcggccuguucgggcugguguccuuccuccugcugugcggccgcagcugcuccacgaccuacaaggggguguacgagcuccagacccuggagcuggacauggccaaccucaacaugaccaugccgcugagcugcacgaagaacaacucccaccacuacaucauggucggcaacgagaccggccuggagcucacccugaccaacacgagcaucaucaaccacaaguucugcaaccuguccgacgcccacaagaagaaccucuacgaccacgcccugaugagcaucaucuccaccuuccaccugagcauccccaacuucaaccaguacgaggccauguccugcgacuucaacgggggcaagaucagcgugcaguacaaccucucccacaccuacgcgguggacgccgccaaccacugcgggaccaucgccaacggcguccugcagacguucaugcggauggcguggggcgggagcuacaucgcccuggacuccggcugcgggagcugggacugcaucaugaccuccuaccaguaccucgugauccagaacaccaccugggaggaccacugccaguucagccgccccucccccaucggcuaccuggggcugcucagccagcggacgcgcgacaucuacaucagccggcgccggcgcggcaccuucaccuggacccuguccgacagcgagggcaacgagacgcccgggggcuacugccugacccgguggaugcucaucgaggccgagcugaagugcuucgggaacaccgccguggccaagugcaacgagaagcacgacgaggaguucugcgacaugcugcgccucuucgacuucaacaagcaggcgauccggcgccugaagaccccggcccagauguccauccagcugaucaacaaggccgucaacgcccucaucaacgaccagcugaucaugaagaaccaccuccgggacaucaugugcauccccuacugcaacuacagcaaguacugguaccugaaccacacggugaccggcaagaccucccugccccgcugcuggcuggugagcaacggguccuaccucaacgagacccacuucagcgacgacaucgagcagcaggccgacaacaugaucacggagcugcugcagaaggaguacaucgaccggcagggcaagaccccgcucggccuggucgaccuguucguguucuccaccagcuucuaccucaucuccaucuuccugcaccuggugaagauccccacccaccgccacaucacggggaagcccugccccaagccgcaccggcugaaccacaugggcaucugcagcugcgggcucuacaagcaccccggcguccccgugaaguggaagcgcugaggacuagugcaucacauuuaaaagcaucucagccuaccaugagaauaagagaaagaaaaugaagaucaauagcuuauucaucucuuuuucuuuuucguugguguaaagccaacacccugucuaaaaaacauaaauuucuuuaaucauuuugccucuuuucucugugcuucaauuaauaaaaaauggaaagaaccuagaucuaaaaaaaaaaaaaaaaaaaaaaaaaaaaaaaaaaaaaaaaaaaaaaaaaaaaaaaaaaaaaaaaugcaucccccccccccccccccccccccccccccccaaaggcucuuuucagagccaccagaauu

SEQ ID NO: 7046 - RNA, 1855 nt, Artificial Sequence
  mRNA product Design i-2 comprising derived and/or modified sequence from LASV(Lassa virus/H.sapiens-wt/NGA/2016/ISTH_0009;Clade II)__AVO03571__GPCstabilized (opt1)
ggggcgcugccuacggagguggcagccaucuccuucucggcaucaagcuuaccaugggccagaucaucaccuucuuccaggaggugccccacgucaucgaggaggugaugaacaucgugcugaucgcccucagccugcuggccauccucaaggggaucuacaacgucgcgaccugcggccugcuggggcucguguccuuccugcugcucugcggccgcagcugcuccacgaccuacaaggggguguacgagcugcagacccuggagcucgacauggccagccugaacaugaccaugccgcuguccugcacgaagaacaacagccaccacuacaucauggucggcaacgagaccggccucgagcugacccugaccaacacguccaucaucaaccacaaguucugcaaccucagcgacgcccacaagaagaaccuguacgaccacgcccugauguccaucaucagcaccuuccaccucuccauccccaacuucaaccaguacgaggccaugagcugcgacuucaacgggggccggaucuccgugcaguacaaccugagccacuccuacgcgguggacgccgccaaccacugcgggaccaucgccaacggcguccugcagaccuucaugcgcauggcguggggcgggagcuacaucgcccucgacuccggcugcgggagcugggacugcaucaugacguccuaccaguaccugaucauccagaacaccaccugggaggaccacugccaguucagccggcccagccccaucggcuaccuggggcuccugucccagcgcacccgggacaucuacaucagccgccggcgccggggcacguucaccuggacccuguccgacagcgagggcaacgagacccccgggggcuacugccucacgcgcuggaugcugaucgaggccgagcugaagugcuucgggaacaccgccguggccaagugcaacgagaagcacgacgaggaguucugcgacaugcuccggcuguucgacuucaacaagcaggcgauccgccggcugaagaccccggcccagauguccauccagcucaucaacaaggccgugaacgcccugaucaacgaccagcugaucaugaagaaccaccuccgcgacaucaugugcauccccuacugcaacuacagcaaguacugguaccugaaccacaccgucacgggcaagaccucccugccccggugcuggcucgugagcaacggguccuaccugaacgagacccacuucagcgacgacaucgagcagcaggccgacaacaugaucaccgagcugcuccagaaggaguacaucgaccgccagggcaagacgccgcugggccugguggaccucuucgucuucuccaccagcuucuaccugaucuccaucuuccugcaccuggugaagauccccacccaccggcacaucaccgggaagcccugccccaagccgcaccgccucaaccacaugggcaucugcagcugcgggcuguacaaccaccccggcgugcccgucaaguggaagcggugaggacuagugcaucacauuuaaaagcaucucagccuaccaugagaauaagagaaagaaaaugaagaucaauagcuuauucaucucuuuuucuuuuucguugguguaaagccaacacccugucuaaaaaacauaaauuucuuuaaucauuuugccucuuuucucugugcuucaauuaauaaaaaauggaaagaaccuagaucuaaaaaaaaaaaaaaaaaaaaaaaaaaaaaaaaaaaaaaaaaaaaaaaaaaaaaaaaaaaaaaaaugcaucccccccccccccccccccccccccccccccaaaggcucuuuucagagccaccagaauu

SEQ ID NO: 7047 - RNA, 1855 nt, Artificial Sequence
  mRNA product Design i-2 comprising derived and/or modified sequence from LASV(Lassa virus/H.sapiens-wt/NGA/2016/ISTH_0017;Clade II)__AVO03567__GPCstabilized (opt1)
ggggcgcugccuacggagguggcagccaucuccuucucggcaucaagcuuaccaugggccagaucaucaccuucuuccaggaggugccccacgucaucgaggaggugaugaacaucgugcugaucgcccucagccugcuggccauccucaaggggaucuacaacgucgcgaccugcggccuguucgggcugguguccuuccuccugcugugcggccgcagcugcuccacgaccuacaaggggguguacgagcuccagacccuggagcuggacauggccagccucaacaugaccaugccgcuguccugcacgaagaacaacagccaccacuacaucauggucggcaacgagaccggccuggagcucacccugaccaacacguccaucaucaaccacaaguucugcaaccugagcgacgcccacaagaagaaccucuacgaccacgcccugauguccaucaucagcaccuuccaccuguccauccccaacuucaaccaguacgaggccaugagcugcgacuucaacgggggcaagaucuccgugcaguacaaccucagccacaccuacgcgaucgacgccgccaaccacugcgggaccaucgccaacggcgugcugcagacguucaugcggauggcguggggcggguccuacaucgcccuggacagcggcugcggguccugggacugcaucaugaccagcuaccaguaccucaucauccagaacaccaccugggaggaccacugccaguucucccgccccagccccaucggcuaccuggggcugcucagccagcggacgcgcgacaucuacaucucccggcgccggcgcggcaccuucaccuggacccugagcgacuccgagggcaacgagacgcccgggggcuacugccugacccgguggaugcucaucgaggccgagcugaagugcuucgggaacaccgccgucgccaagugcaacgagaagcacgacgaggaguucugcgacaugcugcgccucuucgacuucaacaagcaggcgauccggcgccugaagaccccggcccagaugagcauccagcugaucaacaaggccgugaacgcccucaucaacgaccagcugaucaugaagaaccaccuccgggacaucaugugcauccccuacugcaacuacuccaaguacugguaccugaaccacacggugaccggcaagaccagccugccccgcugcuggcuggucuccaacgggagcuaccucaacgagacccacuucuccgacgacaucgagcagcaggccgacaacaugaucacggagcugcugcagaaggaguacauggaccggcagggcaagaccccgcucggccugguggaccuguucguguucagcaccuccuucuaccucaucagcaucuuccugcaccugguccgcauccccacccaccggcacgugaucgggaagcccugccccaagccgcaccgccugaaccacaugggcaucugcuccugcgggcucuacaagcaccccggcgugcccgucaaguggaagcggugaggacuagugcaucacauuuaaaagcaucucagccuaccaugagaauaagagaaagaaaaugaagaucaauagcuuauucaucucuuuuucuuuuucguugguguaaagccaacacccugucuaaaaaacauaaauuucuuuaaucauuuugccucuuuucucugugcuucaauuaauaaaaaauggaaagaaccuagaucuaaaaaaaaaaaaaaaaaaaaaaaaaaaaaaaaaaaaaaaaaaaaaaaaaaaaaaaaaaaaaaaaugcaucccccccccccccccccccccccccccccccaaaggcucuuuucagagccaccagaauu

SEQ ID NO: 7048 - RNA, 1855 nt, Artificial Sequence
  mRNA product Design i-2 comprising derived and/or modified sequence from LASV(Lassa virus/H.sapiens-wt/NGA/2018/ISTH_0959;Clade II)__AVV65099__GPCstabilized (opt1)
ggggcgcugccuacggagguggcagccaucuccuucucggcaucaagcuuaccaugggccagaucaucaccuucuuccaggaggugccccacgucaucgaggaggugaugaacaucgugcugaucgcccucagccugcuggccauccucaaggggaucuacaacgucgugaccugcggccuguucgggcugguguccuuccuccugcugugcggccgcagcugcuccacgaccuacaagggggucuacgagcuccagacccuggagcuggacauggcgagccucaacaugaccaugccgcuguccugcacgaagaacaacagccaccacuacaucauggugggcaacgagaccggccuggagcucacccugaccaacacguccaucaucaaccacaaguucugcaaccugagcgacgcccacaagaagaaccucuacgaccacgcccugauguccaucaucagcaccuuccaccuguccauccccaacuucaaccaguacgaggccaugagcugcgacuucaacgggggcaagaucuccgugcaguacaaccucagccacgccuacgcgaucgacgccgccaaccacugcgggaccaucgccaacggcguccugcagaccuucaugcggauggcguggggcggguccuacaucgcccuggacagcggcugcggguccugggacugcaucaugacgagcuaccaguaccucaucauccagaacaccaccugggaggaccacugccaguucucccgccccagccccaucggcuaccuggggcugcucagccagcggacccgcgacaucuacaucucccggcgccggcgcggcacguucaccuggacccugagcgacuccgagggcaacgagacccccgggggcuacugccugacgcgguggaugcucaucgaggccgagcugaagugcuucgggaacaccgccguggccaagugcaacgagaagcacgacgaggaguucugcgacaugcugcgccucuucgacuucaacaagcaggcgauccggcgccugaagaccccggcccagaugagcauccagcugaucaacaaggccgugaacgcccucaucaacgaccagcugaucaugaagaaccaccuccgggacaucaugugcauccccuacugcaacuacuccaaguacugguaccugaaccacaccgucacgggcaagaccagccugccccgcugcuggcugguguccaacgggagcuaccucaacgagacccacuucuccgacgacaucgagcagcaggccgacaacaugaucaccgagcugcugcagaaggaguacaucgaccggcagggcaagacgccgcucggccugguggaccuguucgucuucagcaccuccuucuaccucaucagcaucuuccugcaccuggugaagauccccacccaccgccacgugaucgggaagcccugccccaagccgcaccggcugaaccacaugggcaucugcuccugcgggcucuacaagcaccccggcguccccgugaaguggaagcgcugaggacuagugcaucacauuuaaaagcaucucagccuaccaugagaauaagagaaagaaaaugaagaucaauagcuuauucaucucuuuuucuuuuucguugguguaaagccaacacccugucuaaaaaacauaaauuucuuuaaucauuuugccucuuuucucugugcuucaauuaauaaaaaauggaaagaaccuagaucuaaaaaaaaaaaaaaaaaaaaaaaaaaaaaaaaaaaaaaaaaaaaaaaaaaaaaaaaaaaaaaaaugcaucccccccccccccccccccccccccccccccaaaggcucuuuucagagccaccagaauu

SEQ ID NO: 7049 - RNA, 1855 nt, Artificial Sequence
  mRNA product Design i-2 comprising derived and/or modified sequence from LASV(LASV003-NIG-2008;Clade II)__AIT17580__GPCstabilized (opt1)
ggggcgcugccuacggagguggcagccaucuccuucucggcaucaagcuuaccaugggccagaucaucaccuucuuccaggaggugccccacgucaucgaggaggugaugaacaucgugcugaucgcccucagccugcuggccauccucaaggggaucuacaacgucgcgaccugcggccuguucgggcugguguccuuccuccugcugugcggccgcagcugcuccacgaccuacaaggggguguacgagcuccagacccuggagcuggacauggccagccucaacaugaccaugccgcuguccugcacgaagaacaacagccaccacuacaucauggucggcaacgagaccggccuggagcucacccugaccaacacguccaucaucaaccacaaguucugcaaccugagcgacgcccacaagaagaaccucuacgaccacgcccugauguccaucaucagcaccuuccaccuguccauccccaacuucaaccaguacgaggccaugagcugcgacuucaacgggggcaagaucuccgugcaguacaaccucagccacaccuacgcgguggacgccgccaaccacugcgggaccaucgccaacggcguccugcagacguucaugcggauggcguggggcggguccuacaucgcccuggacagcggcugcggguccugggacugcaucaugaccagcuaccaguaccucaucauccagaacaccaccugggaggaccacugccaguucucccgccccagccccaucggcuaccuggggcugcucagccagcggacgcgcgacaucuacaucucccggcgccggcgcggcaccuucaccuggacccugagcgacuccgagagcaacgagacgccgggcggguacugccugacccgguggaugcucaucgaggccgagcugaagugcuucggcaacaccgccguggccaagugcaacgagaagcacgacgaggaguucugcgacaugcugcgccucuucgacuucaacaagcaggcgauccggcgccugaaggcccccgcccagauguccauccagcugaucaacaaggccgugaacgcccucaucaacgaccagcugaucaugaagaaccaccuccgggacaucaugugcauccccuacugcaacuacagcaaguacugguaccugaaccacaccgucacggggcgcaccucccugccccggugcuggcuggugagcaacggcuccuaccucaacgagacccacuucagcgacgacaucgagcagcaggcggacaacaugaucaccgagcugcugcagaaggaguacauggaccgccaggggaagacgccgcucggccugguggaccuguucgucuucuccaccagcuucuaccucaucuccaucuuccugcaccuggugaagauccccacccaccggcacgugaucggcaagcccugccccaagccgcaccgccugaaccacauggggaucugcagcugcggccucuacaagcaccccgggguccccgugaaguggaagcggugaggacuagugcaucacauuuaaaagcaucucagccuaccaugagaauaagagaaagaaaaugaagaucaauagcuuauucaucucuuuuucuuuuucguugguguaaagccaacacccugucuaaaaaacauaaauuucuuuaaucauuuugccucuuuucucugugcuucaauuaauaaaaaauggaaagaaccuagaucuaaaaaaaaaaaaaaaaaaaaaaaaaaaaaaaaaaaaaaaaaaaaaaaaaaaaaaaaaaaaaaaaugcaucccccccccccccccccccccccccccccccaaaggcucuuuucagagccaccagaauu

SEQ ID NO: 7050 - RNA, 1855 nt, Artificial Sequence
  mRNA product Design i-2 comprising derived and/or modified sequence from LASV(LASV035-NIG-2009;Clade II)__AIT17588__GPCstabilized (opt1)
ggggcgcugccuacggagguggcagccaucuccuucucggcaucaagcuuaccaugggccagaucaucaccuucuuccaggaggugccccacgucaucgaggaggugaugaacaucgugcugaucgcccucagccugcuggccauccucaaggggaucuacaacgucgcgaccugcggccuguucgggcugguguccuuccuccugcugugcggccgcagcugcuccacgaccuacaaggggguguacgagcuccagacccuggagcuggacauggccagccucaacaugaccaugccgcuguccugcacgaagaacaacagccaccacuacaucauggucggcaacgagaccggccuggagcucacccugaccaacacguccaucaucaaccacaaguucugcaaccugagcgacgcccacaagaagaaccucuacgaccacgcccugauguccaucaucagcaccuuccaccuguccauccccaacuucaaccaguacgaggccaugagcugcgacuucaacgggggcaagaucuccgugcaguacaaccucagccacgcguacgccguggacgccgccaaccacugcgggaccaucgcgaacggcguccugcagaccuucaugcggauggccuggggcggguccuacaucgcccuggacagcggcugcggguccugggacugcaucaugacgagcuaccaguaccucaucauccagaacaccaccugggaggaccacugccaguucucccgccccagccccaucggcuaccuggggcugcucagccagcggacccgcgacaucuacaucucccggcgccggcgcggcacguucaccuggacccugagcgacuccgagggcaacgagacccccgggggcuacugccugacgcgguggaugcucaucgaggccgagcugaagugcuucgggaacaccgccguggcgaagugcaacgagaagcacgacgaggaguucugcgacaugcugcgccucuucgacuucaacaagcaggccauccggcgccugaaggccccggcccagaugagcauccagcugaucaacaaggccgugaacgcgcucaucaacgaccagcugaucaugaagaaccaccuccgggacaucaugugcauccccuacugcaacuacuccaaguacugguaccugaaccacaccgucaccggcaagacgagccugccccgcugcuggcugguguccaacgggagcuaccucaacgagacccacuucuccgacgacaucgagcagcaggccgacaacaugaucaccgagcugcugcagaaggaguacaucgaccggcagggcaagaccccgcucggccugguggaccuguucgucuucagcacguccuucuaccucaucagcaucuuccugcaccuggugaagauccccacccaccgccacgugaucgggaagcccugccccaagccgcaccggcugaaccacaugggcaucugcuccugcgggcucuacaagcaccccggcguccccgugaaguggaagcgcugaggacuagugcaucacauuuaaaagcaucucagccuaccaugagaauaagagaaagaaaaugaagaucaauagcuuauucaucucuuuuucuuuuucguugguguaaagccaacacccugucuaaaaaacauaaauuucuuuaaucauuuugccucuuuucucugugcuucaauuaauaaaaaauggaaagaaccuagaucuaaaaaaaaaaaaaaaaaaaaaaaaaaaaaaaaaaaaaaaaaaaaaaaaaaaaaaaaaaaaaaaaugcaucccccccccccccccccccccccccccccccaaaggcucuuuucagagccaccagaauu

SEQ ID NO: 7051 - RNA, 1855 nt, Artificial Sequence
  mRNA product Design i-2 comprising derived and/or modified sequence from LASV(LASV1000-NIG-2009;Clade II)__AIT17782__GPCstabilized (opt1)
ggggcgcugccuacggagguggcagccaucuccuucucggcaucaagcuuaccaugggccagaucaucaccuucuuccaggaggugccccacgucaucgaggaggugaugaacaucgugcugaucgcccucagccugcuggccauccucaaggggaucuacaacgucgcgaccugcggccuguucgggcugguguccuuccuccugcugugcggccgcagcugcuccacgaccuacaaggggguguacgagcuccagacccuggagcuggacauggccagccucaacaugaccaugccgcuguccugcacgaagaacaacagccaccacuacaucauggucggcaacgagaccggccuggagcucacccugaccaacacguccaucaucaaccacaaguucugcaaccugagcgacgcccacaagaagaaccucuacgaccacgcccugauguccaucaucagcaccuuccaccuguccauccccaacuucaaccaguacgaggccaugagcugcgacuucaacgggggcaagaucuccgugcaguacaaccucagccacaccuacgcgguggacgccgccaaccacugcgggaccaucgccaacggcguccugcagacguucaugcggauggcguggggcggguccuacaucgcccuggacagcggcugcggguccugggacugcaucaugaccagcuaccaguaccucaucauccagaacaccaccugggaggaccacugccaguucucccgccccagccccaucggcuaccuggggcugcucagccagcggacgcgcgacaucuacaucucccggcgccggcgcggcaccuucaccuggacccugagcgacuccgagggcaacgagacgcccgggggcuacugccugacccgguggaugcucaucgaggccgagcugaagugcuucgggaacaccgccguggccaagugcaacgagaagcacgacgaggaguucugcgacaugcugcgccucuucgacuucaacaagcaggcgaucaagcggcugaagaccccggcccagaugagcauccagcugaucaacaaggccgugaacgcccucaucaacgaccagcugaucaugaagaaccaccuccgcgacaucaugugcauccccuacugcaacuacuccaaguacugguaccugaaccacacggucaccggcaagaccagccugccccggugcuggcugguguccaacgggagcuaccucaacgagacccacuucuccgacgacaucgagcagcaggccgacaacaugaucacggagcugcugcagaaggaguacaucgaccgccagggcaagaccccgcucggccugguggaccuguucgucuucagcaccuccuucuaccucaucagcaucuuccugcaccuggugaagauccccacccaccggcacguggucgggaagcccugccccaagccgcaccgccugaaccacaugggcaucugcuccugcgggcucuacaagcaccccggcgugcccgugaaguggaagcggugaggacuagugcaucacauuuaaaagcaucucagccuaccaugagaauaagagaaagaaaaugaagaucaauagcuuauucaucucuuuuucuuuuucguugguguaaagccaacacccugucuaaaaaacauaaauuucuuuaaucauuuugccucuuuucucugugcuucaauuaauaaaaaauggaaagaaccuagaucuaaaaaaaaaaaaaaaaaaaaaaaaaaaaaaaaaaaaaaaaaaaaaaaaaaaaaaaaaaaaaaaaugcaucccccccccccccccccccccccccccccccaaaggcucuuuucagagccaccagaauu

SEQ ID NO: 7052 - RNA, 1855 nt, Artificial Sequence
  mRNA product Design i-2 comprising derived and/or modified sequence from LASV(LASV221-NIG-2010;Clade II)__AIT17624__GPCstabilized (opt1)
ggggcgcugccuacggagguggcagccaucuccuucucggcaucaagcuuaccaugggccagaucaucaccuucuuccaggaggugccccacgucaucgaggaggugaugaacaucgugcugaucgcccucagccugcuggccauccucaaggggaucuacaacgucgcgaccugcggccuguucgggcugguguccuuccuccugcugugcggccgcagcugcuccacgaccuacaaggggguguacgagcuccagacccuggagcuggacauggccagccucaacaugaccaugccgcuguccugcacgaagaacaacagccaccacuacaucauggucggcaacgagaccggccuggagcucacccugaccaacacguccaucaucaaccacaaguucugcaaccugagcgacgcccacaagaagaaccucuacgaccacgcccugauguccaucaucagcaccuuccaccuguccauccccaacuucaaccaguacgaggccaugagcugcgacuucaacgggggcaagaucuccgugcaguacaaccucagccacaccuacgcgaucgacgccgccaaccacugcgggaccaucgccaacggcgugcugcagacguucaugcggauggcguggggcggguccuacaucgcccuggacagcggcugcggguccugggacugcaucaugaccagcuaccaguaccucaucauccagaacaccaccugggaggaccacugccaguucucccgccccagccccaucggcuaccuggggcugcucagccagcggacgcgcgacaucuacaucucccggcgccggcgcggcaccuucaccuggacccugagcgacuccgagggcaacgagacgcccgggggcuacugccugacccgguggaugcucaucgaggccgagcugaagugcuucgggaacaccgccgucgccaagugcaacgagaagcacgacgaggaguucugcgacaugcugcgccucuucgacuucaacaagcaggcgauccggcgccugaagaccccggcccagaugagcauccagcugaucaacaaggccgugaacgcccucaucaacgaccagcugaucaugaagaaccaccuccgggacaucaugugcauccccuacugcaacuacuccaaguacugguaccugaaccacacggugaccggcaagaccagccugccccgcugcuggcuggucuccaacgggagcuaccucaacgagacccacuucuccgacgacaucgagcagcaggccgacaacaugaucacggagaugcugcagaaggaguacauggaccggcagggcaagaccccgcugggccucguggaccuguucguguucagcaccuccuucuaccugaucagcaucuuccuccaccuggucaagauccccacccaccgccacgugaucgggaagcccugccccaagccgcaccggcugaaccacaugggcaucugcuccugcgggcuguacaagcaccccggcgugcccgucaaguggaagcgcugaggacuagugcaucacauuuaaaagcaucucagccuaccaugagaauaagagaaagaaaaugaagaucaauagcuuauucaucucuuuuucuuuuucguugguguaaagccaacacccugucuaaaaaacauaaauuucuuuaaucauuuugccucuuuucucugugcuucaauuaauaaaaaauggaaagaaccuagaucuaaaaaaaaaaaaaaaaaaaaaaaaaaaaaaaaaaaaaaaaaaaaaaaaaaaaaaaaaaaaaaaaugcaucccccccccccccccccccccccccccccccaaaggcucuuuucagagccaccagaauu

SEQ ID NO: 7053 - RNA, 1855 nt, Artificial Sequence
  mRNA product Design i-2 comprising derived and/or modified sequence from LASV(LASV237-NIG-2010;Clade II)__AIT17638__GPCstabilized (opt1)
ggggcgcugccuacggagguggcagccaucuccuucucggcaucaagcuuaccaugggccagaucaucaccuucuuccaggaggugccccacgucaucgaggaggugaugaacaucgugcugaucgcccucagccugcuggccauccucaaggggaucuacaacgucgcgaccugcggccuguucgggcugguguccuuccuccugcugugcggccgcagcugcuccacgaccuacaaggggguguacgagcuccagacccuggagcuggacauggccagccucaacaugaccaugccgcuguccugcacgaagaacaacagccaccacuacaucauggucggcaacgagaccggccuggagcucacccugaccaacacguccaucaucaaccacaaguucugcaaccugagcgacgcccacaagaaggaccucuacgaccacgcccugauguccaucaucagcaccuuccaccuguccauccccaacuucaaccaguacgaggccaugagcugcgacuucaacgggggcaagaucuccgugcaguacaaccucagccacaccuacgcgguggacgccgccaaccacugcgggaccaucgccaacggcguccugcagacguucaugcggauggcguggggcggguccuacaucgcccuggacagcggcugcggguccugggacugcaucaugaccagcuaccaguaccucaucauccagaacaccaccugggaggaccacugccaguucucccgccccagccccaucggcuaccuggggcugcucagccagcggacgcgcgacaucuacaucucccggcgccggcgcggcaccuucaccuggacccugagcgacuccgagggcaacgagacgcccgggggcuacugccugacccgguggaugcucaucgaggccgagcugaagugcuucgggaacaccgccguggccaagugcaacgagaagcacgacgaggaguucugcgacaugcugcgccucuucgacuucaacaagcaggcgauccggcgccugaagaccccggcccagaugagcauccagcugaucaacaaggccgugaacgcccucaucaacgaccagcugaucaugaagaaccaccuccgggacaucaugugcauccccuacugcaacuacuccaaguacugguaccugaaccacacggucaccggcaagaccagccugccccgcugcuggcugguguccaacgggagcuaccucaacgagacccacuucuccgacgacaucgagcagcaggccgacaacaugaucacggagcugcugcagaaggaguacauggaccggcagggcaagaccccgcucggccugguggaccuguucgucuucagcaccuccuucuaccucaucagcaucuuccugcaccugaucaagauccccacccaccgccacaucacggggaagcccugccccaagccgcaccggcugaaccacaugggcaucugcuccugcgggcucuacaagcaccccggcgugcccgugaaguggaagcgcugaggacuagugcaucacauuuaaaagcaucucagccuaccaugagaauaagagaaagaaaaugaagaucaauagcuuauucaucucuuuuucuuuuucguugguguaaagccaacacccugucuaaaaaacauaaauuucuuuaaucauuuugccucuuuucucugugcuucaauuaauaaaaaauggaaagaaccuagaucuaaaaaaaaaaaaaaaaaaaaaaaaaaaaaaaaaaaaaaaaaaaaaaaaaaaaaaaaaaaaaaaaugcaucccccccccccccccccccccccccccccccaaaggcucuuuucagagccaccagaauu

SEQ ID NO: 7054 - RNA, 1855 nt, Artificial Sequence
  mRNA product Design i-2 comprising derived and/or modified sequence from LASV(LASV253-NIG-2011;Clade II)__AIT17670__GPCstabilized (opt1)
ggggcgcugccuacggagguggcagccaucuccuucucggcaucaagcuuaccaugggccagaucaucaccuucuuccaggaggugccccacgucaucgaggaggugaugaacaucgugcugaucgcccucagccugcuggccauccucaaggggaucuacaacgucgcgaccugcggccuguucgggcugguguccuuccuccugcugugcggccgcagcugcuccacgaccuacaaggggguguacgagcuccagacccuggagcuggacauggccagccucaacaugaccaugccgcuguccugcacgaagaacaacagccaccacuacaucauggucggcaacgagaccggccuggagcucacccugaccaacacguccaucaucaaccacaaguucugcaaccugagcgacgcccacaagaagaaccucuacgaccacgcccugauguccaucaucagcaccuuccaccuguccauccccaacuucaaccaguacgaggccaugagcugcgacuucaacgggggcaagaucuccgugcaguacaaccucagccacaccuacgcgguggacgccgccaaccacugcgggaccaucgccaacggcguccugcagacguucaugcggauggcguggggcggguccuacaucgcccuggacagcggcugcggguccugggacugcaucaugaccagcuaccaguaccucaucauccagaacaccaccugggaggaccacugccaguucucccgccccagccccaucggcuaccuggggcugcucagccagcggacgcgcgacaucuacaucucccggcgccggcgcggcaccuucaccuggacccugagcgacuccgagggcaacgagacgcccgggggcuacugccugacccgguggaugcucaucgaggccgagcugaagugcuucgggaacaccgccguggccaagugcaacgagaagcacgacgaggaguucugcgacaugcugcgccucuucgacuucaacaagcaggcgauccggcgccugaaggccccggcccagaugagcauccagcugaucaacaaggccgugaacgcccucaucaacgaccagcugaucaugaagaaccaccuccgggacaucaugugcauccccuacugcaacuacuccaaguacugguaccugaaccacaccgucacgggccgcaccagccugccccggugcuggcugguguccaacgggagcuaccucaacgagacccacuucuccgacgacaucgagcagcaggcggacaacaugaucaccgagcugcugcagaaggaguacaucgaccgccagggcaagacgccgcucggccugguggaccuguucgucuucagcaccuccuucuaccucaucagcaucuuccugcaccuggugaagauccccacccaccggcacaucaucgggaagcccugccccaagccgcaccgccugaaccacaugggcaucugcuccugcgggcucuacaagcaccccggcgugcccgucaaguggaagcggugaggacuagugcaucacauuuaaaagcaucucagccuaccaugagaauaagagaaagaaaaugaagaucaauagcuuauucaucucuuuuucuuuuucguugguguaaagccaacacccugucuaaaaaacauaaauuucuuuaaucauuuugccucuuuucucugugcuucaauuaauaaaaaauggaaagaaccuagaucuaaaaaaaaaaaaaaaaaaaaaaaaaaaaaaaaaaaaaaaaaaaaaaaaaaaaaaaaaaaaaaaaugcaucccccccccccccccccccccccccccccccaaaggcucuuuucagagccaccagaauu

SEQ ID NO: 7055 - RNA, 1855 nt, Artificial Sequence
  mRNA product Design i-2 comprising derived and/or modified sequence from LASV(LASV254-NIG-2011;Clade II)__AIT17674__GPCstabilized (opt1)
ggggcgcugccuacggagguggcagccaucuccuucucggcaucaagcuuaccaugggccagaucaucaccuucuuccaggaggugccccacgucaucgaggaggugaugaacaucgugcugaucgcccucagccugcuggccauccucaaggggaucuacaacgucgcgaccugcggccuguucgggcugguguccuuccuccugcugugcggccgcagcugcuccacgaccuacaaggggguguacgagcuccagacccuggagcuggacaugaccaaccucaacaugacgaugccgcugagcugcaccaagaacaacucccaccacuacaucauggucggcaacgagaccggccuggagcucacccugacgaacaccagcaucaucaaccacaaguucugcaaccuguccgacgcccacaagaagaaccucuacaaccacgcccugaugagcaucaucuccaccuuccaccugagcauccccaacuucaaccaguacgaggccauguccugcgacuucaacgggggcaagaucagcgugcaguacaaccucucccacagcuacgccguggacgcggccaaccacugcgggaccaucgccaacggcguccugcagacguucaugcggauggccuggggcggguccuacaucgcgcuggacagcggcugcgggaacugggacugcaucaugaccuccuaccaguaccucaucauccagaacaccaccugggaggaccacugccaguucagccgccccucccccaucggcuaccuggggcugcucagccagcggacgcgcgacaucuacaucagccggcgccggcgcggcaccuucaccuggacccuguccgacagcgagggcaacgagacgcccgggggcuacugccugacccgguggaugcucaucgaggccgagcugaagugcuucgggaacaccgccguggccaagugcaacgagaagcacgacgaggaguucugcgacaugcugcgccucuucgacuucaacaagcaggccauccggcgccugaagaccccggcgcaggccaacauccagcugaucaacaaggccgugaacgcccucaucaacgaccagcugaucaugaagaaccaccuccgggacaucaugugcauccccuacugcaacuacuccaaguacugguaccugaaccacacggucaccggcaagaccagccugccccgcugcuggcugguguccaacgggagcuaccucaacgagacccacuucuccgacgacaucgagcagcaggccgacaacaugaucacggagcugcugcagaaggaguacauggaccggcagggcaagaccccgcucggccugguggaccuguucgucuucagcaccuccuucuaccucaucagcaucuuccugcaccuggugaagauccccacccaccgccacgugaucgggaagcccugccccaagccgcaccggcugaaccacaugggcaucugcuccugcgggcucuacaagcaccccggcguccccgugaaguggaagcgcugaggacuagugcaucacauuuaaaagcaucucagccuaccaugagaauaagagaaagaaaaugaagaucaauagcuuauucaucucuuuuucuuuuucguugguguaaagccaacacccugucuaaaaaacauaaauuucuuuaaucauuuugccucuuuucucugugcuucaauuaauaaaaaauggaaagaaccuagaucuaaaaaaaaaaaaaaaaaaaaaaaaaaaaaaaaaaaaaaaaaaaaaaaaaaaaaaaaaaaaaaaaugcaucccccccccccccccccccccccccccccccaaaggcucuuuucagagccaccagaauu

SEQ ID NO: 7056 - RNA, 1855 nt, Artificial Sequence
  mRNA product Design i-2 comprising derived and/or modified sequence from LASV(Nig08-A19;Clade III)__ADU56618__GPCstabilized (opt1)
ggggcgcugccuacggagguggcagccaucuccuucucggcaucaagcuuaccaugggccagaucgugaccuucuuccaggaggucccccacgugaucgaggaggugaugaacaucguccugaucgcccucagcauccuggccauccugaaggggcucuacaacaucgcgaccugcggccugaucgggcuggugacguuccuccugcuguccggccgcagcugcuccaugaccuacaaggggguguacgagcuccagacccuggagcugaacaugaacacccucaacaugacgaugccgcugagcugcaccaagaacaacucccaccacuacaucauggucggcaacgagaccggccuggagcucacccugacgaacaccagccugcuccaccacaaguucugcaaccuguccgacgcccacaagaagaaccuguacgaccacacccucaugagcaucaucuccaccuuccaccugagcauccccaacuucaaccaguacgaggccauguccugcgacuucaacgggggcaagaucacggugcaguacaaccugagccacuccuacgccaucgacgccgcgaaccacugcgggaccguggccaacggcguccuccagaccuucaugcggauggccuggggcgggagcuacaucgcccuggacuccggcugcgggaagugggacugcaucaugaccagcuaccaguaccugaucauccagaacacgaccugggaggaccacugccaguucucccgccccagccccaucggcuaccucgggcugcugucccagcggacccgcgacaucuacaucagccggcgccggcgcggcaccuucacguggacccucagcgacuccgagggcaacgagacccccgggggcuacugccugacccgguggaugcugaucgaggcggagcucaagugcuucgggaacacggccguggccaagugcaacgagaagcacgacgaggaguucugcgacaugcugcgccuguucgacuucaacaagcaggccauccggcgccucaaggccccggcgcagaugagcauccagcugaucaacaaggccgugaacgcccugaucaacgaccagcucaucaugaagaaccaccuccgggacaucaugugcauccccuacugcaacuacuccaaguacugguaccugaaccacaccagcaccggccgcaccucccugccccggugcuggcuggucagcaacggguccuaccugaacgagacgcacuucagcgacgacaucgagcagcaggccgacaacaugaucaccgagaugcuccagaaggaguaccuggaccgccagggcaagaccccgcugggccucguggaccuguucguguucuccaccagcuucuaccugaucuccaucuuccugcaccucgucaagauccccacgcaccggcacaucguggggaagcccugccccaagccgcaccgccugaaccacaugggcaucugcagcugcgggcuguacaagcagcccggcgugcccguccgguggaagcgcugaggacuagugcaucacauuuaaaagcaucucagccuaccaugagaauaagagaaagaaaaugaagaucaauagcuuauucaucucuuuuucuuuuucguugguguaaagccaacacccugucuaaaaaacauaaauuucuuuaaucauuuugccucuuuucucugugcuucaauuaauaaaaaauggaaagaaccuagaucuaaaaaaaaaaaaaaaaaaaaaaaaaaaaaaaaaaaaaaaaaaaaaaaaaaaaaaaaaaaaaaaaugcaucccccccccccccccccccccccccccccccaaaggcucuuuucagagccaccagaauu

SEQ ID NO: 7057 - RNA, 1858 nt, Artificial Sequence
  mRNA product Design i-2 comprising derived and/or modified sequence from LASV(G1180-SLE-2010;Clade IV)__AIT17168__GPCstabilized (opt1)
ggggcgcugccuacggagguggcagccaucuccuucucggcaucaagcuuaccaugggccagaucgugaccuucuuccaggaggucccccacgugaucgaggaggugaugaacaucguccugaucgcccucagcauccuggccgugcugaaggggcucuacaacuucgcgaccugcggccugguggggcugcucacguuccugcugcucugcggccgcuccugcaccgccagccgguacaagggggucuacgagcugcagacccuggagcucaacauggagacccugaacaugacgaugccgcuguccugcaccaagaacaacagccaccacuacaucauggugggcaacgagaccggccucgagcugacccugacgaacaccuccaucaucaaccacaaguucugcaaccucagcgacgcccacaagaagaaccuguacgaccacgcccugauguccaucaucagcaccuuccaccucuccauccccaacuucaaccaguacgaggccaugagcugcgacuucaacgggggcaagaucuccgugcaguacaaccugagccacuccuacgcgggggacgccgccaaccacugcggcaccgucgccaacggggugcugcagacguucaugcgcauggcguggggcggcagcuacaucgcccucgacuccgggugcggcagcugggacugcaucaugaccuccuaccaguaccugaucauccagaacaccaccugggaggaccacugccaguucagccggcccucccccaucggguaccugggccuccugagccagcgcacgcgggacaucuacaucagccgccggcgccggggcaccuucaccuggacccuguccgacagcgaggggaaggacacgccgggcggguacugccucacccgcuggaugcugaucgaggccgagcugaagugcuucggcaacaccgccguggccaagugcaacgagaagcacgacgaggaguucugcgacaugcuccggcuguucgacuucaacaagcaggcgauccagcgccugaaggcccccgcccagauguccauccagcucaucaacaaggccgucaacgcccugaucaacgaccagcugaucaugaagaaccaccuccgggacaucaugugcauccccuacugcaacuacagcaaguacugguaccugaaccacaccacgaccgggaagaccucccugcccaagugcuggcucgugagcaacggcuccuaccugaacgagacccacuucagcgacgacaucgagcagcaggcggacaacaugaucacggagaugcugcagaaggaguacauggagcgccagggcaagaccccgcucgggcugguggaccuguucgucuucuccaccagcuucuaccucaucuccaucuuccugcaccuggugaagauccccacccaccggcacaucgugggcaagagcugccccaagccccaccgccugaaccacauggggaucugcuccugcggccucuacaagcagccggggguccccgugaaguggaagcggugaggacuagugcaucacauuuaaaagcaucucagccuaccaugagaauaagagaaagaaaaugaagaucaauagcuuauucaucucuuuuucuuuuucguugguguaaagccaacacccugucuaaaaaacauaaauuucuuuaaucauuuugccucuuuucucugugcuucaauuaauaaaaaauggaaagaaccuagaucuaaaaaaaaaaaaaaaaaaaaaaaaaaaaaaaaaaaaaaaaaaaaaaaaaaaaaaaaaaaaaaaaugcaucccccccccccccccccccccccccccccccaaaggcucuuuucagagccaccagaauu

SEQ ID NO: 7058 - RNA, 1858 nt, Artificial Sequence
  mRNA product Design i-2 comprising derived and/or modified sequence from LASV(G1442-SLE-2011;Clade IV)__AIT17180__GPCstabilized (opt1)
ggggcgcugccuacggagguggcagccaucuccuucucggcaucaagcuuaccaugggccagaucgugaccuucuuccaggaggucccccacgugaucgaggaggugaugaacaucguccugaucgcccucagcauccuggccgugcugaaggggcucuacaacguggcgaccugcggccugaucgggcuggucacguuccuccugcugugcggccgcuccugcaccaccacccucuacaaggggguguacgagcugcagacgcuggagcucaacauggagacccugaacaugaccaugccgcugagcugcaccaagaacaacucccaccacuacauccgggugggcaacgagacgggccucgagcugacccugaccaacaccagcaucaucaaccacaaguucugcaaccucuccgacgcccacaagaagaaccuguacgaccacgcccugaugagcaucaucuccacguuccaccucagcauccccaacuucaaccaguacgaggccauguccugcgacuucaacgggggcaagaucagcguccaguacaaccugucccacagcuacgccggggacgcggccaaccacugcggcaccguggccaacggggugcugcagaccuucaugcgcauggccuggggcggcuccuacaucgcgcucgacagcgggugcggcaacugggacugcaucaugaccuccuaccaguaccugaucauccagaacacgaccugggacgaccacugccaguucagccggcccucccccaucggguaccugggccuccugagccagcgcacccgggacgucuacaucucccgccggcgccggggcaccuucacguggacccugagcgacagcgaggggaaggacaccccgggcggguacugccucacccgcuggaugcugaucgaggccgagcugaagugcuucggcaacacggccguggccaagugcaacgagaagcacgacgaggaguucugcgacaugcuccggcuguucgacuucaacaagcaggccauccagcgccugaaggcgcccgcccagauguccauccagcucaucaacaaggccgugaacgcccugaucaacgaccagcugaucaugaagaaccaccuccgggacaucaugugcauccccuacugcaacuacagcaaguacugguaccugaacaacaccgccaccgggaagaccucccugcccaagugcuggcucaucagcaacggcuccuaccugaacgagacgcacuucagcgacgacaucgagcaggaggcggacaacaugaucaccgagaugcugcagaaggaguacauggagcgccagggcaagaccccgcucgggcuggucgaccuguucguguucuccaccagcuucuaccucaucuccaucuuccugcaccuggugaagauccccacgcaccggcacaucgucggcaagagcugccccaagccccaccgccugaaccacauggggaucugcuccugcggccucuacaagcagccgggggugcccgugcgguggaagcgcugaggacuagugcaucacauuuaaaagcaucucagccuaccaugagaauaagagaaagaaaaugaagaucaauagcuuauucaucucuuuuucuuuuucguugguguaaagccaacacccugucuaaaaaacauaaauuucuuuaaucauuuugccucuuuucucugugcuucaauuaauaaaaaauggaaagaaccuagaucuaaaaaaaaaaaaaaaaaaaaaaaaaaaaaaaaaaaaaaaaaaaaaaaaaaaaaaaaaaaaaaaaugcaucccccccccccccccccccccccccccccccaaaggcucuuuucagagccaccagaauu

SEQ ID NO: 7059 - RNA, 1858 nt, Artificial Sequence
  mRNA product Design i-2 comprising derived and/or modified sequence from LASV(G3010-SLE-2013;Clade IV)__AIT17344__GPCstabilized (opt1)
ggggcgcugccuacggagguggcagccaucuccuucucggcaucaagcuuaccaugggccagaucgugaccuucuuccaggaggucccccacgugaucgaggaggugaugaacaucguccugaucgcccucagcauccuggccgugcugaaggggcucuacaacuucgcgaccugcggccugguggggcuggucacguuccuccugcugugcggccgcuccugcaccaccagccucuacaaggggguguacgagcugcagacccuggagcucaacauggagacgcugaacaugaccaugccgcuguccugcaccaagaacaacagccaccacuacaucauggugggcaacgagaccggccucgagcugacgcugaccaacaccuccaucaucaaccacaaguucugcaaccucagcgacgcccacaagaagaaccuguacaaccacgcccugauguccaucaucagcaccuuccaccucuccauccccaacuucaaccaguacgaggccaugagcugcgacuucaacgggggcaagaucuccguccaguacaaccugagccacuccuacgccggggacgcggccagccacugcggcacgguggccaacggggugcugcagaccuucaugcggauggccuggggcggcuccuacaucgcgcucgacagcgggugcggcaagugggacugcaucaugaccuccuaccaguaccugaucauccagaacaccacgugggaggaccacugccaguucagccgccccucccccaucggguaccugggccuccugagccagcggacccgcgacaucuacaucagccggcgccggcgcggcaccuucaccuggacgcuguccgacagcgaggggaaggacaccccgggcggguacugccucacccgguggaugcugaucgaggccgagcugaagugcuucggcaacaccgccgucgccaagugcaacgagaagcacgacgaggaguucugcgacaugcuccgccuguucgacuucaacaagcaggccauccagcggcugaagacgcccgcgcagauguccauccagcucaucaacaaggccgugaacgcccugaucaacgaccagcugaucaugaagaaccaccuccgcgacaucaugugcauccccuacugcaacuacagcaaguacugguaccugaaccacaccaccaccgggaagacgucccugcccaagugcuggcucgugagcaacggcuccuaccugaacgagacccacuucagcgacgacaucgagcagcaggccgacaacaugaucaccgagaugcugcagaaggaguacauggagcggcagggcaagaccccgcucgggcuggucgaccuguucguguucuccacgagcuucuaccucaucuccaucuuccugcaccuggugaagauccccacccaccgccacaucgucggcaagagcugccccaagccccaccggcugaaccacauggggaucugcuccugcggccucuacaagcagccgggggugcccgugcgcuggaagcggugaggacuagugcaucacauuuaaaagcaucucagccuaccaugagaauaagagaaagaaaaugaagaucaauagcuuauucaucucuuuuucuuuuucguugguguaaagccaacacccugucuaaaaaacauaaauuucuuuaaucauuuugccucuuuucucugugcuucaauuaauaaaaaauggaaagaaccuagaucuaaaaaaaaaaaaaaaaaaaaaaaaaaaaaaaaaaaaaaaaaaaaaaaaaaaaaaaaaaaaaaaaugcaucccccccccccccccccccccccccccccccaaaggcucuuuucagagccaccagaauu

SEQ ID NO: 7060 - RNA, 1858 nt, Artificial Sequence
  mRNA product Design i-2 comprising derived and/or modified sequence from LASV(G502-SLE-2009;Clade IV)__AIT17126__GPCstabilized (opt1)
ggggcgcugccuacggagguggcagccaucuccuucucggcaucaagcuuaccaugggccagaucgugaccuucuuccaggaggucccccacgugaucgaggaggugaugaacaucguccugaucgcccucagcauccuggccgugcugaaggggcucuacaacuucgcgaccugcggccugguggggcugcucacguuccugcugcucugcggccgcuccugcaccaccgggcuguacaagggcgucuacgagcugcagacccucgagcugaacauggagacgcugaacaugaccaugccgcucagcugcaccaagaacaacucccaccacuacaucauggugggcaacgagaccgggcuggagcugacgcucaccaacaccagcaucaucaaccacaaguucugcaaccuguccgacgcccacaagaagaaccuguacgaccacgcccucaugagcaucaucuccaccuuccaccugagcauccccaacuucaaccaguacgaggccauguccugcgacuucaacggcgggaagaucagcgugcaguacaaccugucccacagcuacgccggcgacgcggccgaccacugcgggacggucgccaacggcgugcuccagaccuucaugcggauggccuggggcggguccuacaucgcgcuggacagcggcugcgggcgcugggacugcaucaugaccuccuaccaguaccugaucauccagaacaccacgugggaggaccacugccaguucagccggcccucccccaucggcuaccucggccugcugagccagcgcacccgggacaucuacaucucccgccggcgccgggggaccuucaccuggacgcucagcgacagcgagggcaaggacacccccgggggcuacugccugacccgcuggaugcugaucgaggccgagcucaagugcuucgggaacaccgccguggccaagugcaacgagaagcacgacgaggaguucugcgacaugcugcggcuguucgacuucaacaagcaggccauccagcgccucaaggcgccggcccagauguccauccagcugaucaacaaggccgucaacgcccugaucaacgaccagcucgugaugaagaaccaccuccgggacaucaugugcauccccuacugcaacuacagccgcuacugguaccugaaccacacgaccaccggccggaccucccugcccaagugcuggcuggugagcaacggcuccuaccugaacgagacgcacuucagcgacgacaucgagcagcaggccgacaacaugaucaccgagaugcuccagaaggaguacauggagcgccaggggaagaccccgcugggccuggucgaccucuucguguucuccaccagcuucuaccugaucuccaucuuccugcaccuggugaagauccccacgcaccggcacaucgucggcaagagcugccccaagccccaccgccucaaccacauggggaucugcuccugcgggcuguacaagcagccgggcgugcccgugaaguggaagcggugaggacuagugcaucacauuuaaaagcaucucagccuaccaugagaauaagagaaagaaaaugaagaucaauagcuuauucaucucuuuuucuuuuucguugguguaaagccaacacccugucuaaaaaacauaaauuucuuuaaucauuuugccucuuuucucugugcuucaauuaauaaaaaauggaaagaaccuagaucuaaaaaaaaaaaaaaaaaaaaaaaaaaaaaaaaaaaaaaaaaaaaaaaaaaaaaaaaaaaaaaaaugcaucccccccccccccccccccccccccccccccaaaggcucuuuucagagccaccagaauu

SEQ ID NO: 7061 - RNA, 1858 nt, Artificial Sequence
  mRNA product Design i-2 comprising derived and/or modified sequence from LASV(G733-SLE-2010;Clade IV)__AIT17154__GPCstabilized (opt1)
ggggcgcugccuacggagguggcagccaucuccuucucggcaucaagcuuaccaugggccagaucgugaccuucuuccaggaggucccccacgugaucgaggaggugaugaacaucguccugaucgcccucagcauccuggccgugcugaaggggcucuacaacuucgcgaccugcggcaucguggggcuggucuccuuccugcuccugugcggccgcagcugcacgaccucccuguacaaggggguguacgagcuccagacccuggagcugaacauggagacccucaacaugacgaugccgcugagcugcaccaagaacaacucccaccacuacaucauggugggcaacgagaccggccuggagcucacccugacgaacaccagcaucaucaaccacaaguucugcaaccuguccgacgcccacaagaagaaccucuacgaccacgcccugaugagcaucaucuccaccuuccaccugagcauccccaacuucaaccaguacgaggccauguccugcgacuucaacgggggcaagaucagcguccaguacaaccucucccacagcuacgccggggacgcggccaaccacugcggcaccaucgccaacggggugcugcagacguucaugcggauggccuggggcggcuccuacaucgcgcuggacagcgggugcgaccgcugggacugcaucaugaccuccuaccaguaccucaucauccagaacaccaccugggaggaccacugccaguucagccggcccucccccaucggcuaccuggggcugcucagccagcgcacgcgggacaucuacaucagccgccggcgccggggcaccuucaccuggacccuguccgacagcgagggcaaggacacgcccgggggcuacugccugacccgcuggaugcucaucgaggccgagcugaagugcuucgggaacaccgccguggccaagugcaacgagaagcacgacgaggaguucugcgacaugcugcggcuguucgacuucaacaagcaggccauccagcgccugaaggcgccggcccagauguccauccagcugaucaacaaggccgucaacgcccucaucaacgaccagcugaucaugaagaaccaccuccgggacaucaugugcauccccuacugcaacuacagcaaguacugguaccucaaccacaccacgaccggcaagaccucccugcccaagugcuggcuggugagcaacggguccuaccucaacgagacccacuucagcgacgacaucgagcagcaggccgacaacaugaucacggagaugcugcagaaggaguacauggagcgccagggcaagaccccgcugggccucguggaccuguucgucuucuccaccagcuucuaccugaucuccaucuuccuccaccuggugaagauccccacccaccggcacguggucggcaagagcugccccaagccccaccgccugaaccacauggggaucugcuccugcgggcuguacggccagccgggggugcccgugaaguggaagcggugaggacuagugcaucacauuuaaaagcaucucagccuaccaugagaauaagagaaagaaaaugaagaucaauagcuuauucaucucuuuuucuuuuucguugguguaaagccaacacccugucuaaaaaacauaaauuucuuuaaucauuuugccucuuuucucugugcuucaauuaauaaaaaauggaaagaaccuagaucuaaaaaaaaaaaaaaaaaaaaaaaaaaaaaaaaaaaaaaaaaaaaaaaaaaaaaaaaaaaaaaaaugcaucccccccccccccccccccccccccccccccaaaggcucuuuucagagccaccagaauu

SEQ ID NO: 7062 - RNA, 1858 nt, Artificial Sequence
  mRNA product Design i-2 comprising derived and/or modified sequence from MOPV/LASV reassortant(IGS-1;Clade IV)__AFY05576__GPCstabilized (opt1)
ggggcgcugccuacggagguggcagccaucuccuucucggcaucaagcuuaccaugggccagaucgugaccuucuuccaggaggucccccacgugaucgaggaggugaugaacaucguccugaucgcccucagcgugcuggccgugcugaaggggcucuacaacuucgcgaccugcggccuggucgggcuggugacguuccuccugcugugcggccgcuccugcaccaccagccucuacaaggggguguacgagcugcagacccuggagcucaacauggagacgcugaacaugaccaugccgcuguccugcaccaagaacaacagccaccacuacaucauggucggcaacgagaccggccucgagcugacgcugaccaacaccuccaucaucaaccacaaguucugcaaccucagcgacgcccacaagaagaaccuguacgaccacgcccugauguccaucaucagcaccuuccaccucuccauccccaacuucaaccaguacgaggccaugagcugcgacuucaacgggggcaagaucuccgugcaguacaaccugagccacuccuacgccggggacgcggccaaccacugcggcacgguggccaacgggguccugcagaccuucaugcggauggccuggggcggcagcuacaucgcgcucgacuccgggugcggcaacugggacugcaucaugaccagcuaccaguaccugaucauccagaacaccacgugggaggaccacugccaguucucccgccccagccccaucggguaccugggccuccugucccagcggacccgcgacaucuacaucagccggcgccggcgcggcaccuucaccuggacgcugagcgacuccgagggggaggacaccccgggcggguacugccucacccgguggaugcugaucgaggccgagcugaagugcuucggcaacaccgccguggccaagugcaacgagaagcacgacgaggaguucugcgacaugcuccgccuguucgacuucaacaagcaggccauccagcggcugaaggcgcccgcccagaugagcauccagcucaucaacaaggccgugaacgcccugaucaacgaccagcugaucaugaagaaccaccuccgcgacaucaugugcauccccuacugcaacuacuccaaguacugguaccugaaccacacgaccaccgggcggaccagccugcccaagugcuggcucgucuccaacggcagcuaccugaacgagacgcacuucuccgacgacaucgagcagcaggccgacaacaugaucaccgagaugcugcagaaggaguacauggagcgccagggcaagaccccgcucgggcugguggaccuguucguguucagcaccuccuucuaccucaucagcaucuuccugcaccuggucaagauccccacgcaccggcacaucgugggcaaguccugccccaagccccaccgccugaaccacauggggaucugcagcugcggccucuacaagcagccgggggugcccgucaaguggaagcggugaggacuagugcaucacauuuaaaagcaucucagccuaccaugagaauaagagaaagaaaaugaagaucaauagcuuauucaucucuuuuucuuuuucguugguguaaagccaacacccugucuaaaaaacauaaauuucuuuaaucauuuugccucuuuucucugugcuucaauuaauaaaaaauggaaagaaccuagaucuaaaaaaaaaaaaaaaaaaaaaaaaaaaaaaaaaaaaaaaaaaaaaaaaaaaaaaaaaaaaaaaaugcaucccccccccccccccccccccccccccccccaaaggcucuuuucagagccaccagaauu

SEQ ID NO: 7063 - RNA, 1858 nt, Artificial Sequence
  mRNA product Design i-2 comprising derived and/or modified sequence from LASV(LM765-SLE-2012;Clade IV)__AIT17814__GPCstabilized (opt1)
ggggcgcugccuacggagguggcagccaucuccuucucggcaucaagcuuaccaugggccagaucgugaccuucuuccaggaggucccccacgugaucgaggaggugaugaacaucguccugaucgcccucagcauccuggccgugcugaaggggcucuacaacuucgcgaccugcggccugguggggcuggucacguuccuccugcugugcggccgcuccugcaccaccagccucuacaaggggguguacgagcugcagacccuggagcucaacauggagacgcugaacaugaccaugccgcuguccugcaccaagaacaacagccaccacuacaucauggugggcaacgagaccggccucgagcugacgcugaccaacaccuccaucaucgaccacaaguucugcaaccucagcgacgcccaccggaagaaccuguacgaccacgcccugauguccaucaucagcaccuuccaccucuccauccccaacuucaaccaguacgaggccaugagcugcgacuucaacgggggcaagaucuccguccaguacaaccugagccacuccuacgccaaggacgcggccgaccacugcgggacgguggccaacggcgugcugcagaccuucaugcgcauggccuggggcgggagcuacaucgcgcucgacuccggcugcgggcggugggacugcaucaugaccagcuaccaguaccugaucauccagaacaccacgugggaggaccacugccaguucucccgccccagccccaucggcuaccuggggcuccugucccagcggacccgcgacaucuacaucagccggcgccggcgcggcaccuucaccuggacgcugagcgacuccgagggcaaggacacccccgggggcuacugccucacccgguggaugcugaucgaggccgagcugaagugcuucgggaacaccgccgucgccaagugcaacgagaagcacgacgaggaguucugcgacaugcuccgccuguucgacuucaacaagcaggccauccagcggcugaaggcgccggcccagaugagcauccagcucaucaacaaggccgugaacgcccugaucaacgaccagcugaucaugaagaaccaccuccgcgacaucaugugcauccccuacugcaacuacuccaaguacugguaccugaaccacacgaccaccggcaagaccagccugcccaagugcuggcucguguccaacgggagcuaccugaacgagacgcacuucuccgacgacaucgagcagcaggccgacaacaugaucaccgagaugcugcagaaggaguacauggagcggcagggcaagaccccgcucggccuggucgaccuguucguguucagcaccuccuucuaccucaucagcaucuuccugcaccuggugaagauccccacgcaccgccacaucgucgggaagcccugccccaagccgcaccggcugaaccacaugggcaucugcuccugcgggcucuacaagcagcccggcgugcccgugaaguggaagcgcugaggacuagugcaucacauuuaaaagcaucucagccuaccaugagaauaagagaaagaaaaugaagaucaauagcuuauucaucucuuuuucuuuuucguugguguaaagccaacacccugucuaaaaaacauaaauuucuuuaaucauuuugccucuuuucucugugcuucaauuaauaaaaaauggaaagaaccuagaucuaaaaaaaaaaaaaaaaaaaaaaaaaaaaaaaaaaaaaaaaaaaaaaaaaaaaaaaaaaaaaaaaugcaucccccccccccccccccccccccccccccccaaaggcucuuuucagagccaccagaauu

SEQ ID NO: 7064 - RNA, 1858 nt, Artificial Sequence
  mRNA product Design i-2 comprising derived and/or modified sequence from LASV(LM776-SLE-2012;Clade IV)__AIT17824__GPCstabilized (opt1)
ggggcgcugccuacggagguggcagccaucuccuucucggcaucaagcuuaccaugggccagaucgugaccuucuuccaggaggucccccacgugaucgaggaggugaugaacaucguccugaucgcccucagcauccuggccgugcugaaggggcucuacaacuucgcgaccugcggccugguggggcuggucacguuccuccugcugugcggccgcuccugcaccaccagcguguacaaggggguguacgagcuccagacccuggagcugaacauggagacgcucaacaugaccaugccgcuguccugcaccaagaacaacagccaccacuacaucauggucggcaacgagaccggccuggagcucacgcugaccaacaccuccaucaucaaccacaaguucugcaaccugagcgacgcccacaagaagaaccucuacgaccacgcccugauguccaucaucagcaccuuccaccuguccauccccaacuucaaccaguacgaggccaugagcugcgacuucaacgggggcaagaucuccgugcaguacaaccucagccacuccuacgccggggacgcggccaaccacugcggcacgguggccaacgggguccugcagaccuucaugcggauggccuggggcggcagcuacaucgcgcuggacuccgggugcggcaagugggacugcaucaugaccagcuaccaguaccucaucauccagaacaccacgugggaggaccacugccaguucucccgccccagccccaucggguaccugggccugcucucccagcggacccgcgacaucuacaucagccggcgccggcgcggcaccuucaccuggacgcugagcgacuccgaggggaaggacaccccgggcggguacugccugacccgguggaugcucaucgaggccgagcugaagugcuucggcaacaccgccguggccaagugcaacgagaagcacgacgaggaguucugcgacaugcugcgccucuucgacuucaacaagcaggccauccagcggcugaaggcgcccgcccagaugagcauccagcugaucaacaaggccgugaacgcccucaucaacgaccagcugaucaugaagaaccaccuccgcgacaucaugugcauccccuacugcaacuacuccaaguacugguaccugaaccacacgaccaccgggaagaccagccugcccaagugcuggcuggucuccaacggcagcuaccucaacgagacgcacuucuccgacgacaucgagcagcaggccgacaacaugaucaccgagaugcugcagaaggaguacauggagcggcagggcaagaccccgcuggggcucguggaccuguucguguucagcaccuccuucuaccugaucagcaucuuccuccaccuggucaagauccccacgcaccgccacaucgugggcaaguccugccccaagccccaccggcugaaccacauggggaucugcagcugcggccuguacaagcagccgggggugcccguccgcuggaagcggugaggacuagugcaucacauuuaaaagcaucucagccuaccaugagaauaagagaaagaaaaugaagaucaauagcuuauucaucucuuuuucuuuuucguugguguaaagccaacacccugucuaaaaaacauaaauuucuuuaaucauuuugccucuuuucucugugcuucaauuaauaaaaaauggaaagaaccuagaucuaaaaaaaaaaaaaaaaaaaaaaaaaaaaaaaaaaaaaaaaaaaaaaaaaaaaaaaaaaaaaaaaugcaucccccccccccccccccccccccccccccccaaaggcucuuuucagagccaccagaauu

SEQ ID NO: 7065 - RNA, 1858 nt, Artificial Sequence
  mRNA product Design i-2 comprising derived and/or modified sequence from LASV(Mad39;Clade IV)__ANH09722__GPCstabilized (opt1)
ggggcgcugccuacggagguggcagccaucuccuucucggcaucaagcuuaccaugggccagaucgugaccuucuuccaggaggucccccacgugaucgaggaggugaugaacaucguccugaucgcccucagcauccuggccgugcugaaggggcucuacaacguggcgaccugcggccugaucgggcuggucacguuccuccugcugugcggccgcuccugcaccaccacccucuacaaggggguguacgagcugcaggcccuggagcucaacauggagacgcugaacaugaccaugccgcugagcugcaccaagaacaacucccaccacuacauccgggugggcaacgagaccggccucgagcugacgcugaccaacaccagccucaucaaccacaaguucugcaaccuguccgacgcccacaagaagaaccuguacgaccacgcccucaugagcaucaucuccaccuuccaccugagcauccccaacuucaaccaguacgaggccauguccugcgacuucaacgacgggaagaucagcguccaguacaaccugucccacacguacgcgggcgacaccgccaaccacugcgggaccguggccaacggcgugcuccagaccuucaugcgcauggccuggggcgggagcuacaucgcgcuggacuccggcugcgggggcugggacugcaucaugacgagcuaccaguaccugaucauccagaacaccaccugggaggaccacugccaguucucccggcccagccccaucggguaccucggccugcugucccagcgcacccgggacaucuacaucagccgccggcgccggggcacguucaccuggacccucuccgacagcgaggggaaggacaccccgggcggguacugccugacgcgcuggaugcugaucgaggccgagcucaagugcuucggcaacaccgccgucgccaagugcaacgagaagcacgacgaggaguucugcgacaugcugcggcuguucgacuucaacaagcaggccauccagcgccucaaggcgcccgcccagaugagcauccagcugaucaacaaggccgugaacgcccugaucaacgaccagcucaucaugaagaaccaccuccgggacaucaugugcauccccuacugcaacuacuccaaguacugguaccugaaccacaccgugaccgggaagacgagccugcccaagugcuggcuggucuccaacggcagcuaccugaacgagacccacuucuccgacgacaucgagcagcaggccgacaacaugaucaccgagaugcuccagaaggaguacauggagcgccagggcaagaccccgcuggggcugguggaccucuucguguucagcacguccuucuaccugaucagcaucuuccugcaccuggucaagauccccacccaccggcacguggugggcaagcccugccccaagccgcaccgccucaaccacauggggaucugcuccugcggcuucuacaagcagcccgggguccccgugcgguggaagcgcugaggacuagugcaucacauuuaaaagcaucucagccuaccaugagaauaagagaaagaaaaugaagaucaauagcuuauucaucucuuuuucuuuuucguugguguaaagccaacacccugucuaaaaaacauaaauuucuuuaaucauuuugccucuuuucucugugcuucaauuaauaaaaaauggaaagaaccuagaucuaaaaaaaaaaaaaaaaaaaaaaaaaaaaaaaaaaaaaaaaaaaaaaaaaaaaaaaaaaaaaaaaugcaucccccccccccccccccccccccccccccccaaaggcucuuuucagagccaccagaauu

SEQ ID NO: 7066 - RNA, 1858 nt, Artificial Sequence
  mRNA product Design i-2 comprising derived and/or modified sequence from LASV(Z0947-SLE-2011;Clade IV)__AIT17840__GPCstabilized (opt1)
ggggcgcugccuacggagguggcagccaucuccuucucggcaucaagcuuaccaugggccagaucgugaccuucuuccaggaggucccccacgugaucgaggaggugaugaacaucguccugaucgcccucagcauccuggccgugcugaaggggcucuacaacuucgcgaccugcggccugguggggcuggucacguuccuccugcugugcggccgcuccugcaccaucagccucuacaaggggguguacgagcugcagacccuggagcucaacauggagacccugaacaugacgaugccgcuguccugcaccaagaacaacagccaccacuacaucauggugggcaacgagaccggccucgagcugacccugacgaacaccuccaucaucaaccacaaguucugcaaccucagcgacgcccacaagaagaaccuguacgaccacgcccugauguccaucaucagcaccuuccaccucuccauccccaacuucaaccaguacgaggccaugagcugcgacuucaacgggggcaagaucuccguccaguacaaccugagccacuccuacgccggggacgcggccaaccacugcggcaccguggccaacggggugcugcagacguucaugcggauggccuggggcggcagcuacaucgcgcucgacuccgggugcgaccgcugggacugcaucaugaccagcuaccaguaccugaucauccagaacaccaccugggaggaccacugccaguucucccggcccagccccaucggcuaccuggggcuccugucccagcgcacgcgggacaucuacaucagccgccggcgccggggcaccuucaccuggacccugagcgacuccgagggcaaggacacgcccgggggcuacugccucacccgcuggaugcugaucgaggccgagcugaagugcuucgggaacaccgccgucgccaagugcaacgagaagcacgacgaggaguucugcgacaugcuccggcuguucgacuucaacaagcaggccauccagcgccugaaggcgccggcccagaugagcauccagcucaucaacaaggccgugaacgcccugaucaacgaccagcugaucaugaagaaccaccuccgggacaucaugugcauccccuacugcaacuacuccaaguacugguaccugaaccacaccacgaccggcaagaccagccugcccaagugcuggcucguguccaacgggagcuaccugaacgagacccacuucuccgacgacaucgagcagcaggccgacaacaugaucacggagaugcugcagaaggaguacauggagcgccagggcaagaccccgcucggccuggucgaccuguucguguucagcaccuccuucuaccucaucagcaucuuccugcaccuggugaagauccccacccaccggcacaucgucgggaagcccugccccaagccgcaccgccugaaccacaugggcaucugcuccugcgggcucuacaagcagcccggcgugcccgugaaguggaagcggugaggacuagugcaucacauuuaaaagcaucucagccuaccaugagaauaagagaaagaaaaugaagaucaauagcuuauucaucucuuuuucuuuuucguugguguaaagccaacacccugucuaaaaaacauaaauuucuuuaaucauuuugccucuuuucucugugcuucaauuaauaaaaaauggaaagaaccuagaucuaaaaaaaaaaaaaaaaaaaaaaaaaaaaaaaaaaaaaaaaaaaaaaaaaaaaaaaaaaaaaaaaugcaucccccccccccccccccccccccccccccccaaaggcucuuuucagagccaccagaauu

SEQ ID NO: 7067 - RNA, 1858 nt, Artificial Sequence
  mRNA product Design i-2 comprising derived and/or modified sequence from LASV(Josiah;Clade IV)__NP_694870__GPCstabilized (opt2)
ggggcgcugccuacggagguggcagccaucuccuucucggcaucaagcuuaccaugggccagaucgucaccuucuuccaggaggucccccacgucaucgaggaggucaugaacaucguccucaucgcccucuccguccucgccguccucaagggccucuacaacuucgccaccugcggccucgucggccucgucaccuuccuccuccucugcggccgcuccugcaccaccucccucuacaagggcgucuacgagcuccagacccucgagcucaacauggagacccucaacaugaccaugccccucuccugcaccaagaacaacucccaccacuacaucauggucggcaacgagaccggccucgagcucacccucaccaacaccuccaucaucaaccacaaguucugcaaccucuccgacgcccacaagaagaaccucuacgaccacgcccucauguccaucaucuccaccuuccaccucuccauccccaacuucaaccaguacgaggccauguccugcgacuucaacggcggcaagaucuccguccaguacaaccucucccacuccuacgccggcgacgccgccaaccacugcggcaccgucgccaacggcguccuccagaccuucaugcgcauggccuggggcggcuccuacaucgcccucgacuccggcugcggcaacugggacugcaucaugaccuccuaccaguaccucaucauccagaacaccaccugggaggaccacugccaguucucccgccccucccccaucggcuaccucggccuccucucccagcgcacccgcgacaucuacaucucccgccgccgccggggcaccuucaccuggacccucuccgacuccgagggcaaggacacccccggcggcuacugccucacccgcuggaugcucaucgaggccgagcucaagugcuucggcaacaccgccgucgccaagugcaacgagaagcacgacgaggaguucugcgacaugcuccgccucuucgacuucaacaagcaggccauccagcgccucaaggcccccgcccagauguccauccagcucaucaacaaggccgucaacgcccucaucaacgaccagcucaucaugaagaaccaccuccgcgacaucaugugcauccccuacugcaacuacuccaaguacugguaccucaaccacaccaccaccggccgcaccucccuccccaagugcuggcucgucuccaacggcuccuaccucaacgagacccacuucuccgacgacaucgagcagcaggccgacaacaugaucaccgagaugcuccagaaggaguacauggagcgccagggcaagaccccccucggccucgucgaccucuucgucuucuccaccuccuucuaccucaucuccaucuuccuccaccucgucaagauccccacccaccgccacaucgucggcaaguccugccccaagccccaccgccucaaccacaugggcaucugcuccugcggccucuacaagcagcccggcguccccgucaaguggaagcgcugaggacuagugcaucacauuuaaaagcaucucagccuaccaugagaauaagagaaagaaaaugaagaucaauagcuuauucaucucuuuuucuuuuucguugguguaaagccaacacccugucuaaaaaacauaaauuucuuuaaucauuuugccucuuuucucugugcuucaauuaauaaaaaauggaaagaaccuagaucuaaaaaaaaaaaaaaaaaaaaaaaaaaaaaaaaaaaaaaaaaaaaaaaaaaaaaaaaaaaaaaaaugcaucccccccccccccccccccccccccccccccaaaggcucuuuucagagccaccagaauu

SEQ ID NO: 7068 - RNA, 1855 nt, Artificial Sequence
  mRNA product Design i-2 comprising derived and/or modified sequence from LASV(LP;Clade I)__AAF86701__GPCstabilized (opt2)
ggggcgcugccuacggagguggcagccaucuccuucucggcaucaagcuuaccaugggccagaucaucaccuucuuccaggaggucccccacgucaucgaggaggucaugaacaucguccucaucgcccucucccuccucgccauccucaagggccucuacaacaucgccaccugcggcaucaucggccucgucgccuuccucuuccucugcggcaaguccugcucccucacccucaagggcggcuacgagcuccagacccucgagcucaacauggagacccucaacaugaccaugccccucuccugcaccaagaacuccucccaccacuacauccgcgucggcaacgagaccggccucgagcucacccucaccaacaccuccaucaucaaccacaaguucugcaaccucuccgacgcccacaagaagaaccucuacgaccacgcccucauguccaucaucuccaccuuccaccucuccauccccaacuucaaccaguacgaggccauguccugcgacuucaacggcggcaagaucuccguccaguacaaccucucccacuccuacgccggcgacgccgccgagcacugcggcaccgucgccaacggcguccuccagaccuucaugcgcauggccuggggcggccgcuacaucgcccucgacuccggcugcggcaacugggacugcaucaugaccuccuaccaguaccucaucauccagaacaccaccugggaggaccacugccaguucucccgccccucccccaucggcuaccucggccuccucucccagcgcacccgcgacaucuacaucucccgccgccgccggggcaccuucaccuggacccucuccgacuccgagggcaacgagacccccggcggcuacugccucacccgcuggaugcucaucgaggccgagcucaagugcuucggcaacaccgccgucgccaagugcaacgagaagcacgacgaggaguucugcgacaugcuccgccucuucgacuucaacaagcaggccauccgccgccucaaggcccccgcccagauguccauccagcucaucaacaaggccgucaacgcccucaucaacgaccagcucaucaugaagaaccaccuccgcgacaucaugugcauccccuacugcaacuacuccaaguacugguaccucaaccacaccuccuccggccgcaccucccuccccaagugcuggcucaucuccaacggcuccuaccucaacgagacccaguucuccgacgacaucgagcagcaggccgacaacaugaucaccgagaugcuccagaaggaguacaucgagcgccagggcaagaccccccucggccucgucgacaucuucaucuucuccaccuccuucuaccucaucuccaucuuccuccaccucaucaagauccccacccaccgccacaucgucggcaagcccugccccaagccccaccgccucaaccacaugggcgucugcuccugcggccucuacaagcaccccggcguccccaccaaguggaagcgcugaggacuagugcaucacauuuaaaagcaucucagccuaccaugagaauaagagaaagaaaaugaagaucaauagcuuauucaucucuuuuucuuuuucguugguguaaagccaacacccugucuaaaaaacauaaauuucuuuaaucauuuugccucuuuucucugugcuucaauuaauaaaaaauggaaagaaccuagaucuaaaaaaaaaaaaaaaaaaaaaaaaaaaaaaaaaaaaaaaaaaaaaaaaaaaaaaaaaaaaaaaaugcaucccccccccccccccccccccccccccccccaaaggcucuuuucagagccaccagaauu

SEQ ID NO: 7069 - RNA, 1855 nt, Artificial Sequence
  mRNA product Design i-2 comprising derived and/or modified sequence from LASV(803213;Clade II)__AAF86703__GPCstabilized (opt2)
ggggcgcugccuacggagguggcagccaucuccuucucggcaucaagcuuaccaugggccagaucaucaccuucuuccaggaggucccccacgucaucgaggaggucaugaacaucguccucaucgcccucucccuccucgccauccucaagggcaucuacaacgucgccaccugcggccucuucggccucaucuccuuccuccuccucugcggccgcuccugcuccgucaccuacaagggcgucuacgagcuccagacccucgagcucaacauggccaaccucaacaugaccaugccccucuccugcaccaagaacaacucccaccacuacaucauggucggcaacgagaccggccucgagcucacccucaccaacaccuccaucaucaaccacaaguucugcaaccucuccgacgcccacaagaagaaccucuacgaccacgcccucauguccaucaucuccaccuuccaccucuccauccccaacuucaaccaguacgaggccauguccugcgacuucaacggcggcaagaucuccguccaguacaaccucucccacuccuucgccgucgacgccgccaaccacugcggcaccaucgccaacggcguccuccagaccuucaugcgcauggccuggggcggcuccuacaucgcccucgacuccggcugcggcaacugggacugcaucaugaccuccuaccaguaccucaucauccagaacaccaccugggaggaccacugccaguucucccgccccucccccaucggcuaccucggccuccucucccagcgcacccgcgacaucuacaucucccgccgccgccggggcaccuucaccuggacccucuccgacuccgagggcaacgaggcccccggcggcuacugccucacccgcuggaugcucaucgaggccgagcucaagugcuucggcaacaccgccgucgccaagugcaacgagaagcacgacgaggaguucugcgacaugcuccgccucuucgacuucaacaagcaggccaucaagcgccucaagacccccgcccagauguccauccagcucaucaacaaggccgucaacgcccucaucaacgaccagcucaucaugaagaaccaccuccgcgacaucaugugcauccccuacugcaacuacucccgcuacugguaccucaaccacaccgucaccggcaagaccucccucccccgcugcuggcucgucuccaacggcuccuaccucaacgagacccacuucuccgacgacaucgagcagcaggccgacaacaugaucaccgagaugcuccagaaggaguacauggaccgccagggcaagaccccccucggccucgucgaccucuucgucuucuccaccuccuucuaccucaucuccaucuuccuccaccucgucaagauccccacccaccgccacaucgucggcaagcccugccccaagccccaccgccucaaccacaugggcaucugcuccugcggccucuacaagcaccccggcguccccgucaaguggaagcgcugaggacuagugcaucacauuuaaaagcaucucagccuaccaugagaauaagagaaagaaaaugaagaucaauagcuuauucaucucuuuuucuuuuucguugguguaaagccaacacccugucuaaaaaacauaaauuucuuuaaucauuuugccucuuuucucugugcuucaauuaauaaaaaauggaaagaaccuagaucuaaaaaaaaaaaaaaaaaaaaaaaaaaaaaaaaaaaaaaaaaaaaaaaaaaaaaaaaaaaaaaaaugcaucccccccccccccccccccccccccccccccaaaggcucuuuucagagccaccagaauu

SEQ ID NO: 7070 - RNA, 1855 nt, Artificial Sequence
  mRNA product Design i-2 comprising derived and/or modified sequence from LASV(GA391;Clade III)__CAA36645__GPCstabilized (opt2)
ggggcgcugccuacggagguggcagccaucuccuucucggcaucaagcuuaccaugggccagaucgucaccuucuuccaggaggucccccacgucaucgaggaggucaugaacaucguccucaucgcccucuccauccucgccauccucaagggccucuacaacgucgccaccugcggccucaucggccucgucaccuuccuccuccucuccggccgcuccugcucccucaucuacaagggcaccuacgagcuccagacccucgagcucaacauggagacccucaacaugaccaugccccucuccugcaccaagaacaacucccaccacuacauccgcgucggcaacgagaccggccucgagcucacccucaccaacaccuccauccucaaccacaaguucugcaaccucuccgacgcccacaagcgcaaccucuacgaccacucccucauguccaucaucuccaccuuccaccucuccauccccaacuucaaccaguacgaggccauguccugcgacuucaacggcggcaagaucaccguccaguacaaccucucccacuccuucgccgucgacgccgccggccacugcggcacccucgccaacggcguccuccagaccuucaugcgcauggccuggggcggcuccuacaucgcccucgacuccggcugcggcaacugggacugcaucaugaccuccuaccaguaccucaucauccagaacaccaccugggacgaccacugccaguucucccgccccucccccaucggcuaccucggccuccucucccagcgcacccgcgacaucuacaucucccgccgccgccggggcaccuucaccuggacccucuccgacuccgagggcaacgagacccccggcggcuacugccucacccgcuggaugcucaucgaggccgagcucaagugcuucggcaacaccgccgucgccaagugcaacgagaagcacgacgaggaguucugcgacaugcuccgccucuucgacuucaacaagcaggccauccgccgccucaagacccccgcccagauguccauccagcucaucaacaaggccgucaacgcccucaucaacgaccagcucaucaugaagaaccaccuccgcgacaucaugugcauccccuacugcaacuacucccgcuacugguaccucaaccacaccuccaccggcaagaccucccucccccgcugcuggcucaucuccaacggcuccuaccucaacgagaccaaguucuccgacgacaucgagcagcaggccgacaacaugaucaccgagaugcuccagaaggaguacaucgaccgccagggcaagaccccccucggccucgucgaccucuucgucuucuccaccuccuucuaccucaucuccaucuuccuccaccucgucaagauccccacccaccgccacaucgucggcaagcccugccccaagccccaccgccucaaccacaugggcaucugcuccugcggccucuacaagcagcccggcguccccguccgcuggaagcgcugaggacuagugcaucacauuuaaaagcaucucagccuaccaugagaauaagagaaagaaaaugaagaucaauagcuuauucaucucuuuuucuuuuucguugguguaaagccaacacccugucuaaaaaacauaaauuucuuuaaucauuuugccucuuuucucugugcuucaauuaauaaaaaauggaaagaaccuagaucuaaaaaaaaaaaaaaaaaaaaaaaaaaaaaaaaaaaaaaaaaaaaaaaaaaaaaaaaaaaaaaaaugcaucccccccccccccccccccccccccccccccaaaggcucuuuucagagccaccagaauu

SEQ ID NO: 7071 - RNA, 1858 nt, Artificial Sequence
  mRNA product Design i-2 comprising derived and/or modified sequence from LASV(AV;Clade V)__CCA30314__GPCstabilized (opt2)
ggggcgcugccuacggagguggcagccaucuccuucucggcaucaagcuuaccaugggccagaucgucaccuucuuccaggaggucccccacgucaucgaggaggucaugaacaucguccucaucgcccucuccauccucgccguccucaagggccucuacaacaucgccaccugcggccucaucggccucaucaccuuccuccuccucugcggccgcuccugcuccuccaaccucuacaagggcgucuacgagcuccagucccucgaccucaacauggagacccucaacaugaccaugccccucuccugcaccaagaacaacucccaccacuacauccgcgucggcaacgacaccggccucgagcucacccucaccaacaccuccauccucaaccacaaguucugcaaccucuccgacgcccacaagaaggaccucuacgaccacgcccucauguccaucaucuccaccuuccaccucuccauccccaacuucaaccaguacgaggccauguccugcgacuucaacggcggcaagaucuccguccaguacaaccucucccacuccuacgccaucgacgccgccaaccacugcggcaccgucgccaacggcauccuccagaccuucaugcgcauggccuggggcggcuccuacaucgcccucgacuccggcugcggcaacugggacugcaucaugaccuccuaccaguaccucaucauccagaacaccaccugggagaaccacugccaguucucccgccccucccccaucggcuaccucggccuccucucccagcgcacccgcgacaucuacaucucccgccgccgccggggcaccuucaccuggacccucuccgacuccgagggcaacgccacccccggcggcuacugccucacccgcuggaugcucaucgaggccgagcucaagugcuucggcaacaccgccgucgccaagugcaacgagaagcacgacgaggaguucugcgacaugcuccgccucuucgacuucaacaagcaggccaucucccgccucaagucccccgcccagauguccauccagcucaucaacaaggccgucaacgcccucaucaacgaccagcucaucaugaagaaccaccuccgcgacaucaugugcauccccuacugcaacuacuccaaguacugguaccucaaccacaccaucaccggcaagaccucccuccccaagugcuggcucgucuccaacggcuccuaccucaacgagacccacuucuccgacgacaucgagcagcaggccgacaacaugaucaccgagaugcuccagaaggaguacauggagcgccagggcaagaccccccucggccucgucgaccucuucgucuucuccaccuccuucuaccucaucuccaucuuccuccgccucgucaagauccccacccaccgccacaucgucggcaagcccugccccaagccccaccgccucaaccacaugggcaucugcuccugcggccucuacaagcagcccggcguccccguccgcuggaagcgcugaggacuagugcaucacauuuaaaagcaucucagccuaccaugagaauaagagaaagaaaaugaagaucaauagcuuauucaucucuuuuucuuuuucguugguguaaagccaacacccugucuaaaaaacauaaauuucuuuaaucauuuugccucuuuucucugugcuucaauuaauaaaaaauggaaagaaccuagaucuaaaaaaaaaaaaaaaaaaaaaaaaaaaaaaaaaaaaaaaaaaaaaaaaaaaaaaaaaaaaaaaaugcaucccccccccccccccccccccccccccccccaaaggcucuuuucagagccaccagaauu

SEQ ID NO: 7072 - RNA, 1855 nt, Artificial Sequence
  mRNA product Design i-2 comprising derived and/or modified sequence from LASV(Togo/2016/7082;Clade VI)__AMR44577__GPCstabilized (opt2)
ggggcgcugccuacggagguggcagccaucuccuucucggcaucaagcuuaccaugggccagaucaucaccuucuuccaggaggucccccacgucaucgaggaggucaugaacaucguccucaucgcccucucccuccucgccauccucaagggcgucuacaacgucgccaccugcggcaucaucggccucgucaccuuccucuuccucugcggccgcuccugcucccucaucuacaagggcuccuacgagcuccagacccucgagcucaacauggagacccucaacaugaccaugccccucuccugcaccaagaacuccucccaccacuacauccgcgucggcaacgagaccggccucgagcucacccucaccaacaccuccaucaucaaccacaaguucugcaaccucuccgacgcccacaagcgcaaccucuacgaccacgcccucauguccauccucuccaccuuccaccucuccauccccaacuucaaccaguacgaggccauguccugcgacuucaacggcggcaagaucuccguccaguacaaccucucccacgccuacgccgucgacgccgccgagcacugcggcaccgucgccaacggcguccuccagaccuucaugcgcauggccuggggcggcuccuacaucgcccucgacuccggcugcggcaacugggacugcaucaugaccuccuaccaguaccucaucauccagaacaccaccugggaggaccacugccaguucucccgccccucccccaucggcuaccucggccuccucucccagcgcacccgcgacaucuacaucucccgccgccgccggggcaccuucaccuggacccucuccgacuccgagggcaacgagacccccggcggcuacugccucacccgcuggaugcucaucgaggccgagcucaagugcuucggcaacaccgccgucgccaagugcaacgagaagcacgacgaggaguucugcgacaugcuccgccucuucgacuucaacaagcaggccauccagcgccucaagucccccgcccagauguccauccagcucaucaacaaggccgucaacgcccucaucaacgaccagcucaucaugaagaaccaccuccgcgacaugaugugcauccccuacugcaacuacuccaaguacugguaccucaaccacaccuccuccggccgcaccucccuccccaagugcuggcucgucuccaacggcuccuaccucaacgagacccacuucuccgacgacaucgagcagcaggccgacaacaugaucaccgagaugcuccagaaggaguacaucgaccgccagggcaagaccccccucggccucgucgaccucuucgucuucuccaccuccuucuaccucaucuccaucuuccuccaccucaucaagauccccacccaccgccacaucgucggcaagcccugccccaagccccaccgccucaaccacaugggcaucugcuccugcggccucuacaagcagcccggcguccccacccgcuggaagcgcugaggacuagugcaucacauuuaaaagcaucucagccuaccaugagaauaagagaaagaaaaugaagaucaauagcuuauucaucucuuuuucuuuuucguugguguaaagccaacacccugucuaaaaaacauaaauuucuuuaaucauuuugccucuuuucucugugcuucaauuaauaaaaaauggaaagaaccuagaucuaaaaaaaaaaaaaaaaaaaaaaaaaaaaaaaaaaaaaaaaaaaaaaaaaaaaaaaaaaaaaaaaugcaucccccccccccccccccccccccccccccccaaaggcucuuuucagagccaccagaauu

SEQ ID NO: 7073 - RNA, 1855 nt, Artificial Sequence
  mRNA product Design i-2 comprising derived and/or modified sequence from LASV(KAK-428;Clade n.d. (VII))__ANH09740__GPCstabilized (opt2)
ggggcgcugccuacggagguggcagccaucuccuucucggcaucaagcuuaccaugggccagaucgucaccuucuuccaggaggucccccacgucaucgaggaggucaugaacaucguccucaucgcccucucccuccucgccauccucaagggccucuacaacuucgccaccugcggcgucaucggccucaucaccuuccuccuccucugcggccgcuccugcuccgccaccuacaagggccaguacgagcuccagacccucgagcucaacauggagucccucaacaugaccaugccccucuccugcaccaagaacaacucccaccacuacauccgcgccggcaacaacaccggccucgagcucacccucaccaacaccuccaucaucucccacaaguucugcaaccucuccgacgcccacaagaagaaccucuacgaccacacccucauguccaucaucaccaccuuccaccucuccauccccaacuucaaccaguacgaggccauguccugcgacuucaacggcggcaagaucuccauccaguacaaccucucccacuccuacgccggcgacgccgcccagcacugcggcaccgucgccaacggcguccuccagaccuucaugcgcauggccuggggcggcuccuaccucgcccucgacuccggcugccgcggcugggacugcaucaucuccuccuaccaguaccucaucauccagaacaccaccugggacgaccacugccaguucucccgccccucccccaucggcuaccucggcuucgucucccagaagacccgcgacaucuacaucucccgccgccgccggggcaccuucaccuggacccucuccgacuccgagggccacgacaugcccggcggcuacugccucacccgcuggaugcucaucgaggccgaccucaagugcuucggcaacaccgccgucgccaagugcaacgagaagcacgacgaggaguucugcgacauguggcgccucuucgacuucaacaagcaggccauccagcgccucaaggcccccgcccagaugaacauccagcucaucaacaaggccgucaacgcccucaucaacgaccagcucaugaugaagaaccaccuccgcgacaucaugugcauccccuacugcaacuacuccaaguucugguaccucaacaacaccaccaccggccgcaccucccucccccgcugcuggcucaucuccaacggcuccuaccucaacgagacccacuucuccgacgacaucgagcagcaggccgacaacaugaucaccgagaugcuccagaaggaguacauggaccgccagggcaagaccccccucggccucgucgaccucuucgucuucuccaccuccuucuaccucaucaccaucuuccuccaccucgucaagauccccacccaccgccacaucgucggcaagcccugccccaagccccaccgccucaaccacaugggcaucugcuccugcggccucuacaagcagcccggcguccccguccgcuggaagcgcugaggacuagugcaucacauuuaaaagcaucucagccuaccaugagaauaagagaaagaaaaugaagaucaauagcuuauucaucucuuuuucuuuuucguugguguaaagccaacacccugucuaaaaaacauaaauuucuuuaaucauuuugccucuuuucucugugcuucaauuaauaaaaaauggaaagaaccuagaucuaaaaaaaaaaaaaaaaaaaaaaaaaaaaaaaaaaaaaaaaaaaaaaaaaaaaaaaaaaaaaaaaugcaucccccccccccccccccccccccccccccccaaaggcucuuuucagagccaccagaauu

SEQ ID NO: 7074 - RNA, 1855 nt, Artificial Sequence; identical to SEQ ID NO: 7068
  mRNA product Design i-2 comprising derived and/or modified sequence from LASV(Pinneo-NIG-1969;Clade I)__AIT17836__GPCstabilized (opt2)

SEQ ID NO: 7075 - RNA, 1855 nt, Artificial Sequence
  mRNA product Design i-2 comprising derived and/or modified sequence from LASV(ISTH0009-NIG-2011;Clade II)__AIT17404__GPCstabilized (opt2)
ggggcgcugccuacggagguggcagccaucuccuucucggcaucaagcuuaccaugggccagaucaucaccuucuuccaggaggucccccacgucaucgaggaggucaugaacaucguccucaucgcccucucccuccucgccauccucaagggcaucuacaacgucgccaccugcggccucuucggccucgucuccuuccuccuccucugcggccgcuccugcuccaccaccuacaagggcgucuacgagcuccagacccucgagcucgacauggccucccucaacaugaccaugccccucuccugcaccaagaacaacucccaccacuacaucauggucggcaacgagaccggccucgagcucacccucaccaacaccuccaucaucaaccacaaguucugcaaccucuccgacgcccacaagaagaaccucuacgaccacgcccucauguccaucaucuccaccuuccaccucuccauccccaacuucaaccaguacgaggccauguccugcgacuucaacggcggcaagaucuccguccaguacaaccucucccacgccuacgccgucgacgccgccaaccacugcggcaccaucgccaacggcguccuccagaccuucaugcgcauggccuggggcggcuccuacaucgcccucgacuccggcugcggcuccugggacugcaucaugaccuccuaccaguaccucaucauccagaacaccaccugggaggaccacugccaguucucccgccccucccccaucggcuaccucggccuccucucccagcgcacccgcgacaucuacaucucccgccgccgccggggcaccuucaccuggacccucuccgacuccgagggcaacgagacccccggcggcuacugccucacccgcuggaugcucaucgaggccgagcucaagugcuucggcaacaccgccgucgccaagugcaacgagaagcacgacgaggaguucugcgacaugcuccgccucuucgacuucaacaagcaggccauccgccgccucaagacccccgcccagauguccauccagcucaucaacaaggccgucaacgcccucaucaacgaccagcucaucaugaagaaccaccuccgcgacaucaugugcauccccuacugcaacuacuccaaguacugguaccucaaccacaccgucaccggcaagaccucccucccccgcugcuggcucgucuccaacggcuccuaccucaacgagacccacuucuccgacgacaucgagcagcaggccgacaacaugaucaccgagcuccuccagaaggaguacauggaccgccagggcaagaccccccucggccucgucgaccucuucgucuucuccaccuccuucuaccucaucuccaucuuccuccaccucaucaagauccccacccaccgccacaucaccggcaagcccugccccaagccccaccgccucaaccacaugggcaucugcuccugcggccucuacaagcaccccggcguccccgucaaguggaagcgcugaggacuagugcaucacauuuaaaagcaucucagccuaccaugagaauaagagaaagaaaaugaagaucaauagcuuauucaucucuuuuucuuuuucguugguguaaagccaacacccugucuaaaaaacauaaauuucuuuaaucauuuugccucuuuucucugugcuucaauuaauaaaaaauggaaagaaccuagaucuaaaaaaaaaaaaaaaaaaaaaaaaaaaaaaaaaaaaaaaaaaaaaaaaaaaaaaaaaaaaaaaaugcaucccccccccccccccccccccccccccccccaaaggcucuuuucagagccaccagaauu

SEQ ID NO: 7076 - RNA, 1855 nt, Artificial Sequence
  mRNA product Design i-2 comprising derived and/or modified sequence from LASV(ISTH2010-NIG-2012;Clade II)__AIT17482__GPCstabilized (opt2)
ggggcgcugccuacggagguggcagccaucuccuucucggcaucaagcuuaccaugggccagaucaucaccuucuuccaggaggucccccacgucaucgaggaggucaugaacaucguccucaucgcccucucccuccucgccauccucaagggcaucuacaacgucgccaccugcggccucuucggccucgucuccuuccuccuccucugcggccgcuccugcuccaccaccuacaagggcgucuacgagcuccagacccucgagcucgacauggccucccucaacaugaccaugccccucuccugcaccaagaacaacucccaccacuacaucauggucggcaacgagaccggccucgagcucacccucaccaacaccuccaucaucaaccacaaguucugcaaccucuccgacgcccacaagaagaaccucuacgaccacgcccucauguccaucaucuccaccuuccaccucuccauccccaacuucaaccaguacgaggccauguccugcgacuucaacggcggcaagaucuccguccaguacaaccucucccacgccuacgccgucgacgccgccaaccacugcggcaccaucgccaacggcguccuccagaccuucaugcgcauggccuggggcggcuccuacaucgcccucgacuccggcugcggcuccugggacugcaucaugaccuccuaccaguaccucaucauccagaacaucaccugggaggaccacugccaguucucccgccccucccccaucggcuaccucggccuccucucccagcgcacccgcgacaucuacaucucccgccgccgccggggcaccuucaccuggacccucuccgacuccgagggcaacgagacccccggcggcuacugccucacccgcuggaugcucaucgaggccgagcucaagugcuucggcaacaccgccgucgccaagugcaacgagaagcacgacgaggaguucugcgacaugcuccgccucuucgacuucaacaagcaggccauccgccgccucaagacccccgcccagauguccauccagcucaucaacaaggccgucaacgcccucaucaacgaccagcucaucaugaagaaccaccuccgcgacaucaugugcauccccuacugcaacuacuccaaguacugguaccucaaccacaccgucaccggcaagaccucccucccccgcugcuggcucgucuccaacggcuccuaccucaacgagacccacuucuccgacgacaucgagcagcaggccgacaacaugaucaccgagcuccuccagaaggaguacaucgaccgccagggcaagaccccccucggccucgucgaccucuucgucuucuccaccuccuucuaccucaucuccaucuuccuccaccucgucaagauccccacccaccgccacgucgucggcaagcccugccccaagccccaccgccucaaccacaugggcaucugcuccugcggccucuacaagcaccccggcguccccgucaaguggaagcgcugaggacuagugcaucacauuuaaaagcaucucagccuaccaugagaauaagagaaagaaaaugaagaucaauagcuuauucaucucuuuuucuuuuucguugguguaaagccaacacccugucuaaaaaacauaaauuucuuuaaucauuuugccucuuuucucugugcuucaauuaauaaaaaauggaaagaaccuagaucuaaaaaaaaaaaaaaaaaaaaaaaaaaaaaaaaaaaaaaaaaaaaaaaaaaaaaaaaaaaaaaaaugcaucccccccccccccccccccccccccccccccaaaggcucuuuucagagccaccagaauu

SEQ ID NO: 7077 - RNA, 1855 nt, Artificial Sequence
  mRNA product Design i-2 comprising derived and/or modified sequence from LASV(Lassa virus/H.sapiens-wt/NGA/2015/ISTH_0543;Clade II)__AVO03639__GPCstabilized (opt2)
ggggcgcugccuacggagguggcagccaucuccuucucggcaucaagcuuaccaugggccagaucaucaccuucuuccaggaggucccccacgucaucgaggaggucaugaacaucguccucaucgcccucucccuccucgccauccucaagggcaucuacaacgucgccaccugcggccucuucggccucgucuccuuccuccuccucugcggccgcuccugcuccaccaccuacaagggcgucuacgagcuccagacccucgagcucgacauggccaaccucaacaugaccaugccccucuccugcaccaagaacaacucccaccacuacaucauggucggcaacgagaccggccucgagcucacccucaccaacaccuccaucaucaaccacaaguucugcaaccucuccgacgcccacaagaagaaccucuacgaccacgcccucauguccaucaucuccaccuuccaccucuccauccccaacuucaaccaguacgaggccauguccugcgacuucaacggcggcaagaucuccguccaguacaaccucucccacaccuacgccgucgacgccgccaaccacugcggcaccaucgccaacggcguccuccagaccuucaugcgcauggccuggggcggcuccuacaucgcccucgacuccggcugcggcuccugggacugcaucaugaccuccuaccaguaccucgucauccagaacaccaccugggaggaccacugccaguucucccgccccucccccaucggcuaccucggccuccucucccagcgcacccgcgacaucuacaucucccgccgccgccggggcaccuucaccuggacccucuccgacuccgagggcaacgagacccccggcggcuacugccucacccgcuggaugcucaucgaggccgagcucaagugcuucggcaacaccgccgucgccaagugcaacgagaagcacgacgaggaguucugcgacaugcuccgccucuucgacuucaacaagcaggccauccgccgccucaagacccccgcccagauguccauccagcucaucaacaaggccgucaacgcccucaucaacgaccagcucaucaugaagaaccaccuccgcgacaucaugugcauccccuacugcaacuacuccaaguacugguaccucaaccacaccgucaccggcaagaccucccucccccgcugcuggcucgucuccaacggcuccuaccucaacgagacccacuucuccgacgacaucgagcagcaggccgacaacaugaucaccgagcuccuccagaaggaguacaucgaccgccagggcaagaccccccucggccucgucgaccucuucgucuucuccaccuccuucuaccucaucuccaucuuccuccaccucgucaagauccccacccaccgccacaucaccggcaagcccugccccaagccccaccgccucaaccacaugggcaucugcuccugcggccucuacaagcaccccggcguccccgucaaguggaagcgcugaggacuagugcaucacauuuaaaagcaucucagccuaccaugagaauaagagaaagaaaaugaagaucaauagcuuauucaucucuuuuucuuuuucguugguguaaagccaacacccugucuaaaaaacauaaauuucuuuaaucauuuugccucuuuucucugugcuucaauuaauaaaaaauggaaagaaccuagaucuaaaaaaaaaaaaaaaaaaaaaaaaaaaaaaaaaaaaaaaaaaaaaaaaaaaaaaaaaaaaaaaaugcaucccccccccccccccccccccccccccccccaaaggcucuuuucagagccaccagaauu

SEQ ID NO: 7078 - RNA, 1855 nt, Artificial Sequence
  mRNA product Design i-2 comprising derived and/or modified sequence from LASV(Lassa virus/H.sapiens-wt/NGA/2016/ISTH_0009;Clade II)__AVO03571__GPCstabilized (opt2)
ggggcgcugccuacggagguggcagccaucuccuucucggcaucaagcuuaccaugggccagaucaucaccuucuuccaggaggucccccacgucaucgaggaggucaugaacaucguccucaucgcccucucccuccucgccauccucaagggcaucuacaacgucgccaccugcggccuccucggccucgucuccuuccuccuccucugcggccgcuccugcuccaccaccuacaagggcgucuacgagcuccagacccucgagcucgacauggccucccucaacaugaccaugccccucuccugcaccaagaacaacucccaccacuacaucauggucggcaacgagaccggccucgagcucacccucaccaacaccuccaucaucaaccacaaguucugcaaccucuccgacgcccacaagaagaaccucuacgaccacgcccucauguccaucaucuccaccuuccaccucuccauccccaacuucaaccaguacgaggccauguccugcgacuucaacggcggccgcaucuccguccaguacaaccucucccacuccuacgccgucgacgccgccaaccacugcggcaccaucgccaacggcguccuccagaccuucaugcgcauggccuggggcggcuccuacaucgcccucgacuccggcugcggcuccugggacugcaucaugaccuccuaccaguaccucaucauccagaacaccaccugggaggaccacugccaguucucccgccccucccccaucggcuaccucggccuccucucccagcgcacccgcgacaucuacaucucccgccgccgccggggcaccuucaccuggacccucuccgacuccgagggcaacgagacccccggcggcuacugccucacccgcuggaugcucaucgaggccgagcucaagugcuucggcaacaccgccgucgccaagugcaacgagaagcacgacgaggaguucugcgacaugcuccgccucuucgacuucaacaagcaggccauccgccgccucaagacccccgcccagauguccauccagcucaucaacaaggccgucaacgcccucaucaacgaccagcucaucaugaagaaccaccuccgcgacaucaugugcauccccuacugcaacuacuccaaguacugguaccucaaccacaccgucaccggcaagaccucccucccccgcugcuggcucgucuccaacggcuccuaccucaacgagacccacuucuccgacgacaucgagcagcaggccgacaacaugaucaccgagcuccuccagaaggaguacaucgaccgccagggcaagaccccccucggccucgucgaccucuucgucuucuccaccuccuucuaccucaucuccaucuuccuccaccucgucaagauccccacccaccgccacaucaccggcaagcccugccccaagccccaccgccucaaccacaugggcaucugcuccugcggccucuacaaccaccccggcguccccgucaaguggaagcgcugaggacuagugcaucacauuuaaaagcaucucagccuaccaugagaauaagagaaagaaaaugaagaucaauagcuuauucaucucuuuuucuuuuucguugguguaaagccaacacccugucuaaaaaacauaaauuucuuuaaucauuuugccucuuuucucugugcuucaauuaauaaaaaauggaaagaaccuagaucuaaaaaaaaaaaaaaaaaaaaaaaaaaaaaaaaaaaaaaaaaaaaaaaaaaaaaaaaaaaaaaaaugcaucccccccccccccccccccccccccccccccaaaggcucuuuucagagccaccagaauu

SEQ ID NO: 7079 - RNA, 1855 nt, Artificial Sequence
  mRNA product Design i-2 comprising derived and/or modified sequence from LASV(Lassa virus/H.sapiens-wt/NGA/2016/ISTH_0017;Clade II)__AVO03567__GPCstabilized (opt2)
ggggcgcugccuacggagguggcagccaucuccuucucggcaucaagcuuaccaugggccagaucaucaccuucuuccaggaggucccccacgucaucgaggaggucaugaacaucguccucaucgcccucucccuccucgccauccucaagggcaucuacaacgucgccaccugcggccucuucggccucgucuccuuccuccuccucugcggccgcuccugcuccaccaccuacaagggcgucuacgagcuccagacccucgagcucgacauggccucccucaacaugaccaugccccucuccugcaccaagaacaacucccaccacuacaucauggucggcaacgagaccggccucgagcucacccucaccaacaccuccaucaucaaccacaaguucugcaaccucuccgacgcccacaagaagaaccucuacgaccacgcccucauguccaucaucuccaccuuccaccucuccauccccaacuucaaccaguacgaggccauguccugcgacuucaacggcggcaagaucuccguccaguacaaccucucccacaccuacgccaucgacgccgccaaccacugcggcaccaucgccaacggcguccuccagaccuucaugcgcauggccuggggcggcuccuacaucgcccucgacuccggcugcggcuccugggacugcaucaugaccuccuaccaguaccucaucauccagaacaccaccugggaggaccacugccaguucucccgccccucccccaucggcuaccucggccuccucucccagcgcacccgcgacaucuacaucucccgccgccgccggggcaccuucaccuggacccucuccgacuccgagggcaacgagacccccggcggcuacugccucacccgcuggaugcucaucgaggccgagcucaagugcuucggcaacaccgccgucgccaagugcaacgagaagcacgacgaggaguucugcgacaugcuccgccucuucgacuucaacaagcaggccauccgccgccucaagacccccgcccagauguccauccagcucaucaacaaggccgucaacgcccucaucaacgaccagcucaucaugaagaaccaccuccgcgacaucaugugcauccccuacugcaacuacuccaaguacugguaccucaaccacaccgucaccggcaagaccucccucccccgcugcuggcucgucuccaacggcuccuaccucaacgagacccacuucuccgacgacaucgagcagcaggccgacaacaugaucaccgagcuccuccagaaggaguacauggaccgccagggcaagaccccccucggccucgucgaccucuucgucuucuccaccuccuucuaccucaucuccaucuuccuccaccucguccgcauccccacccaccgccacgucaucggcaagcccugccccaagccccaccgccucaaccacaugggcaucugcuccugcggccucuacaagcaccccggcguccccgucaaguggaagcgcugaggacuagugcaucacauuuaaaagcaucucagccuaccaugagaauaagagaaagaaaaugaagaucaauagcuuauucaucucuuuuucuuuuucguugguguaaagccaacacccugucuaaaaaacauaaauuucuuuaaucauuuugccucuuuucucugugcuucaauuaauaaaaaauggaaagaaccuagaucuaaaaaaaaaaaaaaaaaaaaaaaaaaaaaaaaaaaaaaaaaaaaaaaaaaaaaaaaaaaaaaaaugcaucccccccccccccccccccccccccccccccaaaggcucuuuucagagccaccagaauu

SEQ ID NO: 7080 - RNA, 1855 nt, Artificial Sequence
  mRNA product Design i-2 comprising derived and/or modified sequence from LASV(Lassa virus/H.sapiens-wt/NGA/2018/ISTH_0959;Clade II)__AVV65099__GPCstabilized (opt2)
ggggcgcugccuacggagguggcagccaucuccuucucggcaucaagcuuaccaugggccagaucaucaccuucuuccaggaggucccccacgucaucgaggaggucaugaacaucguccucaucgcccucucccuccucgccauccucaagggcaucuacaacgucgucaccugcggccucuucggccucgucuccuuccuccuccucugcggccgcuccugcuccaccaccuacaagggcgucuacgagcuccagacccucgagcucgacauggccucccucaacaugaccaugccccucuccugcaccaagaacaacucccaccacuacaucauggucggcaacgagaccggccucgagcucacccucaccaacaccuccaucaucaaccacaaguucugcaaccucuccgacgcccacaagaagaaccucuacgaccacgcccucauguccaucaucuccaccuuccaccucuccauccccaacuucaaccaguacgaggccauguccugcgacuucaacggcggcaagaucuccguccaguacaaccucucccacgccuacgccaucgacgccgccaaccacugcggcaccaucgccaacggcguccuccagaccuucaugcgcauggccuggggcggcuccuacaucgcccucgacuccggcugcggcuccugggacugcaucaugaccuccuaccaguaccucaucauccagaacaccaccugggaggaccacugccaguucucccgccccucccccaucggcuaccucggccuccucucccagcgcacccgcgacaucuacaucucccgccgccgccggggcaccuucaccuggacccucuccgacuccgagggcaacgagacccccggcggcuacugccucacccgcuggaugcucaucgaggccgagcucaagugcuucggcaacaccgccgucgccaagugcaacgagaagcacgacgaggaguucugcgacaugcuccgccucuucgacuucaacaagcaggccauccgccgccucaagacccccgcccagauguccauccagcucaucaacaaggccgucaacgcccucaucaacgaccagcucaucaugaagaaccaccuccgcgacaucaugugcauccccuacugcaacuacuccaaguacugguaccucaaccacaccgucaccggcaagaccucccucccccgcugcuggcucgucuccaacggcuccuaccucaacgagacccacuucuccgacgacaucgagcagcaggccgacaacaugaucaccgagcuccuccagaaggaguacaucgaccgccagggcaagaccccccucggccucgucgaccucuucgucuucuccaccuccuucuaccucaucuccaucuuccuccaccucgucaagauccccacccaccgccacgucaucggcaagcccugccccaagccccaccgccucaaccacaugggcaucugcuccugcggccucuacaagcaccccggcguccccgucaaguggaagcgcugaggacuagugcaucacauuuaaaagcaucucagccuaccaugagaauaagagaaagaaaaugaagaucaauagcuuauucaucucuuuuucuuuuucguugguguaaagccaacacccugucuaaaaaacauaaauuucuuuaaucauuuugccucuuuucucugugcuucaauuaauaaaaaauggaaagaaccuagaucuaaaaaaaaaaaaaaaaaaaaaaaaaaaaaaaaaaaaaaaaaaaaaaaaaaaaaaaaaaaaaaaaugcaucccccccccccccccccccccccccccccccaaaggcucuuuucagagccaccagaauu

SEQ ID NO: 7081 - RNA, 1855 nt, Artificial Sequence
  mRNA product Design i-2 comprising derived and/or modified sequence from LASV(LASV003-NIG-2008;Clade II)__AIT17580__GPCstabilized (opt2)
ggggcgcugccuacggagguggcagccaucuccuucucggcaucaagcuuaccaugggccagaucaucaccuucuuccaggaggucccccacgucaucgaggaggucaugaacaucguccucaucgcccucucccuccucgccauccucaagggcaucuacaacgucgccaccugcggccucuucggccucgucuccuuccuccuccucugcggccgcuccugcuccaccaccuacaagggcgucuacgagcuccagacccucgagcucgacauggccucccucaacaugaccaugccccucuccugcaccaagaacaacucccaccacuacaucauggucggcaacgagaccggccucgagcucacccucaccaacaccuccaucaucaaccacaaguucugcaaccucuccgacgcccacaagaagaaccucuacgaccacgcccucauguccaucaucuccaccuuccaccucuccauccccaacuucaaccaguacgaggccauguccugcgacuucaacggcggcaagaucuccguccaguacaaccucucccacaccuacgccgucgacgccgccaaccacugcggcaccaucgccaacggcguccuccagaccuucaugcgcauggccuggggcggcuccuacaucgcccucgacuccggcugcggcuccugggacugcaucaugaccuccuaccaguaccucaucauccagaacaccaccugggaggaccacugccaguucucccgccccucccccaucggcuaccucggccuccucucccagcgcacccgcgacaucuacaucucccgccgccgccggggcaccuucaccuggacccucuccgacuccgaguccaacgagacccccggcggcuacugccucacccgcuggaugcucaucgaggccgagcucaagugcuucggcaacaccgccgucgccaagugcaacgagaagcacgacgaggaguucugcgacaugcuccgccucuucgacuucaacaagcaggccauccgccgccucaaggcccccgcccagauguccauccagcucaucaacaaggccgucaacgcccucaucaacgaccagcucaucaugaagaaccaccuccgcgacaucaugugcauccccuacugcaacuacuccaaguacugguaccucaaccacaccgucaccggccgcaccucccucccccgcugcuggcucgucuccaacggcuccuaccucaacgagacccacuucuccgacgacaucgagcagcaggccgacaacaugaucaccgagcuccuccagaaggaguacauggaccgccagggcaagaccccccucggccucgucgaccucuucgucuucuccaccuccuucuaccucaucuccaucuuccuccaccucgucaagauccccacccaccgccacgucaucggcaagcccugccccaagccccaccgccucaaccacaugggcaucugcuccugcggccucuacaagcaccccggcguccccgucaaguggaagcgcugaggacuagugcaucacauuuaaaagcaucucagccuaccaugagaauaagagaaagaaaaugaagaucaauagcuuauucaucucuuuuucuuuuucguugguguaaagccaacacccugucuaaaaaacauaaauuucuuuaaucauuuugccucuuuucucugugcuucaauuaauaaaaaauggaaagaaccuagaucuaaaaaaaaaaaaaaaaaaaaaaaaaaaaaaaaaaaaaaaaaaaaaaaaaaaaaaaaaaaaaaaaugcaucccccccccccccccccccccccccccccccaaaggcucuuuucagagccaccagaauu

SEQ ID NO: 7082 - RNA, 1855 nt, Artificial Sequence
  mRNA product Design i-2 comprising derived and/or modified sequence from LASV(LASV035-NIG-2009;Clade II)__AIT17588__GPCstabilized (opt2)
ggggcgcugccuacggagguggcagccaucuccuucucggcaucaagcuuaccaugggccagaucaucaccuucuuccaggaggucccccacgucaucgaggaggucaugaacaucguccucaucgcccucucccuccucgccauccucaagggcaucuacaacgucgccaccugcggccucuucggccucgucuccuuccuccuccucugcggccgcuccugcuccaccaccuacaagggcgucuacgagcuccagacccucgagcucgacauggccucccucaacaugaccaugccccucuccugcaccaagaacaacucccaccacuacaucauggucggcaacgagaccggccucgagcucacccucaccaacaccuccaucaucaaccacaaguucugcaaccucuccgacgcccacaagaagaaccucuacgaccacgcccucauguccaucaucuccaccuuccaccucuccauccccaacuucaaccaguacgaggccauguccugcgacuucaacggcggcaagaucuccguccaguacaaccucucccacgccuacgccgucgacgccgccaaccacugcggcaccaucgccaacggcguccuccagaccuucaugcgcauggccuggggcggcuccuacaucgcccucgacuccggcugcggcuccugggacugcaucaugaccuccuaccaguaccucaucauccagaacaccaccugggaggaccacugccaguucucccgccccucccccaucggcuaccucggccuccucucccagcgcacccgcgacaucuacaucucccgccgccgccggggcaccuucaccuggacccucuccgacuccgagggcaacgagacccccggcggcuacugccucacccgcuggaugcucaucgaggccgagcucaagugcuucggcaacaccgccgucgccaagugcaacgagaagcacgacgaggaguucugcgacaugcuccgccucuucgacuucaacaagcaggccauccgccgccucaaggcccccgcccagauguccauccagcucaucaacaaggccgucaacgcccucaucaacgaccagcucaucaugaagaaccaccuccgcgacaucaugugcauccccuacugcaacuacuccaaguacugguaccucaaccacaccgucaccggcaagaccucccucccccgcugcuggcucgucuccaacggcuccuaccucaacgagacccacuucuccgacgacaucgagcagcaggccgacaacaugaucaccgagcuccuccagaaggaguacaucgaccgccagggcaagaccccccucggccucgucgaccucuucgucuucuccaccuccuucuaccucaucuccaucuuccuccaccucgucaagauccccacccaccgccacgucaucggcaagcccugccccaagccccaccgccucaaccacaugggcaucugcuccugcggccucuacaagcaccccggcguccccgucaaguggaagcgcugaggacuagugcaucacauuuaaaagcaucucagccuaccaugagaauaagagaaagaaaaugaagaucaauagcuuauucaucucuuuuucuuuuucguugguguaaagccaacacccugucuaaaaaacauaaauuucuuuaaucauuuugccucuuuucucugugcuucaauuaauaaaaaauggaaagaaccuagaucuaaaaaaaaaaaaaaaaaaaaaaaaaaaaaaaaaaaaaaaaaaaaaaaaaaaaaaaaaaaaaaaaugcaucccccccccccccccccccccccccccccccaaaggcucuuuucagagccaccagaauu

SEQ ID NO: 7083 - RNA, 1855 nt, Artificial Sequence
  mRNA product Design i-2 comprising derived and/or modified sequence from LASV(LASV1000-NIG-2009;Clade II)__AIT17782__GPCstabilized (opt2)
ggggcgcugccuacggagguggcagccaucuccuucucggcaucaagcuuaccaugggccagaucaucaccuucuuccaggaggucccccacgucaucgaggaggucaugaacaucguccucaucgcccucucccuccucgccauccucaagggcaucuacaacgucgccaccugcggccucuucggccucgucuccuuccuccuccucugcggccgcuccugcuccaccaccuacaagggcgucuacgagcuccagacccucgagcucgacauggccucccucaacaugaccaugccccucuccugcaccaagaacaacucccaccacuacaucauggucggcaacgagaccggccucgagcucacccucaccaacaccuccaucaucaaccacaaguucugcaaccucuccgacgcccacaagaagaaccucuacgaccacgcccucauguccaucaucuccaccuuccaccucuccauccccaacuucaaccaguacgaggccauguccugcgacuucaacggcggcaagaucuccguccaguacaaccucucccacaccuacgccgucgacgccgccaaccacugcggcaccaucgccaacggcguccuccagaccuucaugcgcauggccuggggcggcuccuacaucgcccucgacuccggcugcggcuccugggacugcaucaugaccuccuaccaguaccucaucauccagaacaccaccugggaggaccacugccaguucucccgccccucccccaucggcuaccucggccuccucucccagcgcacccgcgacaucuacaucucccgccgccgccggggcaccuucaccuggacccucuccgacuccgagggcaacgagacccccggcggcuacugccucacccgcuggaugcucaucgaggccgagcucaagugcuucggcaacaccgccgucgccaagugcaacgagaagcacgacgaggaguucugcgacaugcuccgccucuucgacuucaacaagcaggccaucaagcgccucaagacccccgcccagauguccauccagcucaucaacaaggccgucaacgcccucaucaacgaccagcucaucaugaagaaccaccuccgcgacaucaugugcauccccuacugcaacuacuccaaguacugguaccucaaccacaccgucaccggcaagaccucccucccccgcugcuggcucgucuccaacggcuccuaccucaacgagacccacuucuccgacgacaucgagcagcaggccgacaacaugaucaccgagcuccuccagaaggaguacaucgaccgccagggcaagaccccccucggccucgucgaccucuucgucuucuccaccuccuucuaccucaucuccaucuuccuccaccucgucaagauccccacccaccgccacgucgucggcaagcccugccccaagccccaccgccucaaccacaugggcaucugcuccugcggccucuacaagcaccccggcguccccgucaaguggaagcgcugaggacuagugcaucacauuuaaaagcaucucagccuaccaugagaauaagagaaagaaaaugaagaucaauagcuuauucaucucuuuuucuuuuucguugguguaaagccaacacccugucuaaaaaacauaaauuucuuuaaucauuuugccucuuuucucugugcuucaauuaauaaaaaauggaaagaaccuagaucuaaaaaaaaaaaaaaaaaaaaaaaaaaaaaaaaaaaaaaaaaaaaaaaaaaaaaaaaaaaaaaaaugcaucccccccccccccccccccccccccccccccaaaggcucuuuucagagccaccagaauu

SEQ ID NO: 7084 - RNA, 1855 nt, Artificial Sequence
  mRNA product Design i-2 comprising derived and/or modified sequence from LASV(LASV221-NIG-2010;Clade II)__AIT17624__GPCstabilized (opt2)
ggggcgcugccuacggagguggcagccaucuccuucucggcaucaagcuuaccaugggccagaucaucaccuucuuccaggaggucccccacgucaucgaggaggucaugaacaucguccucaucgcccucucccuccucgccauccucaagggcaucuacaacgucgccaccugcggccucuucggccucgucuccuuccuccuccucugcggccgcuccugcuccaccaccuacaagggcgucuacgagcuccagacccucgagcucgacauggccucccucaacaugaccaugccccucuccugcaccaagaacaacucccaccacuacaucauggucggcaacgagaccggccucgagcucacccucaccaacaccuccaucaucaaccacaaguucugcaaccucuccgacgcccacaagaagaaccucuacgaccacgcccucauguccaucaucuccaccuuccaccucuccauccccaacuucaaccaguacgaggccauguccugcgacuucaacggcggcaagaucuccguccaguacaaccucucccacaccuacgccaucgacgccgccaaccacugcggcaccaucgccaacggcguccuccagaccuucaugcgcauggccuggggcggcuccuacaucgcccucgacuccggcugcggcuccugggacugcaucaugaccuccuaccaguaccucaucauccagaacaccaccugggaggaccacugccaguucucccgccccucccccaucggcuaccucggccuccucucccagcgcacccgcgacaucuacaucucccgccgccgccggggcaccuucaccuggacccucuccgacuccgagggcaacgagacccccggcggcuacugccucacccgcuggaugcucaucgaggccgagcucaagugcuucggcaacaccgccgucgccaagugcaacgagaagcacgacgaggaguucugcgacaugcuccgccucuucgacuucaacaagcaggccauccgccgccucaagacccccgcccagauguccauccagcucaucaacaaggccgucaacgcccucaucaacgaccagcucaucaugaagaaccaccuccgcgacaucaugugcauccccuacugcaacuacuccaaguacugguaccucaaccacaccgucaccggcaagaccucccucccccgcugcuggcucgucuccaacggcuccuaccucaacgagacccacuucuccgacgacaucgagcagcaggccgacaacaugaucaccgagaugcuccagaaggaguacauggaccgccagggcaagaccccccucggccucgucgaccucuucgucuucuccaccuccuucuaccucaucuccaucuuccuccaccucgucaagauccccacccaccgccacgucaucggcaagcccugccccaagccccaccgccucaaccacaugggcaucugcuccugcggccucuacaagcaccccggcguccccgucaaguggaagcgcugaggacuagugcaucacauuuaaaagcaucucagccuaccaugagaauaagagaaagaaaaugaagaucaauagcuuauucaucucuuuuucuuuuucguugguguaaagccaacacccugucuaaaaaacauaaauuucuuuaaucauuuugccucuuuucucugugcuucaauuaauaaaaaauggaaagaaccuagaucuaaaaaaaaaaaaaaaaaaaaaaaaaaaaaaaaaaaaaaaaaaaaaaaaaaaaaaaaaaaaaaaaugcaucccccccccccccccccccccccccccccccaaaggcucuuuucagagccaccagaauu

SEQ ID NO: 7085 - RNA, 1855 nt, Artificial Sequence
  mRNA product Design i-2 comprising derived and/or modified sequence from LASV(LASV237-NIG-2010;Clade II)__AIT17638__GPCstabilized (opt2)
ggggcgcugccuacggagguggcagccaucuccuucucggcaucaagcuuaccaugggccagaucaucaccuucuuccaggaggucccccacgucaucgaggaggucaugaacaucguccucaucgcccucucccuccucgccauccucaagggcaucuacaacgucgccaccugcggccucuucggccucgucuccuuccuccuccucugcggccgcuccugcuccaccaccuacaagggcgucuacgagcuccagacccucgagcucgacauggccucccucaacaugaccaugccccucuccugcaccaagaacaacucccaccacuacaucauggucggcaacgagaccggccucgagcucacccucaccaacaccuccaucaucaaccacaaguucugcaaccucuccgacgcccacaagaaggaccucuacgaccacgcccucauguccaucaucuccaccuuccaccucuccauccccaacuucaaccaguacgaggccauguccugcgacuucaacggcggcaagaucuccguccaguacaaccucucccacaccuacgccgucgacgccgccaaccacugcggcaccaucgccaacggcguccuccagaccuucaugcgcauggccuggggcggcuccuacaucgcccucgacuccggcugcggcuccugggacugcaucaugaccuccuaccaguaccucaucauccagaacaccaccugggaggaccacugccaguucucccgccccucccccaucggcuaccucggccuccucucccagcgcacccgcgacaucuacaucucccgccgccgccggggcaccuucaccuggacccucuccgacuccgagggcaacgagacccccggcggcuacugccucacccgcuggaugcucaucgaggccgagcucaagugcuucggcaacaccgccgucgccaagugcaacgagaagcacgacgaggaguucugcgacaugcuccgccucuucgacuucaacaagcaggccauccgccgccucaagacccccgcccagauguccauccagcucaucaacaaggccgucaacgcccucaucaacgaccagcucaucaugaagaaccaccuccgcgacaucaugugcauccccuacugcaacuacuccaaguacugguaccucaaccacaccgucaccggcaagaccucccucccccgcugcuggcucgucuccaacggcuccuaccucaacgagacccacuucuccgacgacaucgagcagcaggccgacaacaugaucaccgagcuccuccagaaggaguacauggaccgccagggcaagaccccccucggccucgucgaccucuucgucuucuccaccuccuucuaccucaucuccaucuuccuccaccucaucaagauccccacccaccgccacaucaccggcaagcccugccccaagccccaccgccucaaccacaugggcaucugcuccugcggccucuacaagcaccccggcguccccgucaaguggaagcgcugaggacuagugcaucacauuuaaaagcaucucagccuaccaugagaauaagagaaagaaaaugaagaucaauagcuuauucaucucuuuuucuuuuucguugguguaaagccaacacccugucuaaaaaacauaaauuucuuuaaucauuuugccucuuuucucugugcuucaauuaauaaaaaauggaaagaaccuagaucuaaaaaaaaaaaaaaaaaaaaaaaaaaaaaaaaaaaaaaaaaaaaaaaaaaaaaaaaaaaaaaaaugcaucccccccccccccccccccccccccccccccaaaggcucuuuucagagccaccagaauu

SEQ ID NO: 7086 - RNA, 1855 nt, Artificial Sequence
  mRNA product Design i-2 comprising derived and/or modified sequence from LASV(LASV253-NIG-2011;Clade II)__AIT17670__GPCstabilized (opt2)
ggggcgcugccuacggagguggcagccaucuccuucucggcaucaagcuuaccaugggccagaucaucaccuucuuccaggaggucccccacgucaucgaggaggucaugaacaucguccucaucgcccucucccuccucgccauccucaagggcaucuacaacgucgccaccugcggccucuucggccucgucuccuuccuccuccucugcggccgcuccugcuccaccaccuacaagggcgucuacgagcuccagacccucgagcucgacauggccucccucaacaugaccaugccccucuccugcaccaagaacaacucccaccacuacaucauggucggcaacgagaccggccucgagcucacccucaccaacaccuccaucaucaaccacaaguucugcaaccucuccgacgcccacaagaagaaccucuacgaccacgcccucauguccaucaucuccaccuuccaccucuccauccccaacuucaaccaguacgaggccauguccugcgacuucaacggcggcaagaucuccguccaguacaaccucucccacaccuacgccgucgacgccgccaaccacugcggcaccaucgccaacggcguccuccagaccuucaugcgcauggccuggggcggcuccuacaucgcccucgacuccggcugcggcuccugggacugcaucaugaccuccuaccaguaccucaucauccagaacaccaccugggaggaccacugccaguucucccgccccucccccaucggcuaccucggccuccucucccagcgcacccgcgacaucuacaucucccgccgccgccggggcaccuucaccuggacccucuccgacuccgagggcaacgagacccccggcggcuacugccucacccgcuggaugcucaucgaggccgagcucaagugcuucggcaacaccgccgucgccaagugcaacgagaagcacgacgaggaguucugcgacaugcuccgccucuucgacuucaacaagcaggccauccgccgccucaaggcccccgcccagauguccauccagcucaucaacaaggccgucaacgcccucaucaacgaccagcucaucaugaagaaccaccuccgcgacaucaugugcauccccuacugcaacuacuccaaguacugguaccucaaccacaccgucaccggccgcaccucccucccccgcugcuggcucgucuccaacggcuccuaccucaacgagacccacuucuccgacgacaucgagcagcaggccgacaacaugaucaccgagcuccuccagaaggaguacaucgaccgccagggcaagaccccccucggccucgucgaccucuucgucuucuccaccuccuucuaccucaucuccaucuuccuccaccucgucaagauccccacccaccgccacaucaucggcaagcccugccccaagccccaccgccucaaccacaugggcaucugcuccugcggccucuacaagcaccccggcguccccgucaaguggaagcgcugaggacuagugcaucacauuuaaaagcaucucagccuaccaugagaauaagagaaagaaaaugaagaucaauagcuuauucaucucuuuuucuuuuucguugguguaaagccaacacccugucuaaaaaacauaaauuucuuuaaucauuuugccucuuuucucugugcuucaauuaauaaaaaauggaaagaaccuagaucuaaaaaaaaaaaaaaaaaaaaaaaaaaaaaaaaaaaaaaaaaaaaaaaaaaaaaaaaaaaaaaaaugcaucccccccccccccccccccccccccccccccaaaggcucuuuucagagccaccagaauu

SEQ ID NO: 7087 - RNA, 1855 nt, Artificial Sequence
  mRNA product Design i-2 comprising derived and/or modified sequence from LASV(LASV254-NIG-2011;Clade II)__AIT17674__GPCstabilized (opt2)
ggggcgcugccuacggagguggcagccaucuccuucucggcaucaagcuuaccaugggccagaucaucaccuucuuccaggaggucccccacgucaucgaggaggucaugaacaucguccucaucgcccucucccuccucgccauccucaagggcaucuacaacgucgccaccugcggccucuucggccucgucuccuuccuccuccucugcggccgcuccugcuccaccaccuacaagggcgucuacgagcuccagacccucgagcucgacaugaccaaccucaacaugaccaugccccucuccugcaccaagaacaacucccaccacuacaucauggucggcaacgagaccggccucgagcucacccucaccaacaccuccaucaucaaccacaaguucugcaaccucuccgacgcccacaagaagaaccucuacaaccacgcccucauguccaucaucuccaccuuccaccucuccauccccaacuucaaccaguacgaggccauguccugcgacuucaacggcggcaagaucuccguccaguacaaccucucccacuccuacgccgucgacgccgccaaccacugcggcaccaucgccaacggcguccuccagaccuucaugcgcauggccuggggcggcuccuacaucgcccucgacuccggcugcggcaacugggacugcaucaugaccuccuaccaguaccucaucauccagaacaccaccugggaggaccacugccaguucucccgccccucccccaucggcuaccucggccuccucucccagcgcacccgcgacaucuacaucucccgccgccgccggggcaccuucaccuggacccucuccgacuccgagggcaacgagacccccggcggcuacugccucacccgcuggaugcucaucgaggccgagcucaagugcuucggcaacaccgccgucgccaagugcaacgagaagcacgacgaggaguucugcgacaugcuccgccucuucgacuucaacaagcaggccauccgccgccucaagacccccgcccaggccaacauccagcucaucaacaaggccgucaacgcccucaucaacgaccagcucaucaugaagaaccaccuccgcgacaucaugugcauccccuacugcaacuacuccaaguacugguaccucaaccacaccgucaccggcaagaccucccucccccgcugcuggcucgucuccaacggcuccuaccucaacgagacccacuucuccgacgacaucgagcagcaggccgacaacaugaucaccgagcuccuccagaaggaguacauggaccgccagggcaagaccccccucggccucgucgaccucuucgucuucuccaccuccuucuaccucaucuccaucuuccuccaccucgucaagauccccacccaccgccacgucaucggcaagcccugccccaagccccaccgccucaaccacaugggcaucugcuccugcggccucuacaagcaccccggcguccccgucaaguggaagcgcugaggacuagugcaucacauuuaaaagcaucucagccuaccaugagaauaagagaaagaaaaugaagaucaauagcuuauucaucucuuuuucuuuuucguugguguaaagccaacacccugucuaaaaaacauaaauuucuuuaaucauuuugccucuuuucucugugcuucaauuaauaaaaaauggaaagaaccuagaucuaaaaaaaaaaaaaaaaaaaaaaaaaaaaaaaaaaaaaaaaaaaaaaaaaaaaaaaaaaaaaaaaugcaucccccccccccccccccccccccccccccccaaaggcucuuuucagagccaccagaauu

SEQ ID NO: 7088 - RNA, 1855 nt, Artificial Sequence
  mRNA product Design i-2 comprising derived and/or modified sequence from LASV(Nig08-A19;Clade III)__ADU56618__GPCstabilized (opt2)
ggggcgcugccuacggagguggcagccaucuccuucucggcaucaagcuuaccaugggccagaucgucaccuucuuccaggaggucccccacgucaucgaggaggucaugaacaucguccucaucgcccucuccauccucgccauccucaagggccucuacaacaucgccaccugcggccucaucggccucgucaccuuccuccuccucuccggccgcuccugcuccaugaccuacaagggcgucuacgagcuccagacccucgagcucaacaugaacacccucaacaugaccaugccccucuccugcaccaagaacaacucccaccacuacaucauggucggcaacgagaccggccucgagcucacccucaccaacaccucccuccuccaccacaaguucugcaaccucuccgacgcccacaagaagaaccucuacgaccacacccucauguccaucaucuccaccuuccaccucuccauccccaacuucaaccaguacgaggccauguccugcgacuucaacggcggcaagaucaccguccaguacaaccucucccacuccuacgccaucgacgccgccaaccacugcggcaccgucgccaacggcguccuccagaccuucaugcgcauggccuggggcggcuccuacaucgcccucgacuccggcugcggcaagugggacugcaucaugaccuccuaccaguaccucaucauccagaacaccaccugggaggaccacugccaguucucccgccccucccccaucggcuaccucggccuccucucccagcgcacccgcgacaucuacaucucccgccgccgccggggcaccuucaccuggacccucuccgacuccgagggcaacgagacccccggcggcuacugccucacccgcuggaugcucaucgaggccgagcucaagugcuucggcaacaccgccgucgccaagugcaacgagaagcacgacgaggaguucugcgacaugcuccgccucuucgacuucaacaagcaggccauccgccgccucaaggcccccgcccagauguccauccagcucaucaacaaggccgucaacgcccucaucaacgaccagcucaucaugaagaaccaccuccgcgacaucaugugcauccccuacugcaacuacuccaaguacugguaccucaaccacaccuccaccggccgcaccucccucccccgcugcuggcucgucuccaacggcuccuaccucaacgagacccacuucuccgacgacaucgagcagcaggccgacaacaugaucaccgagaugcuccagaaggaguaccucgaccgccagggcaagaccccccucggccucgucgaccucuucgucuucuccaccuccuucuaccucaucuccaucuuccuccaccucgucaagauccccacccaccgccacaucgucggcaagcccugccccaagccccaccgccucaaccacaugggcaucugcuccugcggccucuacaagcagcccggcguccccguccgcuggaagcgcugaggacuagugcaucacauuuaaaagcaucucagccuaccaugagaauaagagaaagaaaaugaagaucaauagcuuauucaucucuuuuucuuuuucguugguguaaagccaacacccugucuaaaaaacauaaauuucuuuaaucauuuugccucuuuucucugugcuucaauuaauaaaaaauggaaagaaccuagaucuaaaaaaaaaaaaaaaaaaaaaaaaaaaaaaaaaaaaaaaaaaaaaaaaaaaaaaaaaaaaaaaaugcaucccccccccccccccccccccccccccccccaaaggcucuuuucagagccaccagaauu

SEQ ID NO: 7089 - RNA, 1858 nt, Artificial Sequence
  mRNA product Design i-2 comprising derived and/or modified sequence from LASV(G1180-SLE-2010;Clade IV)__AIT17168__GPCstabilized (opt2)
ggggcgcugccuacggagguggcagccaucuccuucucggcaucaagcuuaccaugggccagaucgucaccuucuuccaggaggucccccacgucaucgaggaggucaugaacaucguccucaucgcccucuccauccucgccguccucaagggccucuacaacuucgccaccugcggccucgucggccuccucaccuuccuccuccucugcggccgcuccugcaccgccucccgcuacaagggcgucuacgagcuccagacccucgagcucaacauggagacccucaacaugaccaugccccucuccugcaccaagaacaacucccaccacuacaucauggucggcaacgagaccggccucgagcucacccucaccaacaccuccaucaucaaccacaaguucugcaaccucuccgacgcccacaagaagaaccucuacgaccacgcccucauguccaucaucuccaccuuccaccucuccauccccaacuucaaccaguacgaggccauguccugcgacuucaacggcggcaagaucuccguccaguacaaccucucccacuccuacgccggcgacgccgccaaccacugcggcaccgucgccaacggcguccuccagaccuucaugcgcauggccuggggcggcuccuacaucgcccucgacuccggcugcggcuccugggacugcaucaugaccuccuaccaguaccucaucauccagaacaccaccugggaggaccacugccaguucucccgccccucccccaucggcuaccucggccuccucucccagcgcacccgcgacaucuacaucucccgccgccgccggggcaccuucaccuggacccucuccgacuccgagggcaaggacacccccggcggcuacugccucacccgcuggaugcucaucgaggccgagcucaagugcuucggcaacaccgccgucgccaagugcaacgagaagcacgacgaggaguucugcgacaugcuccgccucuucgacuucaacaagcaggccauccagcgccucaaggcccccgcccagauguccauccagcucaucaacaaggccgucaacgcccucaucaacgaccagcucaucaugaagaaccaccuccgcgacaucaugugcauccccuacugcaacuacuccaaguacugguaccucaaccacaccaccaccggcaagaccucccuccccaagugcuggcucgucuccaacggcuccuaccucaacgagacccacuucuccgacgacaucgagcagcaggccgacaacaugaucaccgagaugcuccagaaggaguacauggagcgccagggcaagaccccccucggccucgucgaccucuucgucuucuccaccuccuucuaccucaucuccaucuuccuccaccucgucaagauccccacccaccgccacaucgucggcaaguccugccccaagccccaccgccucaaccacaugggcaucugcuccugcggccucuacaagcagcccggcguccccgucaaguggaagcgcugaggacuagugcaucacauuuaaaagcaucucagccuaccaugagaauaagagaaagaaaaugaagaucaauagcuuauucaucucuuuuucuuuuucguugguguaaagccaacacccugucuaaaaaacauaaauuucuuuaaucauuuugccucuuuucucugugcuucaauuaauaaaaaauggaaagaaccuagaucuaaaaaaaaaaaaaaaaaaaaaaaaaaaaaaaaaaaaaaaaaaaaaaaaaaaaaaaaaaaaaaaaugcaucccccccccccccccccccccccccccccccaaaggcucuuuucagagccaccagaauu

SEQ ID NO: 7090 - RNA, 1858 nt, Artificial Sequence
  mRNA product Design i-2 comprising derived and/or modified sequence from LASV(G1442-SLE-2011;Clade IV)__AIT17180__GPCstabilized (opt2)
ggggcgcugccuacggagguggcagccaucuccuucucggcaucaagcuuaccaugggccagaucgucaccuucuuccaggaggucccccacgucaucgaggaggucaugaacaucguccucaucgcccucuccauccucgccguccucaagggccucuacaacgucgccaccugcggccucaucggccucgucaccuuccuccuccucugcggccgcuccugcaccaccacccucuacaagggcgucuacgagcuccagacccucgagcucaacauggagacccucaacaugaccaugccccucuccugcaccaagaacaacucccaccacuacauccgcgucggcaacgagaccggccucgagcucacccucaccaacaccuccaucaucaaccacaaguucugcaaccucuccgacgcccacaagaagaaccucuacgaccacgcccucauguccaucaucuccaccuuccaccucuccauccccaacuucaaccaguacgaggccauguccugcgacuucaacggcggcaagaucuccguccaguacaaccucucccacuccuacgccggcgacgccgccaaccacugcggcaccgucgccaacggcguccuccagaccuucaugcgcauggccuggggcggcuccuacaucgcccucgacuccggcugcggcaacugggacugcaucaugaccuccuaccaguaccucaucauccagaacaccaccugggacgaccacugccaguucucccgccccucccccaucggcuaccucggccuccucucccagcgcacccgcgacgucuacaucucccgccgccgccggggcaccuucaccuggacccucuccgacuccgagggcaaggacacccccggcggcuacugccucacccgcuggaugcucaucgaggccgagcucaagugcuucggcaacaccgccgucgccaagugcaacgagaagcacgacgaggaguucugcgacaugcuccgccucuucgacuucaacaagcaggccauccagcgccucaaggcccccgcccagauguccauccagcucaucaacaaggccgucaacgcccucaucaacgaccagcucaucaugaagaaccaccuccgcgacaucaugugcauccccuacugcaacuacuccaaguacugguaccucaacaacaccgccaccggcaagaccucccuccccaagugcuggcucaucuccaacggcuccuaccucaacgagacccacuucuccgacgacaucgagcaggaggccgacaacaugaucaccgagaugcuccagaaggaguacauggagcgccagggcaagaccccccucggccucgucgaccucuucgucuucuccaccuccuucuaccucaucuccaucuuccuccaccucgucaagauccccacccaccgccacaucgucggcaaguccugccccaagccccaccgccucaaccacaugggcaucugcuccugcggccucuacaagcagcccggcguccccguccgcuggaagcgcugaggacuagugcaucacauuuaaaagcaucucagccuaccaugagaauaagagaaagaaaaugaagaucaauagcuuauucaucucuuuuucuuuuucguugguguaaagccaacacccugucuaaaaaacauaaauuucuuuaaucauuuugccucuuuucucugugcuucaauuaauaaaaaauggaaagaaccuagaucuaaaaaaaaaaaaaaaaaaaaaaaaaaaaaaaaaaaaaaaaaaaaaaaaaaaaaaaaaaaaaaaaugcaucccccccccccccccccccccccccccccccaaaggcucuuuucagagccaccagaauu

SEQ ID NO: 7091 - RNA, 1858 nt, Artificial Sequence
  mRNA product Design i-2 comprising derived and/or modified sequence from LASV(G3010-SLE-2013;Clade IV)__AIT17344__GPCstabilized (opt2)
ggggcgcugccuacggagguggcagccaucuccuucucggcaucaagcuuaccaugggccagaucgucaccuucuuccaggaggucccccacgucaucgaggaggucaugaacaucguccucaucgcccucuccauccucgccguccucaagggccucuacaacuucgccaccugcggccucgucggccucgucaccuuccuccuccucugcggccgcuccugcaccaccucccucuacaagggcgucuacgagcuccagacccucgagcucaacauggagacccucaacaugaccaugccccucuccugcaccaagaacaacucccaccacuacaucauggucggcaacgagaccggccucgagcucacccucaccaacaccuccaucaucaaccacaaguucugcaaccucuccgacgcccacaagaagaaccucuacaaccacgcccucauguccaucaucuccaccuuccaccucuccauccccaacuucaaccaguacgaggccauguccugcgacuucaacggcggcaagaucuccguccaguacaaccucucccacuccuacgccggcgacgccgccucccacugcggcaccgucgccaacggcguccuccagaccuucaugcgcauggccuggggcggcuccuacaucgcccucgacuccggcugcggcaagugggacugcaucaugaccuccuaccaguaccucaucauccagaacaccaccugggaggaccacugccaguucucccgccccucccccaucggcuaccucggccuccucucccagcgcacccgcgacaucuacaucucccgccgccgccggggcaccuucaccuggacccucuccgacuccgagggcaaggacacccccggcggcuacugccucacccgcuggaugcucaucgaggccgagcucaagugcuucggcaacaccgccgucgccaagugcaacgagaagcacgacgaggaguucugcgacaugcuccgccucuucgacuucaacaagcaggccauccagcgccucaagacccccgcccagauguccauccagcucaucaacaaggccgucaacgcccucaucaacgaccagcucaucaugaagaaccaccuccgcgacaucaugugcauccccuacugcaacuacuccaaguacugguaccucaaccacaccaccaccggcaagaccucccuccccaagugcuggcucgucuccaacggcuccuaccucaacgagacccacuucuccgacgacaucgagcagcaggccgacaacaugaucaccgagaugcuccagaaggaguacauggagcgccagggcaagaccccccucggccucgucgaccucuucgucuucuccaccuccuucuaccucaucuccaucuuccuccaccucgucaagauccccacccaccgccacaucgucggcaaguccugccccaagccccaccgccucaaccacaugggcaucugcuccugcggccucuacaagcagcccggcguccccguccgcuggaagcgcugaggacuagugcaucacauuuaaaagcaucucagccuaccaugagaauaagagaaagaaaaugaagaucaauagcuuauucaucucuuuuucuuuuucguugguguaaagccaacacccugucuaaaaaacauaaauuucuuuaaucauuuugccucuuuucucugugcuucaauuaauaaaaaauggaaagaaccuagaucuaaaaaaaaaaaaaaaaaaaaaaaaaaaaaaaaaaaaaaaaaaaaaaaaaaaaaaaaaaaaaaaaugcaucccccccccccccccccccccccccccccccaaaggcucuuuucagagccaccagaauu

SEQ ID NO: 7092 - RNA, 1858 nt, Artificial Sequence
  mRNA product Design i-2 comprising derived and/or modified sequence from LASV(G502-SLE-2009;Clade IV)__AIT17126__GPCstabilized (opt2)
ggggcgcugccuacggagguggcagccaucuccuucucggcaucaagcuuaccaugggccagaucgucaccuucuuccaggaggucccccacgucaucgaggaggucaugaacaucguccucaucgcccucuccauccucgccguccucaagggccucuacaacuucgccaccugcggccucgucggccuccucaccuuccuccuccucugcggccgcuccugcaccaccggccucuacaagggcgucuacgagcuccagacccucgagcucaacauggagacccucaacaugaccaugccccucuccugcaccaagaacaacucccaccacuacaucauggucggcaacgagaccggccucgagcucacccucaccaacaccuccaucaucaaccacaaguucugcaaccucuccgacgcccacaagaagaaccucuacgaccacgcccucauguccaucaucuccaccuuccaccucuccauccccaacuucaaccaguacgaggccauguccugcgacuucaacggcggcaagaucuccguccaguacaaccucucccacuccuacgccggcgacgccgccgaccacugcggcaccgucgccaacggcguccuccagaccuucaugcgcauggccuggggcggcuccuacaucgcccucgacuccggcugcggccgcugggacugcaucaugaccuccuaccaguaccucaucauccagaacaccaccugggaggaccacugccaguucucccgccccucccccaucggcuaccucggccuccucucccagcgcacccgcgacaucuacaucucccgccgccgccggggcaccuucaccuggacccucuccgacuccgagggcaaggacacccccggcggcuacugccucacccgcuggaugcucaucgaggccgagcucaagugcuucggcaacaccgccgucgccaagugcaacgagaagcacgacgaggaguucugcgacaugcuccgccucuucgacuucaacaagcaggccauccagcgccucaaggcccccgcccagauguccauccagcucaucaacaaggccgucaacgcccucaucaacgaccagcucgucaugaagaaccaccuccgcgacaucaugugcauccccuacugcaacuacucccgcuacugguaccucaaccacaccaccaccggccgcaccucccuccccaagugcuggcucgucuccaacggcuccuaccucaacgagacccacuucuccgacgacaucgagcagcaggccgacaacaugaucaccgagaugcuccagaaggaguacauggagcgccagggcaagaccccccucggccucgucgaccucuucgucuucuccaccuccuucuaccucaucuccaucuuccuccaccucgucaagauccccacccaccgccacaucgucggcaaguccugccccaagccccaccgccucaaccacaugggcaucugcuccugcggccucuacaagcagcccggcguccccgucaaguggaagcgcugaggacuagugcaucacauuuaaaagcaucucagccuaccaugagaauaagagaaagaaaaugaagaucaauagcuuauucaucucuuuuucuuuuucguugguguaaagccaacacccugucuaaaaaacauaaauuucuuuaaucauuuugccucuuuucucugugcuucaauuaauaaaaaauggaaagaaccuagaucuaaaaaaaaaaaaaaaaaaaaaaaaaaaaaaaaaaaaaaaaaaaaaaaaaaaaaaaaaaaaaaaaugcaucccccccccccccccccccccccccccccccaaaggcucuuuucagagccaccagaauu

SEQ ID NO: 7093 - RNA, 1858 nt, Artificial Sequence
  mRNA product Design i-2 comprising derived and/or modified sequence from LASV(G733-SLE-2010;Clade IV)__AIT17154__GPCstabilized (opt2)
ggggcgcugccuacggagguggcagccaucuccuucucggcaucaagcuuaccaugggccagaucgucaccuucuuccaggaggucccccacgucaucgaggaggucaugaacaucguccucaucgcccucuccauccucgccguccucaagggccucuacaacuucgccaccugcggcaucgucggccucgucuccuuccuccuccucugcggccgcuccugcaccaccucccucuacaagggcgucuacgagcuccagacccucgagcucaacauggagacccucaacaugaccaugccccucuccugcaccaagaacaacucccaccacuacaucauggucggcaacgagaccggccucgagcucacccucaccaacaccuccaucaucaaccacaaguucugcaaccucuccgacgcccacaagaagaaccucuacgaccacgcccucauguccaucaucuccaccuuccaccucuccauccccaacuucaaccaguacgaggccauguccugcgacuucaacggcggcaagaucuccguccaguacaaccucucccacuccuacgccggcgacgccgccaaccacugcggcaccaucgccaacggcguccuccagaccuucaugcgcauggccuggggcggcuccuacaucgcccucgacuccggcugcgaccgcugggacugcaucaugaccuccuaccaguaccucaucauccagaacaccaccugggaggaccacugccaguucucccgccccucccccaucggcuaccucggccuccucucccagcgcacccgcgacaucuacaucucccgccgccgccggggcaccuucaccuggacccucuccgacuccgagggcaaggacacccccggcggcuacugccucacccgcuggaugcucaucgaggccgagcucaagugcuucggcaacaccgccgucgccaagugcaacgagaagcacgacgaggaguucugcgacaugcuccgccucuucgacuucaacaagcaggccauccagcgccucaaggcccccgcccagauguccauccagcucaucaacaaggccgucaacgcccucaucaacgaccagcucaucaugaagaaccaccuccgcgacaucaugugcauccccuacugcaacuacuccaaguacugguaccucaaccacaccaccaccggcaagaccucccuccccaagugcuggcucgucuccaacggcuccuaccucaacgagacccacuucuccgacgacaucgagcagcaggccgacaacaugaucaccgagaugcuccagaaggaguacauggagcgccagggcaagaccccccucggccucgucgaccucuucgucuucuccaccuccuucuaccucaucuccaucuuccuccaccucgucaagauccccacccaccgccacgucgucggcaaguccugccccaagccccaccgccucaaccacaugggcaucugcuccugcggccucuacggccagcccggcguccccgucaaguggaagcgcugaggacuagugcaucacauuuaaaagcaucucagccuaccaugagaauaagagaaagaaaaugaagaucaauagcuuauucaucucuuuuucuuuuucguugguguaaagccaacacccugucuaaaaaacauaaauuucuuuaaucauuuugccucuuuucucugugcuucaauuaauaaaaaauggaaagaaccuagaucuaaaaaaaaaaaaaaaaaaaaaaaaaaaaaaaaaaaaaaaaaaaaaaaaaaaaaaaaaaaaaaaaugcaucccccccccccccccccccccccccccccccaaaggcucuuuucagagccaccagaauu

SEQ ID NO: 7094 - RNA, 1858 nt, Artificial Sequence
  mRNA product Design i-2 comprising derived and/or modified sequence from MOPV/LASV reassortant(IGS-1;Clade IV)__AFY05576__GPCstabilized (opt2)
ggggcgcugccuacggagguggcagccaucuccuucucggcaucaagcuuaccaugggccagaucgucaccuucuuccaggaggucccccacgucaucgaggaggucaugaacaucguccucaucgcccucuccguccucgccguccucaagggccucuacaacuucgccaccugcggccucgucggccucgucaccuuccuccuccucugcggccgcuccugcaccaccucccucuacaagggcgucuacgagcuccagacccucgagcucaacauggagacccucaacaugaccaugccccucuccugcaccaagaacaacucccaccacuacaucauggucggcaacgagaccggccucgagcucacccucaccaacaccuccaucaucaaccacaaguucugcaaccucuccgacgcccacaagaagaaccucuacgaccacgcccucauguccaucaucuccaccuuccaccucuccauccccaacuucaaccaguacgaggccauguccugcgacuucaacggcggcaagaucuccguccaguacaaccucucccacuccuacgccggcgacgccgccaaccacugcggcaccgucgccaacggcguccuccagaccuucaugcgcauggccuggggcggcuccuacaucgcccucgacuccggcugcggcaacugggacugcaucaugaccuccuaccaguaccucaucauccagaacaccaccugggaggaccacugccaguucucccgccccucccccaucggcuaccucggccuccucucccagcgcacccgcgacaucuacaucucccgccgccgccggggcaccuucaccuggacccucuccgacuccgagggcgaggacacccccggcggcuacugccucacccgcuggaugcucaucgaggccgagcucaagugcuucggcaacaccgccgucgccaagugcaacgagaagcacgacgaggaguucugcgacaugcuccgccucuucgacuucaacaagcaggccauccagcgccucaaggcccccgcccagauguccauccagcucaucaacaaggccgucaacgcccucaucaacgaccagcucaucaugaagaaccaccuccgcgacaucaugugcauccccuacugcaacuacuccaaguacugguaccucaaccacaccaccaccggccgcaccucccuccccaagugcuggcucgucuccaacggcuccuaccucaacgagacccacuucuccgacgacaucgagcagcaggccgacaacaugaucaccgagaugcuccagaaggaguacauggagcgccagggcaagaccccccucggccucgucgaccucuucgucuucuccaccuccuucuaccucaucuccaucuuccuccaccucgucaagauccccacccaccgccacaucgucggcaaguccugccccaagccccaccgccucaaccacaugggcaucugcuccugcggccucuacaagcagcccggcguccccgucaaguggaagcgcugaggacuagugcaucacauuuaaaagcaucucagccuaccaugagaauaagagaaagaaaaugaagaucaauagcuuauucaucucuuuuucuuuuucguugguguaaagccaacacccugucuaaaaaacauaaauuucuuuaaucauuuugccucuuuucucugugcuucaauuaauaaaaaauggaaagaaccuagaucuaaaaaaaaaaaaaaaaaaaaaaaaaaaaaaaaaaaaaaaaaaaaaaaaaaaaaaaaaaaaaaaaugcaucccccccccccccccccccccccccccccccaaaggcucuuuucagagccaccagaauu

SEQ ID NO: 7095 - RNA, 1858 nt, Artificial Sequence
  mRNA product Design i-2 comprising derived and/or modified sequence from LASV(LM765-SLE-2012;Clade IV)__AIT17814__GPCstabilized (opt2)
ggggcgcugccuacggagguggcagccaucuccuucucggcaucaagcuuaccaugggccagaucgucaccuucuuccaggaggucccccacgucaucgaggaggucaugaacaucguccucaucgcccucuccauccucgccguccucaagggccucuacaacuucgccaccugcggccucgucggccucgucaccuuccuccuccucugcggccgcuccugcaccaccucccucuacaagggcgucuacgagcuccagacccucgagcucaacauggagacccucaacaugaccaugccccucuccugcaccaagaacaacucccaccacuacaucauggucggcaacgagaccggccucgagcucacccucaccaacaccuccaucaucgaccacaaguucugcaaccucuccgacgcccaccgcaagaaccucuacgaccacgcccucauguccaucaucuccaccuuccaccucuccauccccaacuucaaccaguacgaggccauguccugcgacuucaacggcggcaagaucuccguccaguacaaccucucccacuccuacgccaaggacgccgccgaccacugcggcaccgucgccaacggcguccuccagaccuucaugcgcauggccuggggcggcuccuacaucgcccucgacuccggcugcggccgcugggacugcaucaugaccuccuaccaguaccucaucauccagaacaccaccugggaggaccacugccaguucucccgccccucccccaucggcuaccucggccuccucucccagcgcacccgcgacaucuacaucucccgccgccgccggggcaccuucaccuggacccucuccgacuccgagggcaaggacacccccggcggcuacugccucacccgcuggaugcucaucgaggccgagcucaagugcuucggcaacaccgccgucgccaagugcaacgagaagcacgacgaggaguucugcgacaugcuccgccucuucgacuucaacaagcaggccauccagcgccucaaggcccccgcccagauguccauccagcucaucaacaaggccgucaacgcccucaucaacgaccagcucaucaugaagaaccaccuccgcgacaucaugugcauccccuacugcaacuacuccaaguacugguaccucaaccacaccaccaccggcaagaccucccuccccaagugcuggcucgucuccaacggcuccuaccucaacgagacccacuucuccgacgacaucgagcagcaggccgacaacaugaucaccgagaugcuccagaaggaguacauggagcgccagggcaagaccccccucggccucgucgaccucuucgucuucuccaccuccuucuaccucaucuccaucuuccuccaccucgucaagauccccacccaccgccacaucgucggcaagcccugccccaagccccaccgccucaaccacaugggcaucugcuccugcggccucuacaagcagcccggcguccccgucaaguggaagcgcugaggacuagugcaucacauuuaaaagcaucucagccuaccaugagaauaagagaaagaaaaugaagaucaauagcuuauucaucucuuuuucuuuuucguugguguaaagccaacacccugucuaaaaaacauaaauuucuuuaaucauuuugccucuuuucucugugcuucaauuaauaaaaaauggaaagaaccuagaucuaaaaaaaaaaaaaaaaaaaaaaaaaaaaaaaaaaaaaaaaaaaaaaaaaaaaaaaaaaaaaaaaugcaucccccccccccccccccccccccccccccccaaaggcucuuuucagagccaccagaauu

SEQ ID NO: 7096 - RNA, 1858 nt, Artificial Sequence
  mRNA product Design i-2 comprising derived and/or modified sequence from LASV(LM776-SLE-2012;Clade IV)__AIT17824__GPCstabilized (opt2)
ggggcgcugccuacggagguggcagccaucuccuucucggcaucaagcuuaccaugggccagaucgucaccuucuuccaggaggucccccacgucaucgaggaggucaugaacaucguccucaucgcccucuccauccucgccguccucaagggccucuacaacuucgccaccugcggccucgucggccucgucaccuuccuccuccucugcggccgcuccugcaccaccuccgucuacaagggcgucuacgagcuccagacccucgagcucaacauggagacccucaacaugaccaugccccucuccugcaccaagaacaacucccaccacuacaucauggucggcaacgagaccggccucgagcucacccucaccaacaccuccaucaucaaccacaaguucugcaaccucuccgacgcccacaagaagaaccucuacgaccacgcccucauguccaucaucuccaccuuccaccucuccauccccaacuucaaccaguacgaggccauguccugcgacuucaacggcggcaagaucuccguccaguacaaccucucccacuccuacgccggcgacgccgccaaccacugcggcaccgucgccaacggcguccuccagaccuucaugcgcauggccuggggcggcuccuacaucgcccucgacuccggcugcggcaagugggacugcaucaugaccuccuaccaguaccucaucauccagaacaccaccugggaggaccacugccaguucucccgccccucccccaucggcuaccucggccuccucucccagcgcacccgcgacaucuacaucucccgccgccgccggggcaccuucaccuggacccucuccgacuccgagggcaaggacacccccggcggcuacugccucacccgcuggaugcucaucgaggccgagcucaagugcuucggcaacaccgccgucgccaagugcaacgagaagcacgacgaggaguucugcgacaugcuccgccucuucgacuucaacaagcaggccauccagcgccucaaggcccccgcccagauguccauccagcucaucaacaaggccgucaacgcccucaucaacgaccagcucaucaugaagaaccaccuccgcgacaucaugugcauccccuacugcaacuacuccaaguacugguaccucaaccacaccaccaccggcaagaccucccuccccaagugcuggcucgucuccaacggcuccuaccucaacgagacccacuucuccgacgacaucgagcagcaggccgacaacaugaucaccgagaugcuccagaaggaguacauggagcgccagggcaagaccccccucggccucgucgaccucuucgucuucuccaccuccuucuaccucaucuccaucuuccuccaccucgucaagauccccacccaccgccacaucgucggcaaguccugccccaagccccaccgccucaaccacaugggcaucugcuccugcggccucuacaagcagcccggcguccccguccgcuggaagcgcugaggacuagugcaucacauuuaaaagcaucucagccuaccaugagaauaagagaaagaaaaugaagaucaauagcuuauucaucucuuuuucuuuuucguugguguaaagccaacacccugucuaaaaaacauaaauuucuuuaaucauuuugccucuuuucucugugcuucaauuaauaaaaaauggaaagaaccuagaucuaaaaaaaaaaaaaaaaaaaaaaaaaaaaaaaaaaaaaaaaaaaaaaaaaaaaaaaaaaaaaaaaugcaucccccccccccccccccccccccccccccccaaaggcucuuuucagagccaccagaauu

SEQ ID NO: 7097 - RNA, 1858 nt, Artificial Sequence
  mRNA product Design i-2 comprising derived and/or modified sequence from LASV(Mad39;Clade IV)__ANH09722__GPCstabilized (opt2)
ggggcgcugccuacggagguggcagccaucuccuucucggcaucaagcuuaccaugggccagaucgucaccuucuuccaggaggucccccacgucaucgaggaggucaugaacaucguccucaucgcccucuccauccucgccguccucaagggccucuacaacgucgccaccugcggccucaucggccucgucaccuuccuccuccucugcggccgcuccugcaccaccacccucuacaagggcgucuacgagcuccaggcccucgagcucaacauggagacccucaacaugaccaugccccucuccugcaccaagaacaacucccaccacuacauccgcgucggcaacgagaccggccucgagcucacccucaccaacaccucccucaucaaccacaaguucugcaaccucuccgacgcccacaagaagaaccucuacgaccacgcccucauguccaucaucuccaccuuccaccucuccauccccaacuucaaccaguacgaggccauguccugcgacuucaacgacggcaagaucuccguccaguacaaccucucccacaccuacgccggcgacaccgccaaccacugcggcaccgucgccaacggcguccuccagaccuucaugcgcauggccuggggcggcuccuacaucgcccucgacuccggcugcggcggcugggacugcaucaugaccuccuaccaguaccucaucauccagaacaccaccugggaggaccacugccaguucucccgccccucccccaucggcuaccucggccuccucucccagcgcacccgcgacaucuacaucucccgccgccgccggggcaccuucaccuggacccucuccgacuccgagggcaaggacacccccggcggcuacugccucacccgcuggaugcucaucgaggccgagcucaagugcuucggcaacaccgccgucgccaagugcaacgagaagcacgacgaggaguucugcgacaugcuccgccucuucgacuucaacaagcaggccauccagcgccucaaggcccccgcccagauguccauccagcucaucaacaaggccgucaacgcccucaucaacgaccagcucaucaugaagaaccaccuccgcgacaucaugugcauccccuacugcaacuacuccaaguacugguaccucaaccacaccgucaccggcaagaccucccuccccaagugcuggcucgucuccaacggcuccuaccucaacgagacccacuucuccgacgacaucgagcagcaggccgacaacaugaucaccgagaugcuccagaaggaguacauggagcgccagggcaagaccccccucggccucgucgaccucuucgucuucuccaccuccuucuaccucaucuccaucuuccuccaccucgucaagauccccacccaccgccacgucgucggcaagcccugccccaagccccaccgccucaaccacaugggcaucugcuccugcggcuucuacaagcagcccggcguccccguccgcuggaagcgcugaggacuagugcaucacauuuaaaagcaucucagccuaccaugagaauaagagaaagaaaaugaagaucaauagcuuauucaucucuuuuucuuuuucguugguguaaagccaacacccugucuaaaaaacauaaauuucuuuaaucauuuugccucuuuucucugugcuucaauuaauaaaaaauggaaagaaccuagaucuaaaaaaaaaaaaaaaaaaaaaaaaaaaaaaaaaaaaaaaaaaaaaaaaaaaaaaaaaaaaaaaaugcaucccccccccccccccccccccccccccccccaaaggcucuuuucagagccaccagaauu

SEQ ID NO: 7098 - RNA, 1858 nt, Artificial Sequence
  mRNA product Design i-2 comprising derived and/or modified sequence from LASV(Z0947-SLE-2011;Clade IV)__AIT17840__GPCstabilized (opt2)
ggggcgcugccuacggagguggcagccaucuccuucucggcaucaagcuuaccaugggccagaucgucaccuucuuccaggaggucccccacgucaucgaggaggucaugaacaucguccucaucgcccucuccauccucgccguccucaagggccucuacaacuucgccaccugcggccucgucggccucgucaccuuccuccuccucugcggccgcuccugcaccaucucccucuacaagggcgucuacgagcuccagacccucgagcucaacauggagacccucaacaugaccaugccccucuccugcaccaagaacaacucccaccacuacaucauggucggcaacgagaccggccucgagcucacccucaccaacaccuccaucaucaaccacaaguucugcaaccucuccgacgcccacaagaagaaccucuacgaccacgcccucauguccaucaucuccaccuuccaccucuccauccccaacuucaaccaguacgaggccauguccugcgacuucaacggcggcaagaucuccguccaguacaaccucucccacuccuacgccggcgacgccgccaaccacugcggcaccgucgccaacggcguccuccagaccuucaugcgcauggccuggggcggcuccuacaucgcccucgacuccggcugcgaccgcugggacugcaucaugaccuccuaccaguaccucaucauccagaacaccaccugggaggaccacugccaguucucccgccccucccccaucggcuaccucggccuccucucccagcgcacccgcgacaucuacaucucccgccgccgccggggcaccuucaccuggacccucuccgacuccgagggcaaggacacccccggcggcuacugccucacccgcuggaugcucaucgaggccgagcucaagugcuucggcaacaccgccgucgccaagugcaacgagaagcacgacgaggaguucugcgacaugcuccgccucuucgacuucaacaagcaggccauccagcgccucaaggcccccgcccagauguccauccagcucaucaacaaggccgucaacgcccucaucaacgaccagcucaucaugaagaaccaccuccgcgacaucaugugcauccccuacugcaacuacuccaaguacugguaccucaaccacaccaccaccggcaagaccucccuccccaagugcuggcucgucuccaacggcuccuaccucaacgagacccacuucuccgacgacaucgagcagcaggccgacaacaugaucaccgagaugcuccagaaggaguacauggagcgccagggcaagaccccccucggccucgucgaccucuucgucuucuccaccuccuucuaccucaucuccaucuuccuccaccucgucaagauccccacccaccgccacaucgucggcaagcccugccccaagccccaccgccucaaccacaugggcaucugcuccugcggccucuacaagcagcccggcguccccgucaaguggaagcgcugaggacuagugcaucacauuuaaaagcaucucagccuaccaugagaauaagagaaagaaaaugaagaucaauagcuuauucaucucuuuuucuuuuucguugguguaaagccaacacccugucuaaaaaacauaaauuucuuuaaucauuuugccucuuuucucugugcuucaauuaauaaaaaauggaaagaaccuagaucuaaaaaaaaaaaaaaaaaaaaaaaaaaaaaaaaaaaaaaaaaaaaaaaaaaaaaaaaaaaaaaaaugcaucccccccccccccccccccccccccccccccaaaggcucuuuucagagccaccagaauu

SEQ ID NO: 7099 - RNA, 1858 nt, Artificial Sequence
  mRNA product Design i-2 comprising derived and/or modified sequence from LASV(Josiah;Clade IV)__NP_694870__GPCstabilized (opt3)
ggggcgcugccuacggagguggcagccaucuccuucucggcaucaagcuuaccaugggccagaucgugaccuucuuucaagaggucccccacguuauugaagaggugaugaacauaguacugaucgcccucagcgugcuugcuguccugaagggguuguacaauuucgcaacaugcggauuagugggucugguuacuuuucuacuccuguguggcagauccugcacgaccucucuuuauaaagggguguacgaacugcagacauuggagcucaacauggaaacucugaauaugaccaugccucugucauguacaaagaacaauagucaucacuauauuauggucggaaacgagaccggccucgaguuaacucugacaaauaccagcaucauuaaccauaaauucugcaaucuuuccgacgcccacaagaaaaacuuguacgaucaugcgcugaugucuaucauaucgacguuucaccuaucaaucccaaauuucaaccaguaugaagcuaugagcugugacuuuaauggugggaagauuagugugcaguacaaccucucccacucuuaugccggagaugcagccaaucauugcggcacuguagcuaacggcguucugcaaaccuucaugaggauggcauggggagggagcuacaucgcccuugacuccgguugcggcaacugggauuguauuaugacaucauaccaguaucugaucauacagaauacuaccugggaggaccacugccaguuuagucgcccgagccccauuggguacuugggacuccugucucaacgaacacgugauaucuauauuuccagaaggcgccggggcaccuucacguggacucucucagacagcgaagguaaggauacaccugggggauacugucuuacccgguggaugcugaucgaggcugaguugaaaugcuuuggcaacacugccguggcgaaguguaaugaaaaacaugacgaggaguucugcgauaugcuacgccuguuugacuucaacaagcaggcaauccagagacucaaagcccccgcucagaugaguauucaacugauaaauaaggccgucaacgcacuuaucaaugaucagcugauuaugaagaaccacuugagggacaucaugugcauaccauauugcaauuacucuaaauauugguaccucaaccacacaaccacggggcggaccucccugcccaaguguugguuagugagcaauggaucguaccugaacgaaacacauuucucugacgauauugagcagcaagcugacaauaugaucacugagaugcuacagaaagaauauauggagcgccaggguaagaccccucucggccugguggaucuuuuugucuucuccacaucauuuuacuugaucaguauuuuccugcaccucguuaaaaucccaacucaucgacacauugugggaaagagcugccccaaaccucauagacugaaccacauggggauauguuccugcggccuuuauaagcagccagguguaccggugaaguggaaaaggugaggacuagugcaucacauuuaaaagcaucucagccuaccaugagaauaagagaaagaaaaugaagaucaauagcuuauucaucucuuuuucuuuuucguugguguaaagccaacacccugucuaaaaaacauaaauuucuuuaaucauuuugccucuuuucucugugcuucaauuaauaaaaaauggaaagaaccuagaucuaaaaaaaaaaaaaaaaaaaaaaaaaaaaaaaaaaaaaaaaaaaaaaaaaaaaaaaaaaaaaaaaugcaucccccccccccccccccccccccccccccccaaaggcucuuuucagagccaccagaauu

SEQ ID NO: 7100 - RNA, 1855 nt, Artificial Sequence
  mRNA product Design i-2 comprising derived and/or modified sequence from LASV(LP;Clade I)__AAF86701__GPCstabilized (opt3)
ggggcgcugccuacggagguggcagccaucuccuucucggcaucaagcuuaccaugggccagaucauuaccuucuuucaagaggugccccacgucauagaagagguuaugaacaucgugcugauugcccucagccuucuggcuaucuugaagggguuauacaauauugcaacaugcggaaucauaggucugguagccuuccuauuucucuguggcaaauccugcucucugacucuuaaagggggauaugaacugcagacguuggagcucaacauggaaacccugaauaugacaaugccucugucauguacuaagaacaguagccaucacuacaucagagugggcaaugagaccggucucgaguuaacacugaccaacacuuccauuaucaaucauaaguucugcaaccuuucugacgcgcacaaaaagaauuuguaugaucaugcucugaugucgauuaucucaacauuucaccuaagcauaccaaacuucaaucaguacgaagccaugaguugugacuuuaacgggggaaagauuuccguccaguauaaucucucucacagcuacgcaggcgaugccgcugagcauugcggcaccguggcaaacgggguucugcaaacguucaugaggauggccuggggaggucgguauaucgcucuugacuccggcugcgggaauugggauuguauuaugacuucauaccaguaccugaucauccagaacaccacaugggaagaccacugccaguuuagucgcccgagccccauuggauauuugggccuccugucucaacgaacucgugauauauacaucuccagaaggcgccgggguaccuucacauggacccucucagacagcgaggggaacgagacgccuggaggcuauugucuuacucgguggaugcugauugaagccgaguugaagugcuuuggcaauacagcgguggcaaaauguaacgaaaagcaugaugaggaguucugcgacaugcuacgccuguuugauuucaauaaacaggccaucagaaggcucaaggcucccgcccagaugaguauacagcugauuaacaaggcagucaaugcucuuaucaacgaccaacugaucaugaaaaaucacuugcgggauauuaugugcaucccauacugcaacuauucuaaguacugguaucucaaucacaccuccagcggacgcacuucgcugcccaaauguugguuaauuucuaacgguuccuaccugaaugagacacaguucucagacgacauagaacagcaagccgauaacaugaucaccgagaugcuacagaaggaauacauugagcgacagggcaaaacgccucucgggcugguggacaucuuuaucuucaguaccagcuuuuaucuuauuuccauauucuugcaucugaucaagauuccaacacacagacauaucguaggaaaacccugcccuaagccacacaggcucaaucauaugggcguuuguucuugcggucuguacaagcacccgggggugcccacuaaauggaagcggugaggacuagugcaucacauuuaaaagcaucucagccuaccaugagaauaagagaaagaaaaugaagaucaauagcuuauucaucucuuuuucuuuuucguugguguaaagccaacacccugucuaaaaaacauaaauuucuuuaaucauuuugccucuuuucucugugcuucaauuaauaaaaaauggaaagaaccuagaucuaaaaaaaaaaaaaaaaaaaaaaaaaaaaaaaaaaaaaaaaaaaaaaaaaaaaaaaaaaaaaaaaugcaucccccccccccccccccccccccccccccccaaaggcucuuuucagagccaccagaauu

SEQ ID NO: 7101 - RNA, 1855 nt, Artificial Sequence
  mRNA product Design i-2 comprising derived and/or modified sequence from LASV(803213;Clade II)__AAF86703__GPCstabilized (opt3)
ggggcgcugccuacggagguggcagccaucuccuucucggcaucaagcuuaccaugggccagaucauuaccuucuuucaagaggugccccacgucauagaagagguuaugaacaucgugcugauugcccucagccuucuggcuaucuugaaggggauuuacaauguagcaacaugcggauuauucggucugaucuccuuucuacuccuguguggcagaucuugcucagugacuuauaaaggggucuacgaacuucagacgcuggaguugaacauggccaaucucaacaugaccaugccucugaguuguacaaagaauaacagccaucacuauauaauggugggaaaugaaacuggccuggagcucaccuuaacaaacaccuccaucauuaaucauaaauucugcaaccugucugacgcgcacaagaaaaaucuuuacgaucaugcuuugaugucgaucauuucaacuuuucaccugagcaucccaaacuucaaucaguaugaggccaugaguugugacuuuaacggugggaagauauccguucaguacaaucuaucucacagcuucgcaguggaugccgcuaaccauugcggaacaauugcaaacggcguccuccaaaccuuuaugaggauggccuggggcggguccuauaucgcucuggacucaggaugcgguaauugggauuguauuaugacgaguuaccaguaccuuaucauccagaacacuaccugggaagaccacugccaguucagccggccgucucccauuggcuaucugggguugcucucccaacgcacacgagauauauacaucucacguagacgccggggaacuuuuaccuggacacugagcgacagugagggcaaugaagccccugguggguauugucucaccagguggaugcuuauugaggcggagcugaaaugcuucggaaacacggcaguggccaaguguaaugaaaaacaugaugaggaauuuugcgacauguugcggcuauucgauuucaacaagcaggcuaucaaacgccugaagacucccgcccagaugucuauacagcucauuaauaaggcaguaaacgcucugaucaaugaccaacuuaucaugaaaaaccaccugagagauauuaugugcaucccauacugcaauuauuccagguacugguauuugaaccacacaguuaccggcaagacuagccucccccgguguuggcuggugucgaaugggucuuacuuaaacgaaacacauuuuuccgacgacauugagcagcaggccgauaauaugauaaccgagaugcugcaaaaagaauacauggaccgccagggaaagacgccucuaggucucgucgaucuguucguguuuucaaccaguuucuaucuuaucagcaucuuuuugcaccuggugaaaauuccaacacaucgacacaucgucggcaagcccugcccuaaaccacauagacucaaccacauggggauuuguuccugcggacuguacaagcacccgggcguucccgugaaguggaaaaggugaggacuagugcaucacauuuaaaagcaucucagccuaccaugagaauaagagaaagaaaaugaagaucaauagcuuauucaucucuuuuucuuuuucguugguguaaagccaacacccugucuaaaaaacauaaauuucuuuaaucauuuugccucuuuucucugugcuucaauuaauaaaaaauggaaagaaccuagaucuaaaaaaaaaaaaaaaaaaaaaaaaaaaaaaaaaaaaaaaaaaaaaaaaaaaaaaaaaaaaaaaaugcaucccccccccccccccccccccccccccccccaaaggcucuuuucagagccaccagaauu

SEQ ID NO: 7102 - RNA, 1855 nt, Artificial Sequence
  mRNA product Design i-2 comprising derived and/or modified sequence from LASV(GA391;Clade III)__CAA36645__GPCstabilized (opt3)
ggggcgcugccuacggagguggcagccaucuccuucucggcaucaagcuuaccaugggccagaucgugaccuucuuucaagaggucccccacguuauugaagaggugaugaacauaguacugaucgcccucagcauucuugcuauccugaagggguuguacaauguggcaacaugcggauuaauuggucuggucacuuuccuacuccuguccggcagaucuuguucacuuaucuauaaagggacguacgaacugcagaccuuggagcucaacauggaaacacugaauaugacuaugccucugaguugcaccaagaacaauagccaucacuauauaagggugggaaacgagacaggccucgaguuaacccugacuaauacauccauccuuaaccauaaauuuuguaauuugucugacgcccacaagcggaaccuguacgaucauucgcuaaugucaauuaucagcaccuuccaccucaguauuccaaauuuuaaccaguaugaagcgauguccugcgacuucaauggugggaaaaucacgguucaguacaaccugucucacagcuuugcuguggaugccgcaggacauuguggcacucuugccaauggcguccugcaaaccuucaugcgcauggcuuggggaggguccuauauagcauuggacucagguugcggcaacugggauugcauuaugacaaguuaccaguaccucaucauucagaacacuaccugggacgaucacugucaguuuagccguccgucucccaucggguaucugggauuacugucccaaagaacaagggacaucuacauuucacggcgccgccggggcaccuucacguggacucugagcgauagugaggguaaugaaacaccugggggauauugcuugaccagauggaugcuaauagaggccgagcugaaguguuuuggcaacacugcuguggccaagugcaaugaaaaacaugacgaggaguucugugauaugcucaggcuguuugacuucaacaagcaggcgauccggcgccuuaaaacacccgcacagaugucuauucagcugaucaauaaggccguaaacgcuuugauaaaugaucaacucauuaugaaaaaccaucugcgagacaucaugugcaucccauacugcaauuauuccagauacugguauuuaaaccacaccagcacggggaagaccucgcugcccaggugcuggcuaauuucuaauggauccuaccucaacgaaacaaaguucucagacgauaucgagcagcaggccgacaauaugauuacugagaugcugcaaaaagaauacauagaucggcaggguaagaccccucuuggcuugguugaccuguuuguguucaguacuagcuuuuaucucaucuccauuuuccugcaccuugucaaaaucccaacacaccgucauaucguggggaagcccuguccuaaaccacaccgccugaaccauaugggaauuugcucuuguggcuuguacaagcagccgggugugcccgucagauggaaaaggugaggacuagugcaucacauuuaaaagcaucucagccuaccaugagaauaagagaaagaaaaugaagaucaauagcuuauucaucucuuuuucuuuuucguugguguaaagccaacacccugucuaaaaaacauaaauuucuuuaaucauuuugccucuuuucucugugcuucaauuaauaaaaaauggaaagaaccuagaucuaaaaaaaaaaaaaaaaaaaaaaaaaaaaaaaaaaaaaaaaaaaaaaaaaaaaaaaaaaaaaaaaugcaucccccccccccccccccccccccccccccccaaaggcucuuuucagagccaccagaauu

SEQ ID NO: 7103 - RNA, 1858 nt, Artificial Sequence
  mRNA product Design i-2 comprising derived and/or modified sequence from LASV(AV;Clade V)__CCA30314__GPCstabilized (opt3)
ggggcgcugccuacggagguggcagccaucuccuucucggcaucaagcuuaccaugggccagaucgugaccuucuuucaagaggucccccacguuauugaagaggugaugaacauaguacugaucgcccucagcauucuugcugugcugaagggguuguacaauaucgcaacaugcggauuaauuggucugaucacuuuccuacuccuguguggcagauccugcagcucaaaccuuuauaaaggggucuacgaacugcagaguuuggaccucaauauggagacgcugaacaugaccaugccucugagcuguacaaagaauaacucccaucacuauauaagggugggaaaugauacuggccucgaauuaacccugacaaacaccucuauccuuaaucauaaauuuugcaacuugucggacgcccacaagaaagaucuguacgaccaugcgcuaaugucaauuaucagcacuuuccaccucaguauuccaaauuuuaaccaguaugaggcuauguccugugauuucaauggugggaagaucucuguucaguacaaccugagccacuccuaugccauagacgcagccaaucauugcggaacaguggcuaacggcauucuucaaaccuuuaugcggauggcauggggcgggucauacaucgcccuggauaguggaugcgguaacugggacuguauuaugacgagcuaccaguauuugaucauccagaauacuaccugggagaaccacugccaguucucucgaccgucccccauuggcuaccucgggcuguuaucacaacguacaagagauauauauaucagcaggcggcgccggggaacuuuuaccuggacacuuagugacucugaaggcaaugcuaccccugguggguacugucugacgcgcuggauguugauugaggccgaacuaaagugcuucggaaacacugcggucgcaaaauguaaugagaagcaugaugaggaauuuugcgacaugcugagacucuucgauuuuaacaaacaggccaucuccaggcugaagucucccgcucagaugucgauacagcuuauuaauaaagccgugaacgcacugaucaaugaccaauugaucaugaagaaccaccuccgggacauuaugugcaucccauauugcaauuacucuaaguauugguaccugaaccacacaauuaccggcaaaacuuccuuacccaaguguuggcugguaucaaaugggaguuaccuaaacgaaacacauuucagcgaugacauagagcagcaggcugauaauaugaucaccgaaaugcuccaaaaagaguauauggagcgccagggaaagacgccucugggucuuguugacuuguucguguuuuccaccucuuucuaccugauuagcaucuuucuccgacuggucaaaaucccaacacacagacauauugugggcaagcccugcccuaaaccacacaggcuuaaccauauggggauauguucaugcggacuguauaagcagccgggcgugcccguccgguggaagcguugaggacuagugcaucacauuuaaaagcaucucagccuaccaugagaauaagagaaagaaaaugaagaucaauagcuuauucaucucuuuuucuuuuucguugguguaaagccaacacccugucuaaaaaacauaaauuucuuuaaucauuuugccucuuuucucugugcuucaauuaauaaaaaauggaaagaaccuagaucuaaaaaaaaaaaaaaaaaaaaaaaaaaaaaaaaaaaaaaaaaaaaaaaaaaaaaaaaaaaaaaaaugcaucccccccccccccccccccccccccccccccaaaggcucuuuucagagccaccagaauu

SEQ ID NO: 7104 - RNA, 1855 nt, Artificial Sequence
  mRNA product Design i-2 comprising derived and/or modified sequence from LASV(Togo/2016/7082;Clade VI)__AMR44577__GPCstabilized (opt3)
ggggcgcugccuacggagguggcagccaucuccuucucggcaucaagcuuaccaugggccagaucauuaccuucuuucaagaggugccccacgucauagaagagguuaugaacaucgugcugauugcccucagccuucuggcuaucuugaaggggguauacaauguggcaacaugcggaauuaucgguuuagucacuuuccuguuucuauguggcagauccugcucucucauauauaaagggucauacgaacugcagacgcuugagcugaacauggaaaccuugaauaugacaaugccucucaguuguacuaagaacagcucccaucacuauaucagggugggaaaugagaccggccuggagcugacacucaccaacacuucuauuaucaaucauaaauucugcaacuuaucggacgcccacaagcggaaucuguacgaucaugcgcuuaugucaauuuugagcacauuucaccugaguaucccaaacuucaaucaguaugaagcuauguccugugacuuuaacggugggaaaauaucuguucaguacaaucuaagccacgccuaugcaguggaugccgcugagcauugcggaaccgucgcaaacggcgugcuccaaacguucaugcgcauggccuggggcggguccuacauugcucuggacucaggaugcgguaauugggauuguaucaugaccaguuaccaguaucuuauuauccagaacacuacaugggaagaccacugccaguuuagccguccgucucccaucggcuaccugggguugcucucccaaagaacuagggauauuuauauaucacggcgccgccggggaaccuucacauggacccugagcgacagugagggcaacgagacgccugguggguacugucucacuagauggaugcuuaucgaagccgagcugaagugcuuuggaaauacagcgguagcaaaguguaacgaaaaacaugaugaggaguucugcgacauguugaggcuauuugauuucaauaagcaggccauucagcggcugaaaucucccgcucagauguccauccaacucauaaacaaggccguuaaugcacugauuaacgaccagcuuaucaugaaaaaucaucugcgcgauaugaugugcaucccauauugcaacuacagcaaguauugguacuugaaucacaccucgucuggccgaacuucccuccccaaguguuggcuggugucaaacgggaguuacuuaaaugagacacacuucagcgacgacauugaacagcaagcugauaacaugaucaccgagaugcugcagaaagaauauauugacagacagggaaagacgccucuaggucucgucgaucuguuuguguucuccaccucuuuuuaccuuauaagcaucuucuugcaccugauuaaaaucccaacacauaggcacaucgugggcaagcccugcccuaaaccacaucggcucaaucacauggggauuuguucaugcggacuguauaagcagccgggcguccccacucguuggaaacgcugaggacuagugcaucacauuuaaaagcaucucagccuaccaugagaauaagagaaagaaaaugaagaucaauagcuuauucaucucuuuuucuuuuucguugguguaaagccaacacccugucuaaaaaacauaaauuucuuuaaucauuuugccucuuuucucugugcuucaauuaauaaaaaauggaaagaaccuagaucuaaaaaaaaaaaaaaaaaaaaaaaaaaaaaaaaaaaaaaaaaaaaaaaaaaaaaaaaaaaaaaaaugcaucccccccccccccccccccccccccccccccaaaggcucuuuucagagccaccagaauu

SEQ ID NO: 7105 - RNA, 1855 nt, Artificial Sequence
  mRNA product Design i-2 comprising derived and/or modified sequence from LASV(KAK-428;Clade n.d. (VII))__ANH09740__GPCstabilized (opt3)
ggggcgcugccuacggagguggcagccaucuccuucucggcaucaagcuuaccaugggccagaucgugaccuucuuucaagaggucccccacguuauugaagaggugaugaacauaguacugaucgcccucagccuucuggcuauuuugaagggguuauacaauuucgcaacaugcggagugaucggucugauuacuuuucuacuccuguguggcagauccugcucugccacguauaaagggcaguacgaacuucagacccuggaguugaacauggaaucacucaauaugacaaugccucugaguuguacuaagaacaauagccaucacuauaucagggcgggaaacaauaccggccuggagcucacauuaaccaacacuuccauaaucucucauaaauucugcaaucugucggacgcucacaagaaaaaccuuuacgaucauacauugaugucaauuaucaccacguuucaccugagcauuccaaauuucaaccaguaugaggccaugaguugugacuuuaauggugggaagaucuccauacaauacaaccuaucucacagcuaugcaggagaugccgcucagcauugcggcacugucgcaaauggcgugcuccagaccuucaugcggauggccuggggaggguccuaccuggcucuugacucagguugccgaggcugggauuguauuaucaguagcuaccaguaucugauuauccaaaacacaacuugggacgaucacugccaguuuucucguccgucccccaucggguacuugggauucguuucacagaagaccagagacauuuauauaagcaggcggcgccggggcacauuuaccuggacguuaagugauucugaaggucaugacaugccugggggauacugucugacucgcuggaugcucaucgaggccgaucuuaaaugcuucggcaacacagcgguggcaaaguguaaugaaaaacacgacgaggaguuuugcgauauguggagacuguucgacuucaacaagcaggccauucaaagguugaaagcucccgcccagaugaauauccagcuaauaaacaaggcagucaaugcucugauuaacgaccaacucaugaugaagaaucaucugcgggauaucaugugcaucccauauugcaacuacuccaaauuuugguaucuuaauaacaccacuacagggcgcaccagccugccccgauguugguugauuucgaauggaucuuaccucaacgagacgcacuucuccgacgauaucgaacagcaggccgacaauaugauuaccgagaugcugcagaaggaauacauggauagacaagguaaaacaccuuuaggccugguggaccuauuuguauucucaaccaguuuuuaucucauaacuaucuuccugcaccuuguuaagauuccaacacauaggcacaucguggggaaacccugcccuaagccacaucgguugaaccacaugggaaucuguagcugcggccuguacaaacagccggguguccccgugcguuggaagcgcugaggacuagugcaucacauuuaaaagcaucucagccuaccaugagaauaagagaaagaaaaugaagaucaauagcuuauucaucucuuuuucuuuuucguugguguaaagccaacacccugucuaaaaaacauaaauuucuuuaaucauuuugccucuuuucucugugcuucaauuaauaaaaaauggaaagaaccuagaucuaaaaaaaaaaaaaaaaaaaaaaaaaaaaaaaaaaaaaaaaaaaaaaaaaaaaaaaaaaaaaaaaugcaucccccccccccccccccccccccccccccccaaaggcucuuuucagagccaccagaauu

SEQ ID NO: 7106 - RNA, 1855 nt, Artificial Sequence; identical to SEQ ID NO: 7100
  mRNA product Design i-2 comprising derived and/or modified sequence from LASV(Pinneo-NIG-1969;Clade I)__AIT17836__GPCstabilized (opt3)

SEQ ID NO: 7107 - RNA, 1855 nt, Artificial Sequence
  mRNA product Design i-2 comprising derived and/or modified sequence from LASV(ISTH0009-NIG-2011;Clade II)__AIT17404__GPCstabilized (opt3)
ggggcgcugccuacggagguggcagccaucuccuucucggcaucaagcuuaccaugggccagaucauuaccuucuuucaagaggugccccacgucauagaagagguuaugaacaucgugcugauugcccucagccuucuggcuaucuugaaggggauuuacaauguagcaacaugcggauuauucggucugguguccuuucuacuccuguguggcagaucuugcucaacuacguauaaaggggucuacgaacuucagacccuggaguuggacauggccagucucaacaugacaaugccucugagcuguacuaagaauaacucccaucacuauaucauggugggaaaugaaaccggccuggagcucacauuaaccaacacuucuauaaucaaucauaaauucugcaaccugucggaugcgcacaagaaaaaucuuuacgaccaugcuuugaugucaauuaucagcacauuucaccugaguauuccaaacuucaaucaguaugaggccauguccugugauuuuaacggugggaagaucucuguucaguacaaucuaagccacgcauaugccguggacgcugcaaaccauugcggaaccauagccaauggcguccuccaaacguucaugaggauggcuuggggcggguccuacauugcccuggauucaggaugcgguaguugggacuguaucaugacuagcuaccaguaucuuauuauccagaacaccacaugggaagaucacugccaguuuucucggccgucccccaucggcuaccugggguugcucucacaacgcacucgagacauuuauauaagccguagacgccggggaaccuucacauggacccugagugauucugagggcaacgaaacgccugguggguacugucucacuagguggaugcuuaucgaggcggagcugaaaugcuuuggaaauacagcaguggccaaguguaacgaaaaacaugacgaggaguucugcgauauguugcggcuauuugacuucaauaagcaggcuauucgcagacugaaaacccccgcccagauguccauccagcucauaaacaaggcaguaaaugcucugauuaacgaucaacuuaucaugaagaaucaccugagggacaucaugugcauuccauauugcaacuacagcaaauauugguacuugaaucacacuguuacaggcaagaccucgcucccccgguguuggcuggugucuaacggguccuacuuaaaugaaacgcauuucucagacgauaucgagcagcaggccgacaacaugauuaccgagcugcuacaaaaagaauauauggaucgccagggaaagacaccucucggucuggucgaccuuuuuguguucaguacuagcuuuuacuugauauccaucuuccugcaccucauuaaaaucccaacccaucgacacaucacaggcaagcccugcccuaaaccacauagacugaaucacauggggauuuguucuugcggacuuuauaagcacccgggcgugcccgucaaguggaaaaggugaggacuagugcaucacauuuaaaagcaucucagccuaccaugagaauaagagaaagaaaaugaagaucaauagcuuauucaucucuuuuucuuuuucguugguguaaagccaacacccugucuaaaaaacauaaauuucuuuaaucauuuugccucuuuucucugugcuucaauuaauaaaaaauggaaagaaccuagaucuaaaaaaaaaaaaaaaaaaaaaaaaaaaaaaaaaaaaaaaaaaaaaaaaaaaaaaaaaaaaaaaaugcaucccccccccccccccccccccccccccccccaaaggcucuuuucagagccaccagaauu

SEQ ID NO: 7108 - RNA, 1855 nt, Artificial Sequence
  mRNA product Design i-2 comprising derived and/or modified sequence from LASV(ISTH2010-NIG-2012;Clade II)__AIT17482__GPCstabilized (opt3)
ggggcgcugccuacggagguggcagccaucuccuucucggcaucaagcuuaccaugggccagaucauuaccuucuuucaagaggugccccacgucauagaagagguuaugaacaucgugcugauugcccucagccuucuggcuaucuugaaggggauuuacaauguagcaacaugcggauuauucggucugguguccuuucuacuccuguguggcagaucuugcucaacuacguauaaaggggucuacgaacuucagacccuggaguuggacauggccagucucaacaugacaaugccucugagcuguacuaagaauaacucccaucacuauaucauggugggaaaugaaaccggccuggagcucacauuaaccaacacuucuauaaucaaucauaaauucugcaaccugucggaugcgcacaagaaaaaucuuuacgaccaugcuuugaugucaauuaucagcacauuucaccugaguauuccaaacuucaaucaguaugaggccauguccugugauuuuaacggugggaagaucucuguucaguacaaucuaagccacgcauaugccguggacgcugcaaaccauugcggaaccauagccaauggcguccuccaaacguucaugaggauggcuuggggcggguccuacauugcccuggauucaggaugcgguaguugggacuguaucaugacuagcuaccaguaucuuauuauccagaacaucaccugggaagaucacugccaguuuucucggccgucccccauuggcuaccugggguugcucucacaacgcacacgagacauauauaucagccguagacgccggggaacuuucaccuggacacugagugauucugagggcaacgaaaccccugguggguacugucucacgagguggaugcuuauugaggcggagcugaaaugcuuuggaaauacugcaguggccaaguguaacgaaaaacaugacgaggaguucugcgauauguugcggcuauuugacuucaauaagcaggcuauccgcagacugaaaacacccgcccagauguccauacagcucauuaacaaggcaguaaaugcucugaucaacgaucaacuuaucaugaagaaucaccugagggacauuaugugcaucccauauugcaacuacagcaaauauugguacuugaaucacaccguuacuggcaagacaucgcucccccgguguuggcuggugucuaacggguccuacuuaaaugaaacccauuucucagacgauauugagcagcaggccgacaacaugauaacggagcugcuacaaaaagaauauaucgaucgccagggaaagaccccucucggucuggucgaccuuuuuguguucaguacuagcuuuuacuugauuuccaucuuccugcaccucgugaaaaucccaacacaucgacacgucguuggcaagcccugcccuaaaccacauagacugaaucacauggggauuuguucuugcggacuuuauaagcacccgggcgugcccguaaaguggaaaaggugaggacuagugcaucacauuuaaaagcaucucagccuaccaugagaauaagagaaagaaaaugaagaucaauagcuuauucaucucuuuuucuuuuucguugguguaaagccaacacccugucuaaaaaacauaaauuucuuuaaucauuuugccucuuuucucugugcuucaauuaauaaaaaauggaaagaaccuagaucuaaaaaaaaaaaaaaaaaaaaaaaaaaaaaaaaaaaaaaaaaaaaaaaaaaaaaaaaaaaaaaaaugcaucccccccccccccccccccccccccccccccaaaggcucuuuucagagccaccagaauu

SEQ ID NO: 7109 - RNA, 1855 nt, Artificial Sequence
  mRNA product Design i-2 comprising derived and/or modified sequence from LASV(Lassa virus/H.sapiens-wt/NGA/2015/ISTH_0543;Clade II)__AVO03639__GPCstabilized (opt3)
ggggcgcugccuacggagguggcagccaucuccuucucggcaucaagcuuaccaugggccagaucauuaccuucuuucaagaggugccccacgucauagaagagguuaugaacaucgugcugauugcccucagccuucuggcuaucuugaaggggauuuacaauguagcaacaugcggauuauucggucugguguccuuucuacuccuguguggcagaucuugcucaacuacguauaaaggggucuacgaacuucagacccuggaguuggacauggccaaccucaauaugacaaugccucugaguuguacuaagaacaauagccaucacuauaucauggugggaaacgaaaccggccuggagcucacauuaaccaauacuuccauaaucaaccauaaauucugcaaucugucugaugcgcacaagaaaaaccuuuacgaccaugcuuugaugucgauuaucucaacauuucaccugagcauuccaaauuucaaccaguaugaggccaugaguugugauuuuaauggugggaagaucuccguucaguacaaccuaucucacaccuaugcaguggacgccgcuaaucauugcggaacgauagcaaacggcguccuccaaacuuucaugaggauggccuggggcgggagcuacauugcucuggauuccggaugcgguucaugggacuguaucaugaccaguuaccaguaucuugugauucagaacacaacuugggaagaucacugccaguuuagccggccgucucccaucggcuaccugggguugcucucccaacgcacccgagacaucuauauuucacguagacgccggggaacauucaccuggacgcugagcgauagugagggcaaugaaacuccugguggguacugucucacaagguggaugcuuauagaggccgagcugaaaugcuuuggaaacaccgcgguagcaaaguguaaugaaaaacaugacgaggaguucugcgauauguugcggcuauuugacuucaacaagcaggccauccgcagacugaaaacucccgcucagaugucuauucagcucaucaauaaggccguuaacgcacugauaaaugaucaacuuauuaugaagaaccaccugagggacaucaugugcaucccauauugcaauuacuccaaauauugguacuugaaccacacagugaccggcaagacgagccucccccgguguuggcuggucucgaaugggucuuacuuaaacgaaacccauuucuccgacgauauugagcagcaggcugacaauaugaucacagagcugcuacaaaaagaauauauugaucgccagggaaagacuccucucggucugguggaccuuuuuguguucucaaccaguuuuuacuugauaagcaucuuccugcaccucgucaaaauuccaacacaucgacacaucacuggcaagcccugcccuaaaccacauagacugaaccacauggggaucuguuccugcggacuuuauaagcacccgggcguucccgugaaguggaaaaggugaggacuagugcaucacauuuaaaagcaucucagccuaccaugagaauaagagaaagaaaaugaagaucaauagcuuauucaucucuuuuucuuuuucguugguguaaagccaacacccugucuaaaaaacauaaauuucuuuaaucauuuugccucuuuucucugugcuucaauuaauaaaaaauggaaagaaccuagaucuaaaaaaaaaaaaaaaaaaaaaaaaaaaaaaaaaaaaaaaaaaaaaaaaaaaaaaaaaaaaaaaaugcaucccccccccccccccccccccccccccccccaaaggcucuuuucagagccaccagaauu

SEQ ID NO: 7110 - RNA, 1855 nt, Artificial Sequence
  mRNA product Design i-2 comprising derived and/or modified sequence from LASV(Lassa virus/H.sapiens-wt/NGA/2016/ISTH_0009;Clade II)__AVO03571__GPCstabilized (opt3)
ggggcgcugccuacggagguggcagccaucuccuucucggcaucaagcuuaccaugggccagaucauuaccuucuuucaagaggugccccacgucauagaagagguuaugaacaucgugcugauugcccucagccuucuggcuaucuugaaggggauuuacaauguagcaacaugcggauuacugggucuaguguccuuccuccugcuuuguggcagaucuugcucaacuacguauaaaggggucuacgaacugcagaccuuggagcucgacauggccagucugaacaugacaaugccucugagcuguacuaagaauaacucccaucacuauaucauggugggaaaugaaaccggccucgaguuaacacugaccaacacuucuauaaucaaucauaaauuuugcaaccuuucggaugcgcacaagaaaaauuuguacgaccaugcucugaugucaauuaucagcacauuccaccuaaguauuccaaacuuuaaucaguaugaggccauguccugugauuucaacggugggaggaucucuguucaguacaaucucagccacuccuaugcaguggacgccgcuaaccauugcggaaccauagcaaauggcguccugcaaacguuuaugcggauggccuggggcgggucauacauugcucuugauaguggaugcgguagcugggacuguaucaugacuucuuaccaguaucugauuauccagaacaccacaugggaagaucacugccaguucucccgcccgucacccaucggcuacuuggggcuccugagccaacgaacucgugacauuuauauaaguagaaggcgccggggaaccuuuacauggacccucucugauuccgagggcaacgaaacgccugguggguacugucuuacucgguggaugcugaucgaggccgaguugaagugcuucggaaauacagcgguggcaaaauguaacgaaaagcaugacgaggaauuuugcgauaugcuacgccuguucgacuuuaauaaacaggccauuagaaggcucaagacccccgcucagaugagcauccagcugauaaacaaagccguaaaugcacuuauuaacgaucaacugaucaugaagaaucacuugcgggacaucaugugcauuccauauugcaacuacucgaaguauugguaccucaaucacacuguuacaggcaaaaccucucugccccgcuguugguuaguguccaacgggucauaccugaaugaaacgcauuucagugacgauaucgagcagcaggcugacaacaugauuaccgagcuacuccaaaaggaauauauagaucgacagggaaaaacaccucugggucuugucgacuuguucguguuuagcacuuccuucuaccugaucucuauuuuucuccaccuggugaagaucccaacccauagacacaucacaggcaaacccugcccuaagccacauaggcuuaaucacauggggauuuguagcugcggacuguauaaccacccgggcguccccguuaaauggaagcggugaggacuagugcaucacauuuaaaagcaucucagccuaccaugagaauaagagaaagaaaaugaagaucaauagcuuauucaucucuuuuucuuuuucguugguguaaagccaacacccugucuaaaaaacauaaauuucuuuaaucauuuugccucuuuucucugugcuucaauuaauaaaaaauggaaagaaccuagaucuaaaaaaaaaaaaaaaaaaaaaaaaaaaaaaaaaaaaaaaaaaaaaaaaaaaaaaaaaaaaaaaaugcaucccccccccccccccccccccccccccccccaaaggcucuuuucagagccaccagaauu

SEQ ID NO: 7111 - RNA, 1855 nt, Artificial Sequence
  mRNA product Design i-2 comprising derived and/or modified sequence from LASV(Lassa virus/H.sapiens-wt/NGA/2016/ISTH_0017;Clade II)__AVO03567__GPCstabilized (opt3)
ggggcgcugccuacggagguggcagccaucuccuucucggcaucaagcuuaccaugggccagaucauuaccuucuuucaagaggugccccacgucauagaagagguuaugaacaucgugcugauugcccucagccuucuggcuaucuugaaggggauuuacaauguagcaacaugcggauuauucggucugguguccuuucuacuccuguguggcagaucuugcucaacuacguauaaaggggucuacgaacuucagacccuggaguuggacauggccagucucaacaugacaaugccucugagcuguacuaagaauaacucccaucacuauaucauggugggaaaugaaaccggccuggagcucacauuaaccaacacuucuauaaucaaucauaaauucugcaaccugucggaugcgcacaagaaaaaucuuuacgaccaugcuuugaugucaauuaucagcacauuucaccugaguauuccaaacuucaaucaguaugaggccauguccugugauuuuaacggugggaagaucucuguucaguacaaucuaagccacaccuaugcaauagacgccgcuaaccauugcggaacgauugcaaauggcgugcuccaaacuuucaugaggauggccuggggcggguccuacaucgcucuggauucaggaugcgguaguugggacuguauuaugaccagcuaccaguaucuuaucauccagaacacaacuugggaagaucacugccaguuuucucggccgucccccauuggcuaccugggguugcucucacaacgcacccgagacauauauaucagccguagacgccggggaacauucaccuggacgcugagugauucugagggcaacgaaacuccugguggguacugucucacaagguggaugcuuauugaggccgagcugaaaugcuuuggaaauaccgcggucgcaaaguguaacgaaaaacaugacgaggaguucugcgauauguugcggcuauuugacuucaauaagcaggccauccgcagacugaaaacucccgcucagauguccauacagcucauuaacaaggccgugaaugcacugaucaacgaucaacuuaucaugaagaaucaccugagggacauuaugugcaucccauauugcaacuacagcaaauauugguacuugaaucacacaguaaccggcaagacgucgcucccccgguguuggcugguuucuaacggguccuacuuaaaugaaacccauuucucagacgauauugagcagcaggcugacaacaugauaacagagcugcuacaaaaagaauauauggaucgccagggaaagacuccucucggucugguggaccuuuuugucuucaguaccagcuuuuacuugaucuccauuuuccugcaccucgugcgaaucccaacacauagacacgugaucggcaaacccugcccuaagccacauaggcugaaucacauggggauuuguucuugcggacuuuauaaacacccgggcguccccguuaaguggaagcggugaggacuagugcaucacauuuaaaagcaucucagccuaccaugagaauaagagaaagaaaaugaagaucaauagcuuauucaucucuuuuucuuuuucguugguguaaagccaacacccugucuaaaaaacauaaauuucuuuaaucauuuugccucuuuucucugugcuucaauuaauaaaaaauggaaagaaccuagaucuaaaaaaaaaaaaaaaaaaaaaaaaaaaaaaaaaaaaaaaaaaaaaaaaaaaaaaaaaaaaaaaaugcaucccccccccccccccccccccccccccccccaaaggcucuuuucagagccaccagaauu

SEQ ID NO: 7112 - RNA, 1855 nt, Artificial Sequence
  mRNA product Design i-2 comprising derived and/or modified sequence from LASV(Lassa virus/H.sapiens-wt/NGA/2018/ISTH_0959;Clade II)__AVV65099__GPCstabilized (opt3)
ggggcgcugccuacggagguggcagccaucuccuucucggcaucaagcuuaccaugggccagaucauuaccuucuuucaagaggugccccacgucauagaagagguuaugaacaucgugcugauugcccucagccuucuggcuaucuugaaggggauuuacaauguagugacaugcggauuauucggucuggucuccuuucuacuccuguguggcagaucuugcucaacuacguauaaagggguguacgaacuucagacccuggaguuggacauggcaagucucaacaugacaaugccucugagcuguacuaagaauaacucccaucacuauaucaugguuggaaaugaaaccggccuggagcucacauuaaccaacacuucuauaaucaaucauaaauucugcaaccugucggaugcccacaagaaaaaucuuuacgaccaugcguugaugucaauuaucagcacauuucaccugaguauuccaaacuucaaucaguaugaggcuauguccugugauuuuaacggugggaagaucucugugcaguacaaucuaagccacgccuaugcaauagacgccgcuaaccauugcggaaccauugcaaauggcguccuccaaacguucaugaggauggccuggggcggguccuacaucgcucuggauucaggaugcgguaguugggacuguauuaugacuagcuaccaguaucuuaucauccagaacaccacaugggaagaucacugccaguuuucucggccgucccccauuggcuaccugggguugcucucacaacgcacucgagacauauauaucagccguagacgccggggaaccuucacauggacccugagugauucugagggcaacgaaacgccugguggguacugucucacuagguggaugcuuauugaggccgagcugaaaugcuuuggaaauacagcgguggcaaaguguaacgaaaaacaugacgaggaguucugcgauauguugcggcuauuugacuucaauaagcaggccauccgcagacugaaaacccccgcucagauguccauacagcucauuaacaaggccguaaaugcacugaucaacgaucaacuuaucaugaagaaucaccugagggacauuaugugcaucccauauugcaacuacagcaaauauugguacuugaaucacacuguuacaggcaagaccucgcucccccgguguuggcuggugucuaacggguccuacuuaaaugaaacgcauuucucagacgauauugagcagcaggcugacaacaugauaaccgagcugcuacaaaaagaauauaucgaucgccagggaaagacaccucucggucuggucgaccuuuuuguguucaguacuagcuuuuacuugauuuccaucuuccugcaccucgugaaaaucccaacccaucgacacgucauuggcaagcccugcccuaaaccacauagacugaaucacauggggauauguucuugcggacuuuauaagcacccgggcguucccgugaaguggaaaaggugaggacuagugcaucacauuuaaaagcaucucagccuaccaugagaauaagagaaagaaaaugaagaucaauagcuuauucaucucuuuuucuuuuucguugguguaaagccaacacccugucuaaaaaacauaaauuucuuuaaucauuuugccucuuuucucugugcuucaauuaauaaaaaauggaaagaaccuagaucuaaaaaaaaaaaaaaaaaaaaaaaaaaaaaaaaaaaaaaaaaaaaaaaaaaaaaaaaaaaaaaaaugcaucccccccccccccccccccccccccccccccaaaggcucuuuucagagccaccagaauu

SEQ ID NO: 7113 - RNA, 1855 nt, Artificial Sequence
  mRNA product Design i-2 comprising derived and/or modified sequence from LASV(LASV003-NIG-2008;Clade II)__AIT17580__GPCstabilized (opt3)
ggggcgcugccuacggagguggcagccaucuccuucucggcaucaagcuuaccaugggccagaucauuaccuucuuucaagaggugccccacgucauagaagagguuaugaacaucgugcugauugcccucagccuucuggcuaucuugaaggggauuuacaauguagcaacaugcggauuauucggucugguguccuuucuacuccuguguggcagaucuugcucaacuacguauaaaggggucuacgaacuucagacccuggaguuggacauggccagucucaacaugacaaugccucugagcuguacuaagaauaacucccaucacuauaucauggugggaaaugaaaccggccuggagcucacauuaaccaacacuucuauaaucaaucauaaauucugcaaccugucggaugcgcacaagaaaaaucuuuacgaccaugcuuugaugucaauuaucagcacauuucaccugaguauuccaaacuucaaucaguaugaggccauguccugugauuuuaacggugggaagaucucuguucaguacaaucuaagccacaccuaugcaguggacgccgcuaaccauugcggaacgauagcaaauggcguccuccaaacuuucaugaggauggccuggggcggguccuacauugcucuggauucaggaugcgguaguugggacuguaucaugaccagcuaccaguaucuuauuauccagaacacaacuugggaagaucacugccaguuuucucggccgucccccaucggcuaccugggguugcucucacaacgcacccgagacauuuauauaagccguagacgccggggaacauucaccuggacgcugagugauucugaguccaacgaaacuccuggcgguuacugucucacaagguggaugcuuaucgaggccgagcugaaaugcuuugggaauaccgcgguggcaaaguguaacgaaaaacaugacgaggaguucugcgauauguugcggcuauuugacuucaauaagcaggccauucgcagacugaaagcucccgcccagaugagcauccagcucauaaacaaggcaguaaaugcucugauuaacgaucaacuuaucaugaagaaucaccugagggacaucaugugcauuccauauugcaacuacucgaaauauugguacuugaaucacacuguuacaggacggaccucucucccccgcuguuggcugguguccaacggcucauacuuaaaugaaacgcauuucagugacgauaucgagcagcaggccgacaacaugauuaccgagcugcuacaaaaggaauauauggaucgacaggggaaaacaccucucggacuggucgaccuuuuuguguucagcacuuccuuuuacuugauaucuaucuuccugcaccucgugaagauuccaacccauagacacgucaucgguaaacccugcccuaagccacauaggcugaaucacaugggcaucuguagcugcgggcuuuauaaacacccgggaguucccgugaaguggaagcggugaggacuagugcaucacauuuaaaagcaucucagccuaccaugagaauaagagaaagaaaaugaagaucaauagcuuauucaucucuuuuucuuuuucguugguguaaagccaacacccugucuaaaaaacauaaauuucuuuaaucauuuugccucuuuucucugugcuucaauuaauaaaaaauggaaagaaccuagaucuaaaaaaaaaaaaaaaaaaaaaaaaaaaaaaaaaaaaaaaaaaaaaaaaaaaaaaaaaaaaaaaaugcaucccccccccccccccccccccccccccccccaaaggcucuuuucagagccaccagaauu

SEQ ID NO: 7114 - RNA, 1855 nt, Artificial Sequence
  mRNA product Design i-2 comprising derived and/or modified sequence from LASV(LASV035-NIG-2009;Clade II)__AIT17588__GPCstabilized (opt3)
ggggcgcugccuacggagguggcagccaucuccuucucggcaucaagcuuaccaugggccagaucauuaccuucuuucaagaggugccccacgucauagaagagguuaugaacaucgugcugauugcccucagccuucuggcuaucuugaaggggauuuacaauguagcaacaugcggauuauucggucugguguccuuucuacuccuguguggcagaucuugcucaacuacguauaaaggggucuacgaacuucagacccuggaguuggacauggccagucucaacaugacaaugccucugagcuguacuaagaauaacucccaucacuauaucauggugggaaaugaaaccggccuggagcucacauuaaccaacacuucuauaaucaaucauaaauucugcaaccugucggaugcgcacaagaaaaaucuuuacgaccaugcuuugaugucaauuaucagcacauuucaccugaguauuccaaacuucaaucaguaugaggccauguccugugauuuuaacggugggaagaucucuguucaguacaaucuaagccacgcauaugccguggacgcugcaaaccauugcggaaccauagccaauggcguccuccaaacguucaugaggauggcuuggggcggguccuacauugcccuggauucaggaugcgguaguugggacuguaucaugacuagcuaccaguaucuuauuauccagaacaccacaugggaagaucacugccaguuuucucggccgucccccaucggcuaccugggguugcucucacaacgcacucgagacauuuauauaagccguagacgccggggaaccuucacauggacccugagugauucugagggcaacgaaacgccugguggguacugucucacuagguggaugcuuaucgaggcggagcugaaaugcuuuggaaauacagcaguggccaaguguaacgaaaaacaugacgaggaguucugcgauauguugcggcuauuugacuucaauaagcaggcuauucgcagacugaaagcccccgcacagauguccauccagcucauaaacaaggcuguaaaugcccugauuaacgaucaacuuaucaugaagaaucaccugagggacaucaugugcauuccauauugcaacuacagcaaauauugguacuugaaucacaccguuacuggcaagacaucgcucccccgguguuggcuggugucuaacggguccuacuuaaaugaaacccauuucucagacgauaucgagcagcaggcggacaacaugauuacggagcugcuacaaaaagaauauauagaucgccagggaaagaccccucucggucuggucgaccuuuuuguguucaguacuagcuuuuacuugaucuccauuuuccugcaccucgugaaaaucccaacacaucgacacgucaucggcaagcccugcccuaaaccacauagacugaaucacauggggauuuguucuugcggacuuuauaagcacccgggcguucccgugaaguggaaaaggugaggacuagugcaucacauuuaaaagcaucucagccuaccaugagaauaagagaaagaaaaugaagaucaauagcuuauucaucucuuuuucuuuuucguugguguaaagccaacacccugucuaaaaaacauaaauuucuuuaaucauuuugccucuuuucucugugcuucaauuaauaaaaaauggaaagaaccuagaucuaaaaaaaaaaaaaaaaaaaaaaaaaaaaaaaaaaaaaaaaaaaaaaaaaaaaaaaaaaaaaaaaugcaucccccccccccccccccccccccccccccccaaaggcucuuuucagagccaccagaauu

SEQ ID NO: 7115 - RNA, 1855 nt, Artificial Sequence
  mRNA product Design i-2 comprising derived and/or modified sequence from LASV(LASV1000-NIG-2009;Clade II)__AIT17782__GPCstabilized (opt3)
ggggcgcugccuacggagguggcagccaucuccuucucggcaucaagcuuaccaugggccagaucauuaccuucuuucaagaggugccccacgucauagaagagguuaugaacaucgugcugauugcccucagccuucuggcuaucuugaaggggauuuacaauguagcaacaugcggauuauucggucugguguccuuucuacuccuguguggcagaucuugcucaacuacguauaaaggggucuacgaacuucagacccuggaguuggacauggccagucucaacaugacaaugccucugagcuguacuaagaauaacucccaucacuauaucauggugggaaaugaaaccggccuggagcucacauuaaccaacacuucuauaaucaaucauaaauucugcaaccugucggaugcgcacaagaaaaaucuuuacgaccaugcuuugaugucaauuaucagcacauuucaccugaguauuccaaacuucaaucaguaugaggccauguccugugauuuuaacggugggaagaucucuguucaguacaaucuaagccacaccuaugcaguggacgccgcuaaccauugcggaacgauagcaaauggcguccuccaaacuuucaugaggauggccuggggcggguccuacauugcucuggauucaggaugcgguaguugggacuguaucaugaccagcuaccaguaucuuauuauccagaacacaacuugggaagaucacugccaguuuucucggccgucccccaucggcuaccugggguugcucucacaacgcacccgagacauuuauauaagccguagacgccggggaacauucaccuggacgcugagugauucugagggcaacgaaacuccugguggguacugucucacaagguggaugcuuaucgaggccgagcugaaaugcuuuggaaauaccgcgguggcaaaguguaacgaaaaacaugacgaggaguucugcgauauguugcggcuauuugacuucaauaagcaggccauuaaacgccugaagacucccgcucagauguccauccagcucauaaacaaggccguaaaugcacugauuaacgaucaacuuaucaugaaaaaucaccugagagacaucaugugcauuccauauugcaacuacagcaaguauugguacuugaaucacacaguuaccggcaaaacgucgcuccccagguguuggcuggugucuaacggguccuacuuaaaugaaacccauuucucagacgauaucgagcagcaggcugacaacaugauuacagagcugcuacaaaaggaauauauagaucggcagggaaaaacuccucucggucuggucgaccuuuuuguguucaguaccagcuuuuacuugaucuccauuuuccugcaccucgugaagaucccaacacaucgccacgucguuggcaaacccugcccuaagccacaucgacugaaucacauggggaucuguucuugcggacuuuauaagcacccgggcgugcccguaaaauggaagagaugaggacuagugcaucacauuuaaaagcaucucagccuaccaugagaauaagagaaagaaaaugaagaucaauagcuuauucaucucuuuuucuuuuucguugguguaaagccaacacccugucuaaaaaacauaaauuucuuuaaucauuuugccucuuuucucugugcuucaauuaauaaaaaauggaaagaaccuagaucuaaaaaaaaaaaaaaaaaaaaaaaaaaaaaaaaaaaaaaaaaaaaaaaaaaaaaaaaaaaaaaaaugcaucccccccccccccccccccccccccccccccaaaggcucuuuucagagccaccagaauu

SEQ ID NO: 7116 - RNA, 1855 nt, Artificial Sequence
  mRNA product Design i-2 comprising derived and/or modified sequence from LASV(LASV221-NIG-2010;Clade II)__AIT17624__GPCstabilized (opt3)
ggggcgcugccuacggagguggcagccaucuccuucucggcaucaagcuuaccaugggccagaucauuaccuucuuucaagaggugccccacgucauagaagagguuaugaacaucgugcugauugcccucagccuucuggcuaucuugaaggggauuuacaauguagcaacaugcggauuauucggucugguguccuuucuacuccuguguggcagaucuugcucaacuacguauaaaggggucuacgaacuucagacccuggaguuggacauggccagucucaacaugacaaugccucugagcuguacuaagaauaacucccaucacuauaucauggugggaaaugaaaccggccuggagcucacauuaaccaacacuucuauaaucaaucauaaauucugcaaccugucggaugcgcacaagaaaaaucuuuacgaccaugcuuugaugucaauuaucagcacauuucaccugaguauuccaaacuucaaucaguaugaggccauguccugugauuuuaacggugggaagaucucuguucaguacaaucuaagccacaccuaugcaauagacgccgcuaaccauugcggaacgauugcaaauggcgugcuccaaacuuucaugaggauggccuggggcggguccuacaucgcucuggauucaggaugcgguaguugggacuguauuaugaccagcuaccaguaucuuaucauccagaacacaacuugggaagaucacugccaguuuucucggccgucccccauuggcuaccugggguugcucucacaacgcacccgagacauauauaucagccguagacgccggggaacauucaccuggacgcugagugauucugagggcaacgaaacuccugguggguacugucucacaagguggaugcuuauugaggccgagcugaaaugcuuuggaaauaccgcggucgcaaaguguaacgaaaaacaugacgaggaguucugcgauauguugcggcuauuugacuucaauaagcaggccauccgcagacugaaaacucccgcucagauguccauacagcucauuaacaaggccgugaaugcacugaucaacgaucaacuuaucaugaagaaucaccugagggacauuaugugcaucccauauugcaacuacagcaaauauugguacuugaaucacacaguaaccggcaagacgucgcucccccgguguuggcugguuucuaacggguccuacuuaaaugaaacccauuucucagacgauauugagcagcaggcugacaacaugauaacagagaugcugcaaaaagaauauauggaucgccagggaaagacuccucuaggucucguggaccuguuugucuucaguaccagcuuuuaccuuaucuccauuuucuugcaccuggugaaaaucccaacacaucgacacgugaucggcaagcccugcccuaaaccacauagacucaaucacauggggauuuguucuugcggacuguauaagcacccgggcguccccguuaaguggaaaaggugaggacuagugcaucacauuuaaaagcaucucagccuaccaugagaauaagagaaagaaaaugaagaucaauagcuuauucaucucuuuuucuuuuucguugguguaaagccaacacccugucuaaaaaacauaaauuucuuuaaucauuuugccucuuuucucugugcuucaauuaauaaaaaauggaaagaaccuagaucuaaaaaaaaaaaaaaaaaaaaaaaaaaaaaaaaaaaaaaaaaaaaaaaaaaaaaaaaaaaaaaaaugcaucccccccccccccccccccccccccccccccaaaggcucuuuucagagccaccagaauu

SEQ ID NO: 7117 - RNA, 1855 nt, Artificial Sequence
  mRNA product Design i-2 comprising derived and/or modified sequence from LASV(LASV237-NIG-2010;Clade II)__AIT17638__GPCstabilized (opt3)
ggggcgcugccuacggagguggcagccaucuccuucucggcaucaagcuuaccaugggccagaucauuaccuucuuucaagaggugccccacgucauagaagagguuaugaacaucgugcugauugcccucagccuucuggcuaucuugaaggggauuuacaauguagcaacaugcggauuauucggucugguguccuuucuacuccuguguggcagaucuugcucaacuacguauaaaggggucuacgaacuucagacccuggaguuggacauggccagucucaacaugacaaugccucugagcuguacuaagaauaacucccaucacuauaucauggugggaaaugaaaccggccuggagcucacauuaaccaacacuucuauaaucaaucauaaauucugcaaccugucggaugcgcacaagaaagaccuuuacgaucaugcuuugaugucaauuaucagcacauuucaccugaguauuccaaauuucaaccaguaugaggccauguccugugacuuuaauggugggaagaucucuguucaguacaaccuaagccacaccuaugcaguggaugccgcuaaucauugcggaacgauagcaaacggcguccuccaaacuuucaugaggauggccuggggcggguccuacauugcucuggacucaggaugcgguaguugggauuguaucaugaccagcuaccaguaucuuauuauccagaauacaacuugggaagaccacugccaguuuucucggccgucccccaucggcuaccugggguugcucucacaacgcacccgagauauuuauauaagccguagacgccggggaacauucaccuggacgcugagugacucugagggcaacgaaacuccugguggguacugucucacaagguggaugcuuaucgaggccgagcugaaaugcuuuggaaacaccgcgguggcaaaguguaaugaaaaacaugaugaggaguucugcgacauguugcggcuauuugauuucaacaagcaggccauucgcagacugaaaacucccgcucagauguccauccagcucauaaauaaggccguaaacgcacugauuaaugaccaacuuaucaugaagaaccaccugagggacaucaugugcauuccauauugcaauuacagcaaauauugguacuugaaccacacaguuaccggcaagacgucgcucccccgguguuggcuggugucuaauggguccuacuuaaacgaaacccauuucucagaugacaucgagcagcaggcugauaauaugauuacagagcugcuacaaaaagaauauauggaccgccagggaaagacuccucucggucuggucgaucuuuuuguguucaguaccagcuuuuacuugauauccaucuuccugcaccucauuaaaaucccaacacaucgacacaucacuggcaagcccugcccuaaaccacauagacugaaccacauggggauuuguucuugcggacuuuauaagcacccgggcgugcccgucaaguggaaaaggugaggacuagugcaucacauuuaaaagcaucucagccuaccaugagaauaagagaaagaaaaugaagaucaauagcuuauucaucucuuuuucuuuuucguugguguaaagccaacacccugucuaaaaaacauaaauuucuuuaaucauuuugccucuuuucucugugcuucaauuaauaaaaaauggaaagaaccuagaucuaaaaaaaaaaaaaaaaaaaaaaaaaaaaaaaaaaaaaaaaaaaaaaaaaaaaaaaaaaaaaaaaugcaucccccccccccccccccccccccccccccccaaaggcucuuuucagagccaccagaauu

SEQ ID NO: 7118 - RNA, 1855 nt, Artificial Sequence
  mRNA product Design i-2 comprising derived and/or modified sequence from LASV(LASV253-NIG-2011;Clade II)__AIT17670__GPCstabilized (opt3)
ggggcgcugccuacggagguggcagccaucuccuucucggcaucaagcuuaccaugggccagaucauuaccuucuuucaagaggugccccacgucauagaagagguuaugaacaucgugcugauugcccucagccuucuggcuaucuugaaggggauuuacaauguagcaacaugcggauuauucggucugguguccuuucuacuccuguguggcagaucuugcucaacuacguauaaaggggucuacgaacuucagacccuggaguuggacauggccagucucaacaugacaaugccucugagcuguacuaagaauaacucccaucacuauaucauggugggaaaugaaaccggccuggagcucacauuaaccaacacuucuauaaucaaucauaaauucugcaaccugucggaugcgcacaagaaaaaucuuuacgaccaugcuuugaugucaauuaucagcacauuucaccugaguauuccaaacuucaaucaguaugaggccauguccugugauuuuaacggugggaagaucucuguucaguacaaucuaagccacaccuaugcaguggacgccgcuaaccauugcggaacgauagcaaauggcguccuccaaacuuucaugaggauggccuggggcggguccuacauugcucuggauucaggaugcgguaguugggacuguaucaugaccagcuaccaguaucuuauuauccagaacacaacuugggaagaucacugccaguuuucucggccgucccccaucggcuaccugggguugcucucacaacgcacccgagacauuuauauaagccguagacgccggggaacauucaccuggacgcugagugauucugagggcaacgaaacuccugguggguacugucucacaagguggaugcuuaucgaggccgagcugaaaugcuuuggaaauaccgcgguggcaaaguguaacgaaaaacaugacgaggaguucugcgauauguugcggcuauuugacuucaauaagcaggccauucgcagacugaaagcucccgcccagauguccauccagcucauaaacaaggcaguaaaugcucugauuaacgaucaacuuaucaugaagaaucaccugagggacaucaugugcauuccauauugcaacuacagcaaauauugguacuugaaucacacuguuacaggccggaccucgcucccccgcuguuggcuggugucuaacggguccuacuuaaaugaaacgcauuucucagacgauaucgagcagcaggccgacaacaugauuaccgagcugcuacaaaaggaauauauagaucgacagggaaaaacaccucucggucuggucgaccuuuuuguguucaguacuagcuuuuacuugaucuccauuuuccugcaccucgugaagaucccaacccauagacacaucauuggcaaacccugcccuaagccacauaggcugaaucacauggggauauguucuugcggacuuuauaaacacccgggcguccccguuaaguggaagcggugaggacuagugcaucacauuuaaaagcaucucagccuaccaugagaauaagagaaagaaaaugaagaucaauagcuuauucaucucuuuuucuuuuucguugguguaaagccaacacccugucuaaaaaacauaaauuucuuuaaucauuuugccucuuuucucugugcuucaauuaauaaaaaauggaaagaaccuagaucuaaaaaaaaaaaaaaaaaaaaaaaaaaaaaaaaaaaaaaaaaaaaaaaaaaaaaaaaaaaaaaaaugcaucccccccccccccccccccccccccccccccaaaggcucuuuucagagccaccagaauu

SEQ ID NO: 7119 - RNA, 1855 nt, Artificial Sequence
  mRNA product Design i-2 comprising derived and/or modified sequence from LASV(LASV254-NIG-2011;Clade II)__AIT17674__GPCstabilized (opt3)
ggggcgcugccuacggagguggcagccaucuccuucucggcaucaagcuuaccaugggccagaucauuaccuucuuucaagaggugccccacgucauagaagagguuaugaacaucgugcugauugcccucagccuucuggcuaucuugaaggggauuuacaauguagcaacaugcggauuauucggucugguguccuuucuacuccuguguggcagaucuugcucaacuacguauaaaggggucuacgaacuucagacccuggaguuggacaugacaaaccucaauaugacuaugccucugaguuguaccaagaacaauagccaucacuauaucauggugggaaacgaaacaggccuggagcucaccuuaacuaauacauccauaaucaaccauaaauucugcaaucugucugaugcccacaagaaaaaccuuuacaaucaugcguugaugucgauuaucucaaccuuucaccugagcauuccaaacuucaaucaguaugaggcuaugaguugugacuuuaacggugggaagaucuccguucaguacaaucuaucucacagcuaugccguggaugcagccaaccauugcggaacgauagcuaacggcguccuccaaacuuucaugaggauggcauggggcggguccuacauugcccuggacucaggaugcgguaauugggauuguaucaugaccaguuaccaguaucuuauuauccagaacacaacuugggaagaccacugccaguuuagccggccgucucccaucggcuaccugggguugcucucccaacgcacccgagauauuuauauaucacguagacgccggggaacauucaccuggacgcugagcgacagugagggcaaugaaacuccugguggguacugucucacaagguggaugcuuaucgaggcugagcugaaaugcuuuggaaacaccgccguggcgaaguguaaugaaaaacaugaugaggaguucugcgacauguugcggcuauuugauuucaacaagcaggcaauucgcagacugaaaacucccgcccaggcuaauauccagcucauaaacaaggccguaaaugcacugauuaacgaccaacuuaucaugaagaaucaccugagggauaucaugugcauuccauauugcaacuacucuaaauauugguacuugaaucacacaguuaccggcaagacgucccucccccgguguuggcuggugagcaacgggucguacuuaaaugaaacccauuucucugacgacaucgagcagcaggcugauaacaugauuacagagcugcuacaaaaagaauauauggaccgccagggaaagacuccucucggucuggucgaucuuuuuguguucuccaccucauuuuacuugauaaguaucuuccugcaccucgugaaaauuccaacacaucgacacgucaucggcaagcccugcccuaaaccacauagacugaaccacauggggaucuguagcugcggacuuuauaagcacccgggcguucccgugaaguggaaaaggugaggacuagugcaucacauuuaaaagcaucucagccuaccaugagaauaagagaaagaaaaugaagaucaauagcuuauucaucucuuuuucuuuuucguugguguaaagccaacacccugucuaaaaaacauaaauuucuuuaaucauuuugccucuuuucucugugcuucaauuaauaaaaaauggaaagaaccuagaucuaaaaaaaaaaaaaaaaaaaaaaaaaaaaaaaaaaaaaaaaaaaaaaaaaaaaaaaaaaaaaaaaugcaucccccccccccccccccccccccccccccccaaaggcucuuuucagagccaccagaauu

SEQ ID NO: 7120 - RNA, 1855 nt, Artificial Sequence
  mRNA product Design i-2 comprising derived and/or modified sequence from LASV(Nig08-A19;Clade III)__ADU56618__GPCstabilized (opt3)
ggggcgcugccuacggagguggcagccaucuccuucucggcaucaagcuuaccaugggccagaucgugaccuucuuucaagaggucccccacguuauugaagaggugaugaacauaguacugaucgcccucagcauucuugcuauccugaagggguuguacaauauugcaacaugcggauuaaucggucuggugacuuuccuacuccuguccggcagaucuuguucaaugacguauaaaggggucuacgaacuucagacccuggaguugaacaugaauacacucaacaugacuaugccucugaguugcaccaagaauaacagccaucacuauauaauggugggaaaugaaacaggccuggagcucaccuuaacuaacacaucccugcuucaucacaaauuuuguaauuugucugacgcccauaagaaaaaccuguacgaucacacccuaaugucgaucauuucaacguuccaccucagcaucccaaauuuuaaccaguaugaggcgaugaguugcgacuucaauggugggaagauuacuguucaguacaaccugucccauucuuaugcuaucgaugccgcaaaucacuguggaaccguggccaacggcguccuucaaacauuuaugaggauggcuuggggcgggagcuacauagcacuggacuccggaugcgguaagugggauugcauuaugacuucauaccaguauuugaucauucagaacaccacaugggaagaccauugucaguucagucgcccgagccccaucggcuaccucgggcuguuaucucaacgaacccgugauaucuauauuuccagaaggcgccggggaacguuuacuuggacacuuucagacagcgagggcaaugaaaccccugguggguacugccugacucgguggauguugauagaggccgagcuaaaauguuucggaaacacagcuguggccaagugcaaugaaaaacacgaugaggaauuuugugacaugcugcgccucuucgauuuuaacaagcaggcgaucagaaggcugaaagcacccgcccagaugaguauucagcuuaucaauaaggcuguaaacgcccugauaaaugaccaauugauuaugaagaaccaccuccgggauaucaugugcaucccauauugcaauuacucuaaauauugguaccugaaccauaccuccacgggccgcaccagcuuaccccgaugcuggcugguuucgaaugggucuuaccuaaacgaaacacacuucuccgacgacauugagcagcaggcagauaauaugaucacugagaugcuccaaaaggaauaucuggacagacagggaaaaaccccucuugguuugguggaucuguucgucuuuucaacaaguuucuaccucauuagcauauuucugcaucuugugaagaucccaacucacaggcauauugugggcaaacccuguccuaagccacaccggcugaaccacauggggaucugcuccuguggauuguauaaacagccgggcguccccguucguuggaagcgcugaggacuagugcaucacauuuaaaagcaucucagccuaccaugagaauaagagaaagaaaaugaagaucaauagcuuauucaucucuuuuucuuuuucguugguguaaagccaacacccugucuaaaaaacauaaauuucuuuaaucauuuugccucuuuucucugugcuucaauuaauaaaaaauggaaagaaccuagaucuaaaaaaaaaaaaaaaaaaaaaaaaaaaaaaaaaaaaaaaaaaaaaaaaaaaaaaaaaaaaaaaaugcaucccccccccccccccccccccccccccccccaaaggcucuuuucagagccaccagaauu

SEQ ID NO: 7121 - RNA, 1858 nt, Artificial Sequence
  mRNA product Design i-2 comprising derived and/or modified sequence from LASV(G1180-SLE-2010;Clade IV)__AIT17168__GPCstabilized (opt3)
ggggcgcugccuacggagguggcagccaucuccuucucggcaucaagcuuaccaugggccagaucgugaccuucuuucaagaggucccccacguuauugaagaggugaugaacauaguacugaucgcccucagcauucuugcugugcugaagggguuguacaauuucgcaacaugcggauuagucggucugcuaacuuuucuccugcuuuguggcagauccugcacggccucuagguauaaagggguguacgaacugcagaccuuggagcucaacauggaaacacugaauaugacuaugccucugucauguaccaagaacaauagucaucacuauaucaugguuggaaacgagacaggccucgaguuaacccugacuaauacaagcauuaucaaccauaaauucugcaaucuuuccgacgcgcacaagaaaaacuuguacgaucaugcucugaugucuauaaucucgaccuuucaccuaucaauuccaaauuucaaccaguaugaagccaugagcugugacuuuaauggugggaagaucagugugcaguacaaccucucccacucuuaugcaggagaugccgcuaaucauugcggcacggucgcaaacggcgugcugcaaacuuucaugcggauggccuggggagggagcuacauugcucuugacuccgguugcggcucaugggauuguaucaugaccaguuaccaguaucugauaauucagaacacaacuugggaggaccauugccaguuuagccgcccgucucccaucggguacuugggacuccugucccaacgaacccgugauauuuauaucucaagaaggcgccggggcacauucaccuggacgcucagcgacagugaagguaaggauacuccugggggauacugucuuacacgguggaugcugaucgaggccgaguugaaaugcuuuggcaauaccgcgguagcaaaguguaacgaaaaacacgacgaggaguucugcgauaugcuacgccuguuugacuucaauaagcaggccauucagagacucaaagcucccgcccagaugucuauacaacugaucaacaaggcaguuaaugcucuuauuaacgaucagcugaucaugaagaaucacuugagggacauaaugugcauuccauauugcaacuacuccaaauauugguaccucaaucauacuacaaccgggaagacgagccugcccaaauguugguuagugucgaacggaucuuaccugaaugaaacccacuucuccgacgauaucgagcagcaagccgacaacaugaucacagagaugcuacagaaggaauauauggagcggcaggguaaaacuccucucggccuggucgaucuuuuuguguucucaaccaguuuuuacuugauuagcaucuuccugcaucucgugaagauuccaacacaccgccauauagucgggaaauccugccccaagccucaccgacugaaucacaugggaaucuguucuugcggccuuuauaagcagccagguguuccggugaaauggaagagaugaggacuagugcaucacauuuaaaagcaucucagccuaccaugagaauaagagaaagaaaaugaagaucaauagcuuauucaucucuuuuucuuuuucguugguguaaagccaacacccugucuaaaaaacauaaauuucuuuaaucauuuugccucuuuucucugugcuucaauuaauaaaaaauggaaagaaccuagaucuaaaaaaaaaaaaaaaaaaaaaaaaaaaaaaaaaaaaaaaaaaaaaaaaaaaaaaaaaaaaaaaaugcaucccccccccccccccccccccccccccccccaaaggcucuuuucagagccaccagaauu

SEQ ID NO: 7122 - RNA, 1858 nt, Artificial Sequence
  mRNA product Design i-2 comprising derived and/or modified sequence from LASV(G1442-SLE-2011;Clade IV)__AIT17180__GPCstabilized (opt3)
ggggcgcugccuacggagguggcagccaucuccuucucggcaucaagcuuaccaugggccagaucgugaccuucuuucaagaggucccccacguuauugaagaggugaugaacauaguacugaucgcccucagcauucuugcugugcugaagggguuguacaaugucgcaacaugcggauuaaucggucuggugacuuuccuacuccuguguggcagauccugcacgaccacacuuuauaaagggguuuacgaacugcagacuuuggagcucaacauggaaacccugaauaugacaaugccucugucuuguaccaagaacaauucacaucacuauauuagggugggaaacgagacuggccucgaguuaacacugaccaauacgaguaucauaaaccauaaauuuugcaaucuuagcgacgcccacaagaaaaacuuguacgaucaugcgcugauguccaucauuucuacuuuccaccuaucgaucccaaauuuuaaccaguaugaagcuaugucaugugacuucaauggugggaagauuagcguccaguacaaccucagucacuccuaugccggagaugcagccaaucauugcggcaccguggcuaacggcguacugcaaacauuuaugcggauggcauggggagggucuuacaucgcccuugacagcgguugcggcaacugggauuguauaaugacuuccuaccaguaucugauuauccagaauaccacaugggacgaucacugccaguucucacgaccgagucccauuggguacuugggacuccugagccaacguaccagagacguuuauaucucuaggcggcgccggggcacguuuacuuggacacucuccgauucagaggguaaggacaccccugggggauacugucuuacucgcuggaugcugaucgaagcugaguugaaaugcuucggcaacacagccguggcgaaguguaaugagaaacaugaugaagaguuuugcgacaugcuaagacuguucgauuuuaacaagcaggcaauucagaggcucaaagcccccgcucagaugagcauacaacugaucaauaaggccgucaacgcacuuauuaaugaccagcugaucaugaagaaccacuugcgggacauaaugugcauuccauauugcaauuacaguaaauauugguaccucaacaauaccgcuacggggaagaccucucugcccaaauguugguuaaucuccaacggaagcuaccugaaugagacacacuucucggaugacaucgaacaggaggccgauaacaugauuacugagaugcuacaaaaggaauauauggagcgccaggguaaaaccccucucggccugguggaccuuuucguguuuucuacauccuucuacuugaucucaauuuuucugcaucucgucaagauaccaacucaccgacauaucguugggaaaaguugccccaagccucacagacugaaucauaugggaauuuguagcugcggccuuuauaagcagccaggugugccgguaagguggaaacggugaggacuagugcaucacauuuaaaagcaucucagccuaccaugagaauaagagaaagaaaaugaagaucaauagcuuauucaucucuuuuucuuuuucguugguguaaagccaacacccugucuaaaaaacauaaauuucuuuaaucauuuugccucuuuucucugugcuucaauuaauaaaaaauggaaagaaccuagaucuaaaaaaaaaaaaaaaaaaaaaaaaaaaaaaaaaaaaaaaaaaaaaaaaaaaaaaaaaaaaaaaaugcaucccccccccccccccccccccccccccccccaaaggcucuuuucagagccaccagaauu

SEQ ID NO: 7123 - RNA, 1858 nt, Artificial Sequence
  mRNA product Design i-2 comprising derived and/or modified sequence from LASV(G3010-SLE-2013;Clade IV)__AIT17344__GPCstabilized (opt3)
ggggcgcugccuacggagguggcagccaucuccuucucggcaucaagcuuaccaugggccagaucgugaccuucuuucaagaggucccccacguuauugaagaggugaugaacauaguacugaucgcccucagcauucuugcugugcugaagggguuguacaauuucgcaacaugcggauuagucggucuggugacuuuucuacuccuguguggcagauccugcacgaccucucuuuauaaagggguuuacgaacugcagacauuggagcucaacauggaaacucugaauaugaccaugccucugucauguacaaagaacaauagucaucacuauaucauggugggaaacgagaccggccucgaguuaacucugacaaauaccagcauuaucaaccauaaauucugcaaucuuuccgacgcccacaagaaaaacuuguacaaucaugcgcugaugucuauaaucucgacguuucaccuaucaauuccaaacuucaaucaguaugaagcuaugagcugugauuuuaacggugggaagaucaguguccaguacaaucucucccacucuuaugccggagacgcagccagccauugcggcacuguggcuaacggcguacugcaaaccuucaugaggauggcauggggaggguccuacauugcccuugauucagguugcggcaagugggacuguaucaugacaaguuaucaguaccugauaauucagaacacuaccugggaggaucacugccaguuuagccggccgucucccaucggguauuugggacuccugucccaacgcacacgagacauuuacaucucacguagacgccggggcaccuucacguggacucucagcgauagugaagguaaagacacaccugggggauauugucuuaccagguggaugcugaucgaggcugaguugaagugcuuuggcaauacugccguugcgaaauguaacgaaaagcaugaugaggaguucugcgacaugcuacggcuguuugauuucaauaaacaggcaauucagcgccucaagacacccgcccagaugucuauacaacugaucaacaaggcugugaaugcccuuauuaacgaccagcugaucaugaaaaaucacuugagagauauaaugugcauuccauacugcaacuauuccaaguacugguaccucaaucacaccacgaccgggaaaacaagccugcccaaguguugguuagucucgaacggaucuuaucugaaugaaacucauuucuccgacgacaucgagcagcaagcagauaacaugaucaccgagaugcuacagaaagaauacauggagaggcaggguaagacaccucucggccugguggaccuuuuuguguucucaaccaguuuuuauuugauuagcaucuuccugcaccucgucaaaauuccaacucaucggcacauaguugggaaguccugccccaagccucaucgccugaaucacaugggaaucuguucuugcggccuuuacaaacagccaggugugccgguacgauggaagagaugaggacuagugcaucacauuuaaaagcaucucagccuaccaugagaauaagagaaagaaaaugaagaucaauagcuuauucaucucuuuuucuuuuucguugguguaaagccaacacccugucuaaaaaacauaaauuucuuuaaucauuuugccucuuuucucugugcuucaauuaauaaaaaauggaaagaaccuagaucuaaaaaaaaaaaaaaaaaaaaaaaaaaaaaaaaaaaaaaaaaaaaaaaaaaaaaaaaaaaaaaaaugcaucccccccccccccccccccccccccccccccaaaggcucuuuucagagccaccagaauu

SEQ ID NO: 7124 - RNA, 1858 nt, Artificial Sequence
  mRNA product Design i-2 comprising derived and/or modified sequence from LASV(G502-SLE-2009;Clade IV)__AIT17126__GPCstabilized (opt3)
ggggcgcugccuacggagguggcagccaucuccuucucggcaucaagcuuaccaugggccagaucgugaccuucuuucaagaggucccccacguuauugaagaggugaugaacauaguacugaucgcccucagcauucuugcugugcugaagggguuguacaauuucgcaacaugcggauuagucggucugcuaacuuuucuccugcuuuguggcagauccugcacgaccgggcuguauaaaggaguguacgaauugcagacacucgagcugaacauggaaacucugaauaugaccaugccucucucuuguacaaagaacaauucacaucacuauaucaugguuggcaacgagaccgguuuagagcugacucuuacaaauaccaguauuaucaaccauaaauucugcaauuugagcgacgcccacaagaaaaaccuguacgaucaugcgcuaauguccauaaucucuacguuucaccucucgauuccaaauuucaaccaguaugaagcuaugucaugugacuuuaaugggggaaagaucagcgugcaguacaaccugagucacuccuaugccggcgaugcagccgaccauugcggcacugucgcuaauggggugcuucaaaccuucaugaggauggcauggggagguucuuacauugcccuggauagcggcugcgggcgcugggacuguaucaugacauccuaccaguauuugauaauucagaacacuaccugggaggaucacugccaguuuucacgaccgagucccaucggauaccucggccuguuaagccaacguacaagagacauuuauaucucuaggcggcgccgggguaccuucacguggacucuuuccgauucagaagggaaggacacaccuggaggcuacugucugacccgcuggauguugaucgaggcugagcuaaaaugcuuuggcaacacugccguagcgaaguguaaugaaaaacaugaugaggaguucugcgacaugcugagacucuuugauuucaacaagcaggcaauucagaggcugaaagcccccgcucagaugagcauacaacuuaucaauaaggccguuaacgcacugauuaaugaccaguuggugaugaagaaccaccuccgggacaucaugugcauaccauauugcaauuacagucgcuauugguaccugaaccacacaaccacgggacgaaccucuuuacccaaauguuggcuggucuccaaugguagcuaccuaaacgaaacacauuucucggaugacauugagcagcaagcugauaauaugaucacugagaugcuccagaaggaauauauggagagacagggcaaaaccccucuggggcuuguggacuuguuuguguucucuacauccuuuuaccugaucucaauuuuccuccaccuggucaagaucccaacucauaggcacauuguuggaaaaaguugccccaagccucaucggcuuaaccacaugggcauauguagcugcggucuguauaaacagccaggggugccgguaaaguggaagcguugaggacuagugcaucacauuuaaaagcaucucagccuaccaugagaauaagagaaagaaaaugaagaucaauagcuuauucaucucuuuuucuuuuucguugguguaaagccaacacccugucuaaaaaacauaaauuucuuuaaucauuuugccucuuuucucugugcuucaauuaauaaaaaauggaaagaaccuagaucuaaaaaaaaaaaaaaaaaaaaaaaaaaaaaaaaaaaaaaaaaaaaaaaaaaaaaaaaaaaaaaaaugcaucccccccccccccccccccccccccccccccaaaggcucuuuucagagccaccagaauu

SEQ ID NO: 7125 - RNA, 1858 nt, Artificial Sequence
  mRNA product Design i-2 comprising derived and/or modified sequence from LASV(G733-SLE-2010;Clade IV)__AIT17154__GPCstabilized (opt3)
ggggcgcugccuacggagguggcagccaucuccuucucggcaucaagcuuaccaugggccagaucgugaccuucuuucaagaggucccccacguuauugaagaggugaugaacauaguacugaucgcccucagcauucuugcugugcugaagggguuguacaauuucgcaacaugcggaaucgucgguuuaguguccuuucugcuacucuguggcagaucuugcacuacgucacuguauaaagggguuuacgaacuucagacccuggaguugaacauggaaacacucaauaugacuaugccucugaguuguaccaagaacaauagccaucacuauauuauggugggaaacgagacaggccuggagcucaccuuaacuaauacauccaucauaaaccauaaauucugcaaucugucugacgcccacaagaaaaaccuuuacgaucaugcguugaugucgaucauuucaaccuuucaccugagcaucccaaauuucaaccaguaugaagcuaugaguugugacuuuaauggugggaagauuuccguccaguacaaccuaucucacagcuaugccggagaugcagccaaucauugcggcacgaucgcuaacggcgugcuccaaacuuucaugaggauggcauggggaggguccuacauagcccuggacucagguugcgaucgcugggacuguauuaugaccaguuaccaguaucuuaucauucagaacacaacuugggaggaucacugccaguuuagccgaccgucucccaucggcuaccugggguugcucucccaacguaccagagacaucuauauuucaaggcggcgccggggaacauucaccuggacgcugagcgauagugaaggcaaggacacuccugguggguacugucucacacgcuggaugcuuauagaggcugagcugaaaugcuuuggaaauaccgccguagcgaaguguaacgaaaaacaugaugaggaguucugcgacauguugagacuauuugauuucaauaagcaggcaauccagaggcugaaagcccccgcucagaugucuauucaacucaucaacaaggccguuaaugcacugauaaacgaccagcuuauuaugaagaaucaucugcgggacaucaugugcaucccauauugcaacuacuccaaauauugguacuugaaucacacuacaaccggcaagacgagccuccccaaauguuggcuggugucgaacgggucuuacuuaaaugaaacccacuucuccgaugacauugagcagcaagcugauaacaugaucacagagaugcugcagaaggaauauauggagcgccagggaaaaacuccucuaggucucgucgaccuguuuguguucucaaccaguuuuuaccuuauuagcauauucuugcaccuggugaagaucccaacacaucgacacgucguuggcaaauccugccccaagccucauagacucaaucacauggggauuuguucuugcggacuguauggccagccaggugugccgguaaaguggaaaaggugaggacuagugcaucacauuuaaaagcaucucagccuaccaugagaauaagagaaagaaaaugaagaucaauagcuuauucaucucuuuuucuuuuucguugguguaaagccaacacccugucuaaaaaacauaaauuucuuuaaucauuuugccucuuuucucugugcuucaauuaauaaaaaauggaaagaaccuagaucuaaaaaaaaaaaaaaaaaaaaaaaaaaaaaaaaaaaaaaaaaaaaaaaaaaaaaaaaaaaaaaaaugcaucccccccccccccccccccccccccccccccaaaggcucuuuucagagccaccagaauu

SEQ ID NO: 7126 - RNA, 1858 nt, Artificial Sequence
  mRNA product Design i-2 comprising derived and/or modified sequence from MOPV/LASV reassortant(IGS-1;Clade IV)__AFY05576__GPCstabilized (opt3)
ggggcgcugccuacggagguggcagccaucuccuucucggcaucaagcuuaccaugggccagaucgugaccuucuuucaagaggucccccacguuauugaagaggugaugaacauaguacugaucgcccucagcgugcuugcuguccugaagggguuguacaauuucgcaacaugcggauuagugggucugguuacuuuucuacuccuguguggcagauccugcacgaccucucuuuauaaagggguguacgaacugcagacauuggagcucaacauggaaacucugaauaugaccaugccucugucauguacaaagaacaauagucaucacuauauuauggucggaaacgagaccggccucgaguuaacucugacaaauaccagcaucauuaaccauaaauucugcaaucuuuccgacgcccacaagaaaaacuuguacgaucaugcgcugaugucuaucauaucgacguuucaccuaucaaucccaaauuucaaccaguaugaagcuaugagcugugacuuuaauggugggaagauuagugugcaguacaaccucucccacucuuaugccggagaugcagccaaucauugcggcacuguagcuaacggcguucugcaaaccuucaugaggauggcauggggagggagcuacaucgcccuugacuccgguugcggcaacugggauuguauuaugacaucauaccaguaucugaucauacagaauacuaccugggaggaccacugccaguuuagucgcccgagccccauuggguacuugggacuccugucucaacgaacacgugauaucuauauuuccagaaggcgccggggcaccuucacguggacucucucagacagcgaaggugaggauacaccugggggauacugucuuacccgguggaugcugaucgaggcugaauugaagugcuuuggcaacacugccguggcgaaauguaaugagaagcaugacgaagaguucugcgauaugcuacgccuguuugacuucaacaaacaggcaauccagagacucaaggcccccgcucagaugaguauucaacugauaaauaaagccgucaacgcacuuaucaaugaucagcugauuaugaagaaccacuugagggacaucaugugcauaccauauugcaauuacucuaaguauugguaccucaaccacacaaccacggggcggaccucccugcccaaauguugguuagugagcaauggaucguaccugaacgagacacauuucucugacgauauugagcagcaagcugacaauaugaucacugaaaugcuacagaaggaguauauggaacgccaggguaaaaccccucucggccugguggaucuuuuugucuucuccacaucauuuuacuugaucaguauuuuccugcaccucguuaagaucccaacucaucgacacauuguggggaaaagcugccccaagccucauagacugaaccacaugggaauauguuccugcggccuuuauaaacagccagguguaccggugaaguggaagaggugaggacuagugcaucacauuuaaaagcaucucagccuaccaugagaauaagagaaagaaaaugaagaucaauagcuuauucaucucuuuuucuuuuucguugguguaaagccaacacccugucuaaaaaacauaaauuucuuuaaucauuuugccucuuuucucugugcuucaauuaauaaaaaauggaaagaaccuagaucuaaaaaaaaaaaaaaaaaaaaaaaaaaaaaaaaaaaaaaaaaaaaaaaaaaaaaaaaaaaaaaaaugcaucccccccccccccccccccccccccccccccaaaggcucuuuucagagccaccagaauu

SEQ ID NO: 7127 - RNA, 1858 nt, Artificial Sequence
  mRNA product Design i-2 comprising derived and/or modified sequence from LASV(LM765-SLE-2012;Clade IV)__AIT17814__GPCstabilized (opt3)
ggggcgcugccuacggagguggcagccaucuccuucucggcaucaagcuuaccaugggccagaucgugaccuucuuucaagaggucccccacguuauugaagaggugaugaacauaguacugaucgcccucagcauucuugcugugcugaagggguuguacaauuucgcaacaugcggauuagucggucuggugacuuuucuacuccuguguggcagauccugcacgaccucucuuuauaaagggguuuacgaacugcagacauuggagcucaacauggaaacucugaauaugaccaugccucugucauguacaaagaacaauagucaucacuauaucauggugggaaacgagaccggccucgaguuaacucugacaaauaccagcauuaucgaccauaaauucugcaaccuuuccgaugcccacaggaagaauuuguacgaccaugcgcugaugucuauaaucucgacguuucaccuaucaauuccaaacuucaaucaguaugaagcuaugagcugugauuuuaacggugggaaaaucaguguccaguacaaucucucccacucuuaugccaaggacgcagccgaucauugcggaacuguggcuaacggcguacugcaaaccuucaugcggauggcauggggcgggagcuacauugcccuugacuccggaugcggucgaugggauuguaucaugacaucauaccaguaucugauaauucagaauacuaccugggaggaccacugccaguuuagucguccgagccccaucggcuacuuggggcuccugucucaaagaacaagggauauuuauaucucccggcgccgccggggaaccuucacguggacucucucagacagcgaaggcaaggauacaccugguggguacugucuuaccagauggaugcugaucgaggcugaguugaaaugcuuuggaaacacugccguugcgaaguguaacgaaaaacaugacgaggaguucugcgauaugcuaaggcuguuugacuucaauaagcaggcaauucagcggcucaaagcccccgcucagaugaguauacaacugaucaacaaggccgugaaugcacuuauuaacgaccagcugaucaugaagaaucacuugcgcgauauaaugugcauuccauauugcaacuacucuaaauauugguaccucaaucacacaaccacgggcaagaccucccugcccaaauguugguuagucagcaacgggucguaccugaaugaaacacauuucucugacgauaucgagcagcaagcugacaacaugaucacugagaugcuacagaaggaauauauggagcgacagggaaaaaccccucucggucugguggaucuuuuuguguucuccacaucauuuuacuugauuaguaucuuccugcaccucgucaagauuccaacucauagacacauaguuggcaaacccugcccuaagccacauaggcugaaucacauggggaucuguagcugcggacuuuauaagcagccgggcgugcccguaaaauggaagcggugaggacuagugcaucacauuuaaaagcaucucagccuaccaugagaauaagagaaagaaaaugaagaucaauagcuuauucaucucuuuuucuuuuucguugguguaaagccaacacccugucuaaaaaacauaaauuucuuuaaucauuuugccucuuuucucugugcuucaauuaauaaaaaauggaaagaaccuagaucuaaaaaaaaaaaaaaaaaaaaaaaaaaaaaaaaaaaaaaaaaaaaaaaaaaaaaaaaaaaaaaaaugcaucccccccccccccccccccccccccccccccaaaggcucuuuucagagccaccagaauu

SEQ ID NO: 7128 - RNA, 1858 nt, Artificial Sequence
  mRNA product Design i-2 comprising derived and/or modified sequence from LASV(LM776-SLE-2012;Clade IV)__AIT17824__GPCstabilized (opt3)
ggggcgcugccuacggagguggcagccaucuccuucucggcaucaagcuuaccaugggccagaucgugaccuucuuucaagaggucccccacguuauugaagaggugaugaacauaguacugaucgcccucagcauucuugcugugcugaagggguuguacaauuucgcaacaugcggauuagucggucuggugacuuuucuacuccuguguggcagauccugcacgaccucuguuuauaaagggguguacgaacuucagacacuggaguugaacauggaaacucucaauaugaccaugccucugucauguacaaagaacaauagucaucacuauaucauggucggaaacgagaccggccuggagcucacuuuaacaaauaccagcauuaucaaccauaaauucugcaaucuguccgacgcccacaagaaaaaccuuuacgaucaugcguugaugucuauaaucucgacguuucaccugucaauuccaaauuucaaccaguaugaagcuaugagcugugacuuuaauggugggaagaucagugugcaguacaaccuaucccacucuuaugccggagaugcagccaaucauugcggcacuguagcuaacggcguucuccaaaccuucaugaggauggcauggggagggagcuacauugcccuggacuccgguugcggcaagugggauuguaucaugacaucauaccaguaucuuauaauucagaacacuaccugggaggaccauugccaguuuagucggccgagccccaucggguaccugggauugcucucucaacgcacacgagauauuuauaucucccguagacgccggggcaccuucacguggacucugucagacagcgaagguaaagauacaccugggggauacugucucaccagguggaugcuuaucgaggcugagcugaagugcuuuggcaauacugccguggcgaaauguaacgaaaagcacgacgaggaguucugcgauauguugcggcuauuugacuucaauaaacaggcaauucagcgccugaaggcccccgcucagaugaguauacaacucaucaacaaggccgucaaugcacugauuaacgaucagcuuaucaugaaaaaucaccugagagacauaaugugcauuccauauugcaacuacucuaaguauugguacuugaaucauacaaccacggggaaaaccucccuccccaaguguuggcuggugagcaacggaucguacuuaaaugaaacacacuucucugacgauaucgagcagcaagcugacaacaugaucacugagaugcugcagaaagaauauauggagaggcaggguaagaccccucuaggccucguggaucuguuugucuucuccacaucauuuuaccuuauuaguaucuucuugcaucugguuaaaauuccaacucaccggcauauagugggaaagagcugccccaagccucaccgccucaaucacauggggaucuguuccugcggccuguauaaacagccagguguaccggugcgauggaagagaugaggacuagugcaucacauuuaaaagcaucucagccuaccaugagaauaagagaaagaaaaugaagaucaauagcuuauucaucucuuuuucuuuuucguugguguaaagccaacacccugucuaaaaaacauaaauuucuuuaaucauuuugccucuuuucucugugcuucaauuaauaaaaaauggaaagaaccuagaucuaaaaaaaaaaaaaaaaaaaaaaaaaaaaaaaaaaaaaaaaaaaaaaaaaaaaaaaaaaaaaaaaugcaucccccccccccccccccccccccccccccccaaaggcucuuuucagagccaccagaauu

SEQ ID NO: 7129 - RNA, 1858 nt, Artificial Sequence
  mRNA product Design i-2 comprising derived and/or modified sequence from LASV(Mad39;Clade IV)__ANH09722__GPCstabilized (opt3)
ggggcgcugccuacggagguggcagccaucuccuucucggcaucaagcuuaccaugggccagaucgugaccuucuuucaagaggucccccacguuauugaagaggugaugaacauaguacugaucgcccucagcauucuugcugugcugaagggguuguacaaugucgcaacaugcggauuaaucggucuggugacuuuccuacuccuguguggcagauccugcacgaccacacuuuauaaagggguuuacgaacugcaggccuuggagcucaacauggaaacucugaauaugaccaugccucugucuuguacaaagaacaauucacaucacuauauuagggugggaaacgagaccggccucgaguuaacucugacaaauaccagucuuaucaaccauaaauuuugcaauuugagcgacgcgcacaagaaaaaccuguacgaucaugcucuaauguccauaaucucuacguuccaccucucgauuccaaauuuuaaccaguaugaagccaugucaugugacuucaaugaugguaagaucagcguccaguacaaccugagucacacuuaugcaggggacaccgccaaucauugcggaacaguggcuaacggcguacuucaaacuuuuaugcggauggcauggggcggguccuacauugcccuggauucuggaugcgguggcugggacuguaucaugaccagcuaccaguauuugauaauucagaacacaaccugggaggaucacugccaguucucccgaccgucacccaucggguaccucggacuguuaagucaacguacgagagacauuuauaucagcaggcggcgccggggcacuuuuacauggacccuuucugauuccgaagguaaggacacuccugggggauacugucugacacgcuggauguugaucgaggcugagcuaaaaugcuucggcaauaccgccguugcgaaguguaacgaaaaacaugaugaggaauuuugcgacaugcugagacucuucgauuuuaauaagcaggcaauucagaggcugaaagcccccgcucagaugucaauacaacuuaucaacaaggccgugaaugcacugauuaacgaccaguugaucaugaagaaucaccuccgggacauaaugugcauuccauauugcaacuacagcaaauauugguaccugaaucacacggucaccgggaagacaaguuuacccaaauguuggcuggugucuaacggauccuaccuaaaugaaacucauuucagcgaugacaucgagcagcaagcugauaacaugaucaccgagaugcuccagaaggaauauauggagcgccaggguaaaacaccucugggccuuguggacuuguucgucuuuucgacuucuuucuaccugauuuccaucuuucuccaccugguuaagauuccaacccaucgacacgugguagggaaacccugcccuaagccacauagacuuaaucacaugggaauauguucaugcggcuucuauaagcagccgggugugcccgucagguggaaacggugaggacuagugcaucacauuuaaaagcaucucagccuaccaugagaauaagagaaagaaaaugaagaucaauagcuuauucaucucuuuuucuuuuucguugguguaaagccaacacccugucuaaaaaacauaaauuucuuuaaucauuuugccucuuuucucugugcuucaauuaauaaaaaauggaaagaaccuagaucuaaaaaaaaaaaaaaaaaaaaaaaaaaaaaaaaaaaaaaaaaaaaaaaaaaaaaaaaaaaaaaaaugcaucccccccccccccccccccccccccccccccaaaggcucuuuucagagccaccagaauu

SEQ ID NO: 7130 - RNA, 1858 nt, Artificial Sequence
  mRNA product Design i-2 comprising derived and/or modified sequence from LASV(Z0947-SLE-2011;Clade IV)__AIT17840__GPCstabilized (opt3)
ggggcgcugccuacggagguggcagccaucuccuucucggcaucaagcuuaccaugggccagaucgugaccuucuuucaagaggucccccacguuauugaagaggugaugaacauaguacugaucgcccucagcauucuugcugugcugaagggguuguacaauuucgcaacaugcggauuagucggucuggugacuuuucuacuccuguguggcagauccugcacgaucucucuuuauaaagggguuuacgaacugcagaccuuggagcucaacauggaaacacugaauaugacuaugccucugucauguaccaagaacaauagucaucacuauauuauggugggaaacgagacaggccucgaguuaacccugacuaauacaagcaucauaaaccauaaauucugcaaucuuuccgacgcccacaagaaaaacuuguacgaucaugcgcugaugucuaucauuucgaccuuucaccuaucaaucccaaauuucaaccaguaugaagcuaugagcugugacuuuaauggugggaagauuaguguccaguacaaccucucccacucuuaugccggagaugcagccaaucauugcggcacgguggcuaacggcguacugcaaacuuucaugaggauggcauggggagggagcuacaucgcccuugacuccgguugcgaucgcugggacuguauaaugaccucauaccaguaucugauuauccagaacacaacuugggaggaucacugccaguuuagucgaccgagccccauuggcuacuuggggcuccugucucaacguaccagagacaucuauaucuccaggcggcgccggggaacauucaccuggacgcucucagauagcgaaggcaaggacacuccugguggguacugucuuacacgcuggaugcugauugaggcugaguugaaaugcuuuggaaauaccgccguugcgaaguguaacgaaaaacaugaugaggaguucugcgacaugcuaagacuguuugauuucaauaagcaggcaauacagaggcucaaagcccccgcucagaugaguauccaacugauuaacaaggccgugaaugcacuuaucaacgaccagcugauaaugaagaaucacuugcgggacauuaugugcaucccauauugcaacuacucuaaauauugguaccucaaucacacuacaaccggcaagacgucccugcccaaauguugguuagucagcaacgggucguaccugaaugaaacccauuucucugaugacaucgagcagcaagcugauaacaugauuacagagaugcuacagaaggaauauauggagcgccagggaaaaacuccucucggucugguggaccuuuuuguguucuccaccucauuuuacuugaucaguauuuuccugcaccucgucaagauaccaacacaucgacacaucguuggcaaacccugcccuaagccacauagacugaaucacauggggauuuguagcugcggacuuuauaagcagccgggcgugcccguaaaauggaagaggugaggacuagugcaucacauuuaaaagcaucucagccuaccaugagaauaagagaaagaaaaugaagaucaauagcuuauucaucucuuuuucuuuuucguugguguaaagccaacacccugucuaaaaaacauaaauuucuuuaaucauuuugccucuuuucucugugcuucaauuaauaaaaaauggaaagaaccuagaucuaaaaaaaaaaaaaaaaaaaaaaaaaaaaaaaaaaaaaaaaaaaaaaaaaaaaaaaaaaaaaaaaugcaucccccccccccccccccccccccccccccccaaaggcucuuuucagagccaccagaauu

SEQ ID NO: 7131 - RNA, 1858 nt, Artificial Sequence
  mRNA product Design i-2 comprising derived and/or modified sequence from LASV(Josiah;Clade IV)__NP_694870__GPCstabilized (opt4)
ggggcgcugccuacggagguggcagccaucuccuucucggcaucaagcuuaccaugggccagaucgugaccuucuuccaggaggugccccacgugaucgaggaggugaugaacaucgugcugaucgcccugagcgugcuggccgugcugaagggccuguacaacuucgccaccugcggccuggugggccuggugaccuuccugcugcugugcggcagaagcugcaccaccagccuguacaagggcguguacgagcugcagacccuggagcugaacauggagacccugaacaugaccaugccccugagcugcaccaagaacaacagccaccacuacaucauggugggcaacgagaccggccuggagcugacccugaccaacaccagcaucaucaaccacaaguucugcaaccugagcgacgcccacaagaagaaccuguacgaccacgcccugaugagcaucaucagcaccuuccaccugagcauccccaacuucaaccaguacgaggccaugagcugcgacuucaacggcggcaagaucagcgugcaguacaaccugagccacagcuacgccggcgacgccgccaaccacugcggcaccguggccaacggcgugcugcagaccuucaugagaauggccuggggcggcagcuacaucgcccuggacagcggcugcggcaacugggacugcaucaugaccagcuaccaguaccugaucauccagaacaccaccugggaggaccacugccaguucagcagacccagccccaucggcuaccugggccugcugagccagagaaccagagacaucuacaucagcagaagacgccggggcaccuucaccuggacccugagcgacagcgagggcaaggacacccccggcggcuacugccugaccagauggaugcugaucgaggccgagcugaagugcuucggcaacaccgccguggccaagugcaacgagaagcacgacgaggaguucugcgacaugcugagacuguucgacuucaacaagcaggccauccagagacugaaggcccccgcccagaugagcauccagcugaucaacaaggccgugaacgcccugaucaacgaccagcugaucaugaagaaccaccugagagacaucaugugcauccccuacugcaacuacagcaaguacugguaccugaaccacaccaccaccggcagaaccagccugcccaagugcuggcuggugagcaacggcagcuaccugaacgagacccacuucagcgacgacaucgagcagcaggccgacaacaugaucaccgagaugcugcagaaggaguacauggagagacagggcaagaccccccugggccugguggaccuguucguguucagcaccagcuucuaccugaucagcaucuuccugcaccuggugaagauccccacccacagacacaucgugggcaagagcugccccaagccccacagacugaaccacaugggcaucugcagcugcggccuguacaagcagcccggcgugcccgugaaguggaagagaugaggacuagugcaucacauuuaaaagcaucucagccuaccaugagaauaagagaaagaaaaugaagaucaauagcuuauucaucucuuuuucuuuuucguugguguaaagccaacacccugucuaaaaaacauaaauuucuuuaaucauuuugccucuuuucucugugcuucaauuaauaaaaaauggaaagaaccuagaucuaaaaaaaaaaaaaaaaaaaaaaaaaaaaaaaaaaaaaaaaaaaaaaaaaaaaaaaaaaaaaaaaugcaucccccccccccccccccccccccccccccccaaaggcucuuuucagagccaccagaauu

SEQ ID NO: 7132 - RNA, 1855 nt, Artificial Sequence
  mRNA product Design i-2 comprising derived and/or modified sequence from LASV(LP;Clade I)__AAF86701__GPCstabilized (opt4)
ggggcgcugccuacggagguggcagccaucuccuucucggcaucaagcuuaccaugggccagaucaucaccuucuuccaggaggugccccacgugaucgaggaggugaugaacaucgugcugaucgcccugagccugcuggccauccugaagggccuguacaacaucgccaccugcggcaucaucggccugguggccuuccuguuccugugcggcaagagcugcagccugacccugaagggcggcuacgagcugcagacccuggagcugaacauggagacccugaacaugaccaugccccugagcugcaccaagaacagcagccaccacuacaucagagugggcaacgagaccggccuggagcugacccugaccaacaccagcaucaucaaccacaaguucugcaaccugagcgacgcccacaagaagaaccuguacgaccacgcccugaugagcaucaucagcaccuuccaccugagcauccccaacuucaaccaguacgaggccaugagcugcgacuucaacggcggcaagaucagcgugcaguacaaccugagccacagcuacgccggcgacgccgccgagcacugcggcaccguggccaacggcgugcugcagaccuucaugagaauggccuggggcggcagauacaucgcccuggacagcggcugcggcaacugggacugcaucaugaccagcuaccaguaccugaucauccagaacaccaccugggaggaccacugccaguucagcagacccagccccaucggcuaccugggccugcugagccagagaaccagagacaucuacaucagcagaagacgccggggcaccuucaccuggacccugagcgacagcgagggcaacgagacccccggcggcuacugccugaccagauggaugcugaucgaggccgagcugaagugcuucggcaacaccgccguggccaagugcaacgagaagcacgacgaggaguucugcgacaugcugagacuguucgacuucaacaagcaggccaucagaagacugaaggcccccgcccagaugagcauccagcugaucaacaaggccgugaacgcccugaucaacgaccagcugaucaugaagaaccaccugagagacaucaugugcauccccuacugcaacuacagcaaguacugguaccugaaccacaccagcagcggcagaaccagccugcccaagugcuggcugaucagcaacggcagcuaccugaacgagacccaguucagcgacgacaucgagcagcaggccgacaacaugaucaccgagaugcugcagaaggaguacaucgagagacagggcaagaccccccugggccugguggacaucuucaucuucagcaccagcuucuaccugaucagcaucuuccugcaccugaucaagauccccacccacagacacaucgugggcaagcccugccccaagccccacagacugaaccacaugggcgugugcagcugcggccuguacaagcaccccggcgugcccaccaaguggaagagaugaggacuagugcaucacauuuaaaagcaucucagccuaccaugagaauaagagaaagaaaaugaagaucaauagcuuauucaucucuuuuucuuuuucguugguguaaagccaacacccugucuaaaaaacauaaauuucuuuaaucauuuugccucuuuucucugugcuucaauuaauaaaaaauggaaagaaccuagaucuaaaaaaaaaaaaaaaaaaaaaaaaaaaaaaaaaaaaaaaaaaaaaaaaaaaaaaaaaaaaaaaaugcaucccccccccccccccccccccccccccccccaaaggcucuuuucagagccaccagaauu

SEQ ID NO: 7133 - RNA, 1855 nt, Artificial Sequence
  mRNA product Design i-2 comprising derived and/or modified sequence from LASV(803213;Clade II)__AAF86703__GPCstabilized (opt4)
ggggcgcugccuacggagguggcagccaucuccuucucggcaucaagcuuaccaugggccagaucaucaccuucuuccaggaggugccccacgugaucgaggaggugaugaacaucgugcugaucgcccugagccugcuggccauccugaagggcaucuacaacguggccaccugcggccuguucggccugaucagcuuccugcugcugugcggcagaagcugcagcgugaccuacaagggcguguacgagcugcagacccuggagcugaacauggccaaccugaacaugaccaugccccugagcugcaccaagaacaacagccaccacuacaucauggugggcaacgagaccggccuggagcugacccugaccaacaccagcaucaucaaccacaaguucugcaaccugagcgacgcccacaagaagaaccuguacgaccacgcccugaugagcaucaucagcaccuuccaccugagcauccccaacuucaaccaguacgaggccaugagcugcgacuucaacggcggcaagaucagcgugcaguacaaccugagccacagcuucgccguggacgccgccaaccacugcggcaccaucgccaacggcgugcugcagaccuucaugagaauggccuggggcggcagcuacaucgcccuggacagcggcugcggcaacugggacugcaucaugaccagcuaccaguaccugaucauccagaacaccaccugggaggaccacugccaguucagcagacccagccccaucggcuaccugggccugcugagccagagaaccagagacaucuacaucagcagaagacgccggggcaccuucaccuggacccugagcgacagcgagggcaacgaggcccccggcggcuacugccugaccagauggaugcugaucgaggccgagcugaagugcuucggcaacaccgccguggccaagugcaacgagaagcacgacgaggaguucugcgacaugcugagacuguucgacuucaacaagcaggccaucaagagacugaagacccccgcccagaugagcauccagcugaucaacaaggccgugaacgcccugaucaacgaccagcugaucaugaagaaccaccugagagacaucaugugcauccccuacugcaacuacagcagauacugguaccugaaccacaccgugaccggcaagaccagccugcccagaugcuggcuggugagcaacggcagcuaccugaacgagacccacuucagcgacgacaucgagcagcaggccgacaacaugaucaccgagaugcugcagaaggaguacauggacagacagggcaagaccccccugggccugguggaccuguucguguucagcaccagcuucuaccugaucagcaucuuccugcaccuggugaagauccccacccacagacacaucgugggcaagcccugccccaagccccacagacugaaccacaugggcaucugcagcugcggccuguacaagcaccccggcgugcccgugaaguggaagagaugaggacuagugcaucacauuuaaaagcaucucagccuaccaugagaauaagagaaagaaaaugaagaucaauagcuuauucaucucuuuuucuuuuucguugguguaaagccaacacccugucuaaaaaacauaaauuucuuuaaucauuuugccucuuuucucugugcuucaauuaauaaaaaauggaaagaaccuagaucuaaaaaaaaaaaaaaaaaaaaaaaaaaaaaaaaaaaaaaaaaaaaaaaaaaaaaaaaaaaaaaaaugcaucccccccccccccccccccccccccccccccaaaggcucuuuucagagccaccagaauu

SEQ ID NO: 7134 - RNA, 1855 nt, Artificial Sequence
  mRNA product Design i-2 comprising derived and/or modified sequence from LASV(GA391;Clade III)__CAA36645__GPCstabilized (opt4)
ggggcgcugccuacggagguggcagccaucuccuucucggcaucaagcuuaccaugggccagaucgugaccuucuuccaggaggugccccacgugaucgaggaggugaugaacaucgugcugaucgcccugagcauccuggccauccugaagggccuguacaacguggccaccugcggccugaucggccuggugaccuuccugcugcugagcggcagaagcugcagccugaucuacaagggcaccuacgagcugcagacccuggagcugaacauggagacccugaacaugaccaugccccugagcugcaccaagaacaacagccaccacuacaucagagugggcaacgagaccggccuggagcugacccugaccaacaccagcauccugaaccacaaguucugcaaccugagcgacgcccacaagagaaaccuguacgaccacagccugaugagcaucaucagcaccuuccaccugagcauccccaacuucaaccaguacgaggccaugagcugcgacuucaacggcggcaagaucaccgugcaguacaaccugagccacagcuucgccguggacgccgccggccacugcggcacccuggccaacggcgugcugcagaccuucaugagaauggccuggggcggcagcuacaucgcccuggacagcggcugcggcaacugggacugcaucaugaccagcuaccaguaccugaucauccagaacaccaccugggacgaccacugccaguucagcagacccagccccaucggcuaccugggccugcugagccagagaaccagagacaucuacaucagcagaagacgccggggcaccuucaccuggacccugagcgacagcgagggcaacgagacccccggcggcuacugccugaccagauggaugcugaucgaggccgagcugaagugcuucggcaacaccgccguggccaagugcaacgagaagcacgacgaggaguucugcgacaugcugagacuguucgacuucaacaagcaggccaucagaagacugaagacccccgcccagaugagcauccagcugaucaacaaggccgugaacgcccugaucaacgaccagcugaucaugaagaaccaccugagagacaucaugugcauccccuacugcaacuacagcagauacugguaccugaaccacaccagcaccggcaagaccagccugcccagaugcuggcugaucagcaacggcagcuaccugaacgagaccaaguucagcgacgacaucgagcagcaggccgacaacaugaucaccgagaugcugcagaaggaguacaucgacagacagggcaagaccccccugggccugguggaccuguucguguucagcaccagcuucuaccugaucagcaucuuccugcaccuggugaagauccccacccacagacacaucgugggcaagcccugccccaagccccacagacugaaccacaugggcaucugcagcugcggccuguacaagcagcccggcgugcccgugagauggaagagaugaggacuagugcaucacauuuaaaagcaucucagccuaccaugagaauaagagaaagaaaaugaagaucaauagcuuauucaucucuuuuucuuuuucguugguguaaagccaacacccugucuaaaaaacauaaauuucuuuaaucauuuugccucuuuucucugugcuucaauuaauaaaaaauggaaagaaccuagaucuaaaaaaaaaaaaaaaaaaaaaaaaaaaaaaaaaaaaaaaaaaaaaaaaaaaaaaaaaaaaaaaaugcaucccccccccccccccccccccccccccccccaaaggcucuuuucagagccaccagaauu

SEQ ID NO: 7135 - RNA, 1858 nt, Artificial Sequence
  mRNA product Design i-2 comprising derived and/or modified sequence from LASV(AV;Clade V)__CCA30314__GPCstabilized (opt4)
ggggcgcugccuacggagguggcagccaucuccuucucggcaucaagcuuaccaugggccagaucgugaccuucuuccaggaggugccccacgugaucgaggaggugaugaacaucgugcugaucgcccugagcauccuggccgugcugaagggccuguacaacaucgccaccugcggccugaucggccugaucaccuuccugcugcugugcggcagaagcugcagcagcaaccuguacaagggcguguacgagcugcagagccuggaccugaacauggagacccugaacaugaccaugccccugagcugcaccaagaacaacagccaccacuacaucagagugggcaacgacaccggccuggagcugacccugaccaacaccagcauccugaaccacaaguucugcaaccugagcgacgcccacaagaaggaccuguacgaccacgcccugaugagcaucaucagcaccuuccaccugagcauccccaacuucaaccaguacgaggccaugagcugcgacuucaacggcggcaagaucagcgugcaguacaaccugagccacagcuacgccaucgacgccgccaaccacugcggcaccguggccaacggcauccugcagaccuucaugagaauggccuggggcggcagcuacaucgcccuggacagcggcugcggcaacugggacugcaucaugaccagcuaccaguaccugaucauccagaacaccaccugggagaaccacugccaguucagcagacccagccccaucggcuaccugggccugcugagccagagaaccagagacaucuacaucagcagaagacgccggggcaccuucaccuggacccugagcgacagcgagggcaacgccacccccggcggcuacugccugaccagauggaugcugaucgaggccgagcugaagugcuucggcaacaccgccguggccaagugcaacgagaagcacgacgaggaguucugcgacaugcugagacuguucgacuucaacaagcaggccaucagcagacugaagagccccgcccagaugagcauccagcugaucaacaaggccgugaacgcccugaucaacgaccagcugaucaugaagaaccaccugagagacaucaugugcauccccuacugcaacuacagcaaguacugguaccugaaccacaccaucaccggcaagaccagccugcccaagugcuggcuggugagcaacggcagcuaccugaacgagacccacuucagcgacgacaucgagcagcaggccgacaacaugaucaccgagaugcugcagaaggaguacauggagagacagggcaagaccccccugggccugguggaccuguucguguucagcaccagcuucuaccugaucagcaucuuccugagacuggugaagauccccacccacagacacaucgugggcaagcccugccccaagccccacagacugaaccacaugggcaucugcagcugcggccuguacaagcagcccggcgugcccgugagauggaagagaugaggacuagugcaucacauuuaaaagcaucucagccuaccaugagaauaagagaaagaaaaugaagaucaauagcuuauucaucucuuuuucuuuuucguugguguaaagccaacacccugucuaaaaaacauaaauuucuuuaaucauuuugccucuuuucucugugcuucaauuaauaaaaaauggaaagaaccuagaucuaaaaaaaaaaaaaaaaaaaaaaaaaaaaaaaaaaaaaaaaaaaaaaaaaaaaaaaaaaaaaaaaugcaucccccccccccccccccccccccccccccccaaaggcucuuuucagagccaccagaauu

SEQ ID NO: 7136 - RNA, 1855 nt, Artificial Sequence
  mRNA product Design i-2 comprising derived and/or modified sequence from LASV(Togo/2016/7082;Clade VI)__AMR44577__GPCstabilized (opt4)
ggggcgcugccuacggagguggcagccaucuccuucucggcaucaagcuuaccaugggccagaucaucaccuucuuccaggaggugccccacgugaucgaggaggugaugaacaucgugcugaucgcccugagccugcuggccauccugaagggcguguacaacguggccaccugcggcaucaucggccuggugaccuuccuguuccugugcggcagaagcugcagccugaucuacaagggcagcuacgagcugcagacccuggagcugaacauggagacccugaacaugaccaugccccugagcugcaccaagaacagcagccaccacuacaucagagugggcaacgagaccggccuggagcugacccugaccaacaccagcaucaucaaccacaaguucugcaaccugagcgacgcccacaagagaaaccuguacgaccacgcccugaugagcauccugagcaccuuccaccugagcauccccaacuucaaccaguacgaggccaugagcugcgacuucaacggcggcaagaucagcgugcaguacaaccugagccacgccuacgccguggacgccgccgagcacugcggcaccguggccaacggcgugcugcagaccuucaugagaauggccuggggcggcagcuacaucgcccuggacagcggcugcggcaacugggacugcaucaugaccagcuaccaguaccugaucauccagaacaccaccugggaggaccacugccaguucagcagacccagccccaucggcuaccugggccugcugagccagagaaccagagacaucuacaucagcagaagacgccggggcaccuucaccuggacccugagcgacagcgagggcaacgagacccccggcggcuacugccugaccagauggaugcugaucgaggccgagcugaagugcuucggcaacaccgccguggccaagugcaacgagaagcacgacgaggaguucugcgacaugcugagacuguucgacuucaacaagcaggccauccagagacugaagagccccgcccagaugagcauccagcugaucaacaaggccgugaacgcccugaucaacgaccagcugaucaugaagaaccaccugagagacaugaugugcauccccuacugcaacuacagcaaguacugguaccugaaccacaccagcagcggcagaaccagccugcccaagugcuggcuggugagcaacggcagcuaccugaacgagacccacuucagcgacgacaucgagcagcaggccgacaacaugaucaccgagaugcugcagaaggaguacaucgacagacagggcaagaccccccugggccugguggaccuguucguguucagcaccagcuucuaccugaucagcaucuuccugcaccugaucaagauccccacccacagacacaucgugggcaagcccugccccaagccccacagacugaaccacaugggcaucugcagcugcggccuguacaagcagcccggcgugcccaccagauggaagagaugaggacuagugcaucacauuuaaaagcaucucagccuaccaugagaauaagagaaagaaaaugaagaucaauagcuuauucaucucuuuuucuuuuucguugguguaaagccaacacccugucuaaaaaacauaaauuucuuuaaucauuuugccucuuuucucugugcuucaauuaauaaaaaauggaaagaaccuagaucuaaaaaaaaaaaaaaaaaaaaaaaaaaaaaaaaaaaaaaaaaaaaaaaaaaaaaaaaaaaaaaaaugcaucccccccccccccccccccccccccccccccaaaggcucuuuucagagccaccagaauu

SEQ ID NO: 7137 - RNA, 1855 nt, Artificial Sequence
  mRNA product Design i-2 comprising derived and/or modified sequence from LASV(KAK-428;Clade n.d. (VII))__ANH09740__GPCstabilized (opt4)
ggggcgcugccuacggagguggcagccaucuccuucucggcaucaagcuuaccaugggccagaucgugaccuucuuccaggaggugccccacgugaucgaggaggugaugaacaucgugcugaucgcccugagccugcuggccauccugaagggccuguacaacuucgccaccugcggcgugaucggccugaucaccuuccugcugcugugcggcagaagcugcagcgccaccuacaagggccaguacgagcugcagacccuggagcugaacauggagagccugaacaugaccaugccccugagcugcaccaagaacaacagccaccacuacaucagagccggcaacaacaccggccuggagcugacccugaccaacaccagcaucaucagccacaaguucugcaaccugagcgacgcccacaagaagaaccuguacgaccacacccugaugagcaucaucaccaccuuccaccugagcauccccaacuucaaccaguacgaggccaugagcugcgacuucaacggcggcaagaucagcauccaguacaaccugagccacagcuacgccggcgacgccgcccagcacugcggcaccguggccaacggcgugcugcagaccuucaugagaauggccuggggcggcagcuaccuggcccuggacagcggcugcagaggcugggacugcaucaucagcagcuaccaguaccugaucauccagaacaccaccugggacgaccacugccaguucagcagacccagccccaucggcuaccugggcuucgugagccagaagaccagagacaucuacaucagcagaagacgccggggcaccuucaccuggacccugagcgacagcgagggccacgacaugcccggcggcuacugccugaccagauggaugcugaucgaggccgaccugaagugcuucggcaacaccgccguggccaagugcaacgagaagcacgacgaggaguucugcgacauguggagacuguucgacuucaacaagcaggccauccagagacugaaggcccccgcccagaugaacauccagcugaucaacaaggccgugaacgcccugaucaacgaccagcugaugaugaagaaccaccugagagacaucaugugcauccccuacugcaacuacagcaaguucugguaccugaacaacaccaccaccggcagaaccagccugcccagaugcuggcugaucagcaacggcagcuaccugaacgagacccacuucagcgacgacaucgagcagcaggccgacaacaugaucaccgagaugcugcagaaggaguacauggacagacagggcaagaccccccugggccugguggaccuguucguguucagcaccagcuucuaccugaucaccaucuuccugcaccuggugaagauccccacccacagacacaucgugggcaagcccugccccaagccccacagacugaaccacaugggcaucugcagcugcggccuguacaagcagcccggcgugcccgugagauggaagagaugaggacuagugcaucacauuuaaaagcaucucagccuaccaugagaauaagagaaagaaaaugaagaucaauagcuuauucaucucuuuuucuuuuucguugguguaaagccaacacccugucuaaaaaacauaaauuucuuuaaucauuuugccucuuuucucugugcuucaauuaauaaaaaauggaaagaaccuagaucuaaaaaaaaaaaaaaaaaaaaaaaaaaaaaaaaaaaaaaaaaaaaaaaaaaaaaaaaaaaaaaaaugcaucccccccccccccccccccccccccccccccaaaggcucuuuucagagccaccagaauu

SEQ ID NO: 7138 - RNA, 1855 nt, Artificial Sequence; identical to SEQ ID NO: 7132
  mRNA product Design i-2 comprising derived and/or modified sequence from LASV(Pinneo-NIG-1969;Clade I)__AIT17836__GPCstabilized (opt4)

SEQ ID NO: 7139 - RNA, 1855 nt, Artificial Sequence
  mRNA product Design i-2 comprising derived and/or modified sequence from LASV(ISTH0009-NIG-2011;Clade II)__AIT17404__GPCstabilized (opt4)
ggggcgcugccuacggagguggcagccaucuccuucucggcaucaagcuuaccaugggccagaucaucaccuucuuccaggaggugccccacgugaucgaggaggugaugaacaucgugcugaucgcccugagccugcuggccauccugaagggcaucuacaacguggccaccugcggccuguucggccuggugagcuuccugcugcugugcggcagaagcugcagcaccaccuacaagggcguguacgagcugcagacccuggagcuggacauggccagccugaacaugaccaugccccugagcugcaccaagaacaacagccaccacuacaucauggugggcaacgagaccggccuggagcugacccugaccaacaccagcaucaucaaccacaaguucugcaaccugagcgacgcccacaagaagaaccuguacgaccacgcccugaugagcaucaucagcaccuuccaccugagcauccccaacuucaaccaguacgaggccaugagcugcgacuucaacggcggcaagaucagcgugcaguacaaccugagccacgccuacgccguggacgccgccaaccacugcggcaccaucgccaacggcgugcugcagaccuucaugagaauggccuggggcggcagcuacaucgcccuggacagcggcugcggcagcugggacugcaucaugaccagcuaccaguaccugaucauccagaacaccaccugggaggaccacugccaguucagcagacccagccccaucggcuaccugggccugcugagccagagaaccagagacaucuacaucagcagaagacgccggggcaccuucaccuggacccugagcgacagcgagggcaacgagacccccggcggcuacugccugaccagauggaugcugaucgaggccgagcugaagugcuucggcaacaccgccguggccaagugcaacgagaagcacgacgaggaguucugcgacaugcugagacuguucgacuucaacaagcaggccaucagaagacugaagacccccgcccagaugagcauccagcugaucaacaaggccgugaacgcccugaucaacgaccagcugaucaugaagaaccaccugagagacaucaugugcauccccuacugcaacuacagcaaguacugguaccugaaccacaccgugaccggcaagaccagccugcccagaugcuggcuggugagcaacggcagcuaccugaacgagacccacuucagcgacgacaucgagcagcaggccgacaacaugaucaccgagcugcugcagaaggaguacauggacagacagggcaagaccccccugggccugguggaccuguucguguucagcaccagcuucuaccugaucagcaucuuccugcaccugaucaagauccccacccacagacacaucaccggcaagcccugccccaagccccacagacugaaccacaugggcaucugcagcugcggccuguacaagcaccccggcgugcccgugaaguggaagagaugaggacuagugcaucacauuuaaaagcaucucagccuaccaugagaauaagagaaagaaaaugaagaucaauagcuuauucaucucuuuuucuuuuucguugguguaaagccaacacccugucuaaaaaacauaaauuucuuuaaucauuuugccucuuuucucugugcuucaauuaauaaaaaauggaaagaaccuagaucuaaaaaaaaaaaaaaaaaaaaaaaaaaaaaaaaaaaaaaaaaaaaaaaaaaaaaaaaaaaaaaaaugcaucccccccccccccccccccccccccccccccaaaggcucuuuucagagccaccagaauu

SEQ ID NO: 7140 - RNA, 1855 nt, Artificial Sequence
  mRNA product Design i-2 comprising derived and/or modified sequence from LASV(ISTH2010-NIG-2012;Clade II)__AIT17482__GPCstabilized (opt4)
ggggcgcugccuacggagguggcagccaucuccuucucggcaucaagcuuaccaugggccagaucaucaccuucuuccaggaggugccccacgugaucgaggaggugaugaacaucgugcugaucgcccugagccugcuggccauccugaagggcaucuacaacguggccaccugcggccuguucggccuggugagcuuccugcugcugugcggcagaagcugcagcaccaccuacaagggcguguacgagcugcagacccuggagcuggacauggccagccugaacaugaccaugccccugagcugcaccaagaacaacagccaccacuacaucauggugggcaacgagaccggccuggagcugacccugaccaacaccagcaucaucaaccacaaguucugcaaccugagcgacgcccacaagaagaaccuguacgaccacgcccugaugagcaucaucagcaccuuccaccugagcauccccaacuucaaccaguacgaggccaugagcugcgacuucaacggcggcaagaucagcgugcaguacaaccugagccacgccuacgccguggacgccgccaaccacugcggcaccaucgccaacggcgugcugcagaccuucaugagaauggccuggggcggcagcuacaucgcccuggacagcggcugcggcagcugggacugcaucaugaccagcuaccaguaccugaucauccagaacaucaccugggaggaccacugccaguucagcagacccagccccaucggcuaccugggccugcugagccagagaaccagagacaucuacaucagcagaagacgccggggcaccuucaccuggacccugagcgacagcgagggcaacgagacccccggcggcuacugccugaccagauggaugcugaucgaggccgagcugaagugcuucggcaacaccgccguggccaagugcaacgagaagcacgacgaggaguucugcgacaugcugagacuguucgacuucaacaagcaggccaucagaagacugaagacccccgcccagaugagcauccagcugaucaacaaggccgugaacgcccugaucaacgaccagcugaucaugaagaaccaccugagagacaucaugugcauccccuacugcaacuacagcaaguacugguaccugaaccacaccgugaccggcaagaccagccugcccagaugcuggcuggugagcaacggcagcuaccugaacgagacccacuucagcgacgacaucgagcagcaggccgacaacaugaucaccgagcugcugcagaaggaguacaucgacagacagggcaagaccccccugggccugguggaccuguucguguucagcaccagcuucuaccugaucagcaucuuccugcaccuggugaagauccccacccacagacacguggugggcaagcccugccccaagccccacagacugaaccacaugggcaucugcagcugcggccuguacaagcaccccggcgugcccgugaaguggaagagaugaggacuagugcaucacauuuaaaagcaucucagccuaccaugagaauaagagaaagaaaaugaagaucaauagcuuauucaucucuuuuucuuuuucguugguguaaagccaacacccugucuaaaaaacauaaauuucuuuaaucauuuugccucuuuucucugugcuucaauuaauaaaaaauggaaagaaccuagaucuaaaaaaaaaaaaaaaaaaaaaaaaaaaaaaaaaaaaaaaaaaaaaaaaaaaaaaaaaaaaaaaaugcaucccccccccccccccccccccccccccccccaaaggcucuuuucagagccaccagaauu

SEQ ID NO: 7141 - RNA, 1855 nt, Artificial Sequence
  mRNA product Design i-2 comprising derived and/or modified sequence from LASV(Lassa virus/H.sapiens-wt/NGA/2015/ISTH_0543;Clade II)__AVO03639__GPCstabilized (opt4)
ggggcgcugccuacggagguggcagccaucuccuucucggcaucaagcuuaccaugggccagaucaucaccuucuuccaggaggugccccacgugaucgaggaggugaugaacaucgugcugaucgcccugagccugcuggccauccugaagggcaucuacaacguggccaccugcggccuguucggccuggugagcuuccugcugcugugcggcagaagcugcagcaccaccuacaagggcguguacgagcugcagacccuggagcuggacauggccaaccugaacaugaccaugccccugagcugcaccaagaacaacagccaccacuacaucauggugggcaacgagaccggccuggagcugacccugaccaacaccagcaucaucaaccacaaguucugcaaccugagcgacgcccacaagaagaaccuguacgaccacgcccugaugagcaucaucagcaccuuccaccugagcauccccaacuucaaccaguacgaggccaugagcugcgacuucaacggcggcaagaucagcgugcaguacaaccugagccacaccuacgccguggacgccgccaaccacugcggcaccaucgccaacggcgugcugcagaccuucaugagaauggccuggggcggcagcuacaucgcccuggacagcggcugcggcagcugggacugcaucaugaccagcuaccaguaccuggugauccagaacaccaccugggaggaccacugccaguucagcagacccagccccaucggcuaccugggccugcugagccagagaaccagagacaucuacaucagcagaagacgccggggcaccuucaccuggacccugagcgacagcgagggcaacgagacccccggcggcuacugccugaccagauggaugcugaucgaggccgagcugaagugcuucggcaacaccgccguggccaagugcaacgagaagcacgacgaggaguucugcgacaugcugagacuguucgacuucaacaagcaggccaucagaagacugaagacccccgcccagaugagcauccagcugaucaacaaggccgugaacgcccugaucaacgaccagcugaucaugaagaaccaccugagagacaucaugugcauccccuacugcaacuacagcaaguacugguaccugaaccacaccgugaccggcaagaccagccugcccagaugcuggcuggugagcaacggcagcuaccugaacgagacccacuucagcgacgacaucgagcagcaggccgacaacaugaucaccgagcugcugcagaaggaguacaucgacagacagggcaagaccccccugggccugguggaccuguucguguucagcaccagcuucuaccugaucagcaucuuccugcaccuggugaagauccccacccacagacacaucaccggcaagcccugccccaagccccacagacugaaccacaugggcaucugcagcugcggccuguacaagcaccccggcgugcccgugaaguggaagagaugaggacuagugcaucacauuuaaaagcaucucagccuaccaugagaauaagagaaagaaaaugaagaucaauagcuuauucaucucuuuuucuuuuucguugguguaaagccaacacccugucuaaaaaacauaaauuucuuuaaucauuuugccucuuuucucugugcuucaauuaauaaaaaauggaaagaaccuagaucuaaaaaaaaaaaaaaaaaaaaaaaaaaaaaaaaaaaaaaaaaaaaaaaaaaaaaaaaaaaaaaaaugcaucccccccccccccccccccccccccccccccaaaggcucuuuucagagccaccagaauu

SEQ ID NO: 7142 - RNA, 1855 nt, Artificial Sequence
  mRNA product Design i-2 comprising derived and/or modified sequence from LASV(Lassa virus/H.sapiens-wt/NGA/2016/ISTH_0009;Clade II)__AVO03571__GPCstabilized (opt4)
ggggcgcugccuacggagguggcagccaucuccuucucggcaucaagcuuaccaugggccagaucaucaccuucuuccaggaggugccccacgugaucgaggaggugaugaacaucgugcugaucgcccugagccugcuggccauccugaagggcaucuacaacguggccaccugcggccugcugggccuggugagcuuccugcugcugugcggcagaagcugcagcaccaccuacaagggcguguacgagcugcagacccuggagcuggacauggccagccugaacaugaccaugccccugagcugcaccaagaacaacagccaccacuacaucauggugggcaacgagaccggccuggagcugacccugaccaacaccagcaucaucaaccacaaguucugcaaccugagcgacgcccacaagaagaaccuguacgaccacgcccugaugagcaucaucagcaccuuccaccugagcauccccaacuucaaccaguacgaggccaugagcugcgacuucaacggcggcagaaucagcgugcaguacaaccugagccacagcuacgccguggacgccgccaaccacugcggcaccaucgccaacggcgugcugcagaccuucaugagaauggccuggggcggcagcuacaucgcccuggacagcggcugcggcagcugggacugcaucaugaccagcuaccaguaccugaucauccagaacaccaccugggaggaccacugccaguucagcagacccagccccaucggcuaccugggccugcugagccagagaaccagagacaucuacaucagcagaagacgccggggcaccuucaccuggacccugagcgacagcgagggcaacgagacccccggcggcuacugccugaccagauggaugcugaucgaggccgagcugaagugcuucggcaacaccgccguggccaagugcaacgagaagcacgacgaggaguucugcgacaugcugagacuguucgacuucaacaagcaggccaucagaagacugaagacccccgcccagaugagcauccagcugaucaacaaggccgugaacgcccugaucaacgaccagcugaucaugaagaaccaccugagagacaucaugugcauccccuacugcaacuacagcaaguacugguaccugaaccacaccgugaccggcaagaccagccugcccagaugcuggcuggugagcaacggcagcuaccugaacgagacccacuucagcgacgacaucgagcagcaggccgacaacaugaucaccgagcugcugcagaaggaguacaucgacagacagggcaagaccccccugggccugguggaccuguucguguucagcaccagcuucuaccugaucagcaucuuccugcaccuggugaagauccccacccacagacacaucaccggcaagcccugccccaagccccacagacugaaccacaugggcaucugcagcugcggccuguacaaccaccccggcgugcccgugaaguggaagagaugaggacuagugcaucacauuuaaaagcaucucagccuaccaugagaauaagagaaagaaaaugaagaucaauagcuuauucaucucuuuuucuuuuucguugguguaaagccaacacccugucuaaaaaacauaaauuucuuuaaucauuuugccucuuuucucugugcuucaauuaauaaaaaauggaaagaaccuagaucuaaaaaaaaaaaaaaaaaaaaaaaaaaaaaaaaaaaaaaaaaaaaaaaaaaaaaaaaaaaaaaaaugcaucccccccccccccccccccccccccccccccaaaggcucuuuucagagccaccagaauu

SEQ ID NO: 7143 - RNA, 1855 nt, Artificial Sequence
  mRNA product Design i-2 comprising derived and/or modified sequence from LASV(Lassa virus/H.sapiens-wt/NGA/2016/ISTH_0017;Clade II)__AVO03567__GPCstabilized (opt4)
ggggcgcugccuacggagguggcagccaucuccuucucggcaucaagcuuaccaugggccagaucaucaccuucuuccaggaggugccccacgugaucgaggaggugaugaacaucgugcugaucgcccugagccugcuggccauccugaagggcaucuacaacguggccaccugcggccuguucggccuggugagcuuccugcugcugugcggcagaagcugcagcaccaccuacaagggcguguacgagcugcagacccuggagcuggacauggccagccugaacaugaccaugccccugagcugcaccaagaacaacagccaccacuacaucauggugggcaacgagaccggccuggagcugacccugaccaacaccagcaucaucaaccacaaguucugcaaccugagcgacgcccacaagaagaaccuguacgaccacgcccugaugagcaucaucagcaccuuccaccugagcauccccaacuucaaccaguacgaggccaugagcugcgacuucaacggcggcaagaucagcgugcaguacaaccugagccacaccuacgccaucgacgccgccaaccacugcggcaccaucgccaacggcgugcugcagaccuucaugagaauggccuggggcggcagcuacaucgcccuggacagcggcugcggcagcugggacugcaucaugaccagcuaccaguaccugaucauccagaacaccaccugggaggaccacugccaguucagcagacccagccccaucggcuaccugggccugcugagccagagaaccagagacaucuacaucagcagaagacgccggggcaccuucaccuggacccugagcgacagcgagggcaacgagacccccggcggcuacugccugaccagauggaugcugaucgaggccgagcugaagugcuucggcaacaccgccguggccaagugcaacgagaagcacgacgaggaguucugcgacaugcugagacuguucgacuucaacaagcaggccaucagaagacugaagacccccgcccagaugagcauccagcugaucaacaaggccgugaacgcccugaucaacgaccagcugaucaugaagaaccaccugagagacaucaugugcauccccuacugcaacuacagcaaguacugguaccugaaccacaccgugaccggcaagaccagccugcccagaugcuggcuggugagcaacggcagcuaccugaacgagacccacuucagcgacgacaucgagcagcaggccgacaacaugaucaccgagcugcugcagaaggaguacauggacagacagggcaagaccccccugggccugguggaccuguucguguucagcaccagcuucuaccugaucagcaucuuccugcaccuggugagaauccccacccacagacacgugaucggcaagcccugccccaagccccacagacugaaccacaugggcaucugcagcugcggccuguacaagcaccccggcgugcccgugaaguggaagagaugaggacuagugcaucacauuuaaaagcaucucagccuaccaugagaauaagagaaagaaaaugaagaucaauagcuuauucaucucuuuuucuuuuucguugguguaaagccaacacccugucuaaaaaacauaaauuucuuuaaucauuuugccucuuuucucugugcuucaauuaauaaaaaauggaaagaaccuagaucuaaaaaaaaaaaaaaaaaaaaaaaaaaaaaaaaaaaaaaaaaaaaaaaaaaaaaaaaaaaaaaaaugcaucccccccccccccccccccccccccccccccaaaggcucuuuucagagccaccagaauu

SEQ ID NO: 7144 - RNA, 1855 nt, Artificial Sequence
  mRNA product Design i-2 comprising derived and/or modified sequence from LASV(Lassa virus/H.sapiens-wt/NGA/2018/ISTH_0959;Clade II)__AVV65099__GPCstabilized (opt4)
ggggcgcugccuacggagguggcagccaucuccuucucggcaucaagcuuaccaugggccagaucaucaccuucuuccaggaggugccccacgugaucgaggaggugaugaacaucgugcugaucgcccugagccugcuggccauccugaagggcaucuacaacguggugaccugcggccuguucggccuggugagcuuccugcugcugugcggcagaagcugcagcaccaccuacaagggcguguacgagcugcagacccuggagcuggacauggccagccugaacaugaccaugccccugagcugcaccaagaacaacagccaccacuacaucauggugggcaacgagaccggccuggagcugacccugaccaacaccagcaucaucaaccacaaguucugcaaccugagcgacgcccacaagaagaaccuguacgaccacgcccugaugagcaucaucagcaccuuccaccugagcauccccaacuucaaccaguacgaggccaugagcugcgacuucaacggcggcaagaucagcgugcaguacaaccugagccacgccuacgccaucgacgccgccaaccacugcggcaccaucgccaacggcgugcugcagaccuucaugagaauggccuggggcggcagcuacaucgcccuggacagcggcugcggcagcugggacugcaucaugaccagcuaccaguaccugaucauccagaacaccaccugggaggaccacugccaguucagcagacccagccccaucggcuaccugggccugcugagccagagaaccagagacaucuacaucagcagaagacgccggggcaccuucaccuggacccugagcgacagcgagggcaacgagacccccggcggcuacugccugaccagauggaugcugaucgaggccgagcugaagugcuucggcaacaccgccguggccaagugcaacgagaagcacgacgaggaguucugcgacaugcugagacuguucgacuucaacaagcaggccaucagaagacugaagacccccgcccagaugagcauccagcugaucaacaaggccgugaacgcccugaucaacgaccagcugaucaugaagaaccaccugagagacaucaugugcauccccuacugcaacuacagcaaguacugguaccugaaccacaccgugaccggcaagaccagccugcccagaugcuggcuggugagcaacggcagcuaccugaacgagacccacuucagcgacgacaucgagcagcaggccgacaacaugaucaccgagcugcugcagaaggaguacaucgacagacagggcaagaccccccugggccugguggaccuguucguguucagcaccagcuucuaccugaucagcaucuuccugcaccuggugaagauccccacccacagacacgugaucggcaagcccugccccaagccccacagacugaaccacaugggcaucugcagcugcggccuguacaagcaccccggcgugcccgugaaguggaagagaugaggacuagugcaucacauuuaaaagcaucucagccuaccaugagaauaagagaaagaaaaugaagaucaauagcuuauucaucucuuuuucuuuuucguugguguaaagccaacacccugucuaaaaaacauaaauuucuuuaaucauuuugccucuuuucucugugcuucaauuaauaaaaaauggaaagaaccuagaucuaaaaaaaaaaaaaaaaaaaaaaaaaaaaaaaaaaaaaaaaaaaaaaaaaaaaaaaaaaaaaaaaugcaucccccccccccccccccccccccccccccccaaaggcucuuuucagagccaccagaauu

SEQ ID NO: 7145 - RNA, 1855 nt, Artificial Sequence
  mRNA product Design i-2 comprising derived and/or modified sequence from LASV(LASV003-NIG-2008;Clade II)__AIT17580__GPCstabilized (opt4)
ggggcgcugccuacggagguggcagccaucuccuucucggcaucaagcuuaccaugggccagaucaucaccuucuuccaggaggugccccacgugaucgaggaggugaugaacaucgugcugaucgcccugagccugcuggccauccugaagggcaucuacaacguggccaccugcggccuguucggccuggugagcuuccugcugcugugcggcagaagcugcagcaccaccuacaagggcguguacgagcugcagacccuggagcuggacauggccagccugaacaugaccaugccccugagcugcaccaagaacaacagccaccacuacaucauggugggcaacgagaccggccuggagcugacccugaccaacaccagcaucaucaaccacaaguucugcaaccugagcgacgcccacaagaagaaccuguacgaccacgcccugaugagcaucaucagcaccuuccaccugagcauccccaacuucaaccaguacgaggccaugagcugcgacuucaacggcggcaagaucagcgugcaguacaaccugagccacaccuacgccguggacgccgccaaccacugcggcaccaucgccaacggcgugcugcagaccuucaugagaauggccuggggcggcagcuacaucgcccuggacagcggcugcggcagcugggacugcaucaugaccagcuaccaguaccugaucauccagaacaccaccugggaggaccacugccaguucagcagacccagccccaucggcuaccugggccugcugagccagagaaccagagacaucuacaucagcagaagacgccggggcaccuucaccuggacccugagcgacagcgagagcaacgagacccccggcggcuacugccugaccagauggaugcugaucgaggccgagcugaagugcuucggcaacaccgccguggccaagugcaacgagaagcacgacgaggaguucugcgacaugcugagacuguucgacuucaacaagcaggccaucagaagacugaaggcccccgcccagaugagcauccagcugaucaacaaggccgugaacgcccugaucaacgaccagcugaucaugaagaaccaccugagagacaucaugugcauccccuacugcaacuacagcaaguacugguaccugaaccacaccgugaccggcagaaccagccugcccagaugcuggcuggugagcaacggcagcuaccugaacgagacccacuucagcgacgacaucgagcagcaggccgacaacaugaucaccgagcugcugcagaaggaguacauggacagacagggcaagaccccccugggccugguggaccuguucguguucagcaccagcuucuaccugaucagcaucuuccugcaccuggugaagauccccacccacagacacgugaucggcaagcccugccccaagccccacagacugaaccacaugggcaucugcagcugcggccuguacaagcaccccggcgugcccgugaaguggaagagaugaggacuagugcaucacauuuaaaagcaucucagccuaccaugagaauaagagaaagaaaaugaagaucaauagcuuauucaucucuuuuucuuuuucguugguguaaagccaacacccugucuaaaaaacauaaauuucuuuaaucauuuugccucuuuucucugugcuucaauuaauaaaaaauggaaagaaccuagaucuaaaaaaaaaaaaaaaaaaaaaaaaaaaaaaaaaaaaaaaaaaaaaaaaaaaaaaaaaaaaaaaaugcaucccccccccccccccccccccccccccccccaaaggcucuuuucagagccaccagaauu

SEQ ID NO: 7146 - RNA, 1855 nt, Artificial Sequence
  mRNA product Design i-2 comprising derived and/or modified sequence from LASV(LASV035-NIG-2009;Clade II)__AIT17588__GPCstabilized (opt4)
ggggcgcugccuacggagguggcagccaucuccuucucggcaucaagcuuaccaugggccagaucaucaccuucuuccaggaggugccccacgugaucgaggaggugaugaacaucgugcugaucgcccugagccugcuggccauccugaagggcaucuacaacguggccaccugcggccuguucggccuggugagcuuccugcugcugugcggcagaagcugcagcaccaccuacaagggcguguacgagcugcagacccuggagcuggacauggccagccugaacaugaccaugccccugagcugcaccaagaacaacagccaccacuacaucauggugggcaacgagaccggccuggagcugacccugaccaacaccagcaucaucaaccacaaguucugcaaccugagcgacgcccacaagaagaaccuguacgaccacgcccugaugagcaucaucagcaccuuccaccugagcauccccaacuucaaccaguacgaggccaugagcugcgacuucaacggcggcaagaucagcgugcaguacaaccugagccacgccuacgccguggacgccgccaaccacugcggcaccaucgccaacggcgugcugcagaccuucaugagaauggccuggggcggcagcuacaucgcccuggacagcggcugcggcagcugggacugcaucaugaccagcuaccaguaccugaucauccagaacaccaccugggaggaccacugccaguucagcagacccagccccaucggcuaccugggccugcugagccagagaaccagagacaucuacaucagcagaagacgccggggcaccuucaccuggacccugagcgacagcgagggcaacgagacccccggcggcuacugccugaccagauggaugcugaucgaggccgagcugaagugcuucggcaacaccgccguggccaagugcaacgagaagcacgacgaggaguucugcgacaugcugagacuguucgacuucaacaagcaggccaucagaagacugaaggcccccgcccagaugagcauccagcugaucaacaaggccgugaacgcccugaucaacgaccagcugaucaugaagaaccaccugagagacaucaugugcauccccuacugcaacuacagcaaguacugguaccugaaccacaccgugaccggcaagaccagccugcccagaugcuggcuggugagcaacggcagcuaccugaacgagacccacuucagcgacgacaucgagcagcaggccgacaacaugaucaccgagcugcugcagaaggaguacaucgacagacagggcaagaccccccugggccugguggaccuguucguguucagcaccagcuucuaccugaucagcaucuuccugcaccuggugaagauccccacccacagacacgugaucggcaagcccugccccaagccccacagacugaaccacaugggcaucugcagcugcggccuguacaagcaccccggcgugcccgugaaguggaagagaugaggacuagugcaucacauuuaaaagcaucucagccuaccaugagaauaagagaaagaaaaugaagaucaauagcuuauucaucucuuuuucuuuuucguugguguaaagccaacacccugucuaaaaaacauaaauuucuuuaaucauuuugccucuuuucucugugcuucaauuaauaaaaaauggaaagaaccuagaucuaaaaaaaaaaaaaaaaaaaaaaaaaaaaaaaaaaaaaaaaaaaaaaaaaaaaaaaaaaaaaaaaugcaucccccccccccccccccccccccccccccccaaaggcucuuuucagagccaccagaauu

SEQ ID NO: 7147 - RNA, 1855 nt, Artificial Sequence
  mRNA product Design i-2 comprising derived and/or modified sequence from LASV(LASV1000-NIG-2009;Clade II)__AIT17782__GPCstabilized (opt4)
ggggcgcugccuacggagguggcagccaucuccuucucggcaucaagcuuaccaugggccagaucaucaccuucuuccaggaggugccccacgugaucgaggaggugaugaacaucgugcugaucgcccugagccugcuggccauccugaagggcaucuacaacguggccaccugcggccuguucggccuggugagcuuccugcugcugugcggcagaagcugcagcaccaccuacaagggcguguacgagcugcagacccuggagcuggacauggccagccugaacaugaccaugccccugagcugcaccaagaacaacagccaccacuacaucauggugggcaacgagaccggccuggagcugacccugaccaacaccagcaucaucaaccacaaguucugcaaccugagcgacgcccacaagaagaaccuguacgaccacgcccugaugagcaucaucagcaccuuccaccugagcauccccaacuucaaccaguacgaggccaugagcugcgacuucaacggcggcaagaucagcgugcaguacaaccugagccacaccuacgccguggacgccgccaaccacugcggcaccaucgccaacggcgugcugcagaccuucaugagaauggccuggggcggcagcuacaucgcccuggacagcggcugcggcagcugggacugcaucaugaccagcuaccaguaccugaucauccagaacaccaccugggaggaccacugccaguucagcagacccagccccaucggcuaccugggccugcugagccagagaaccagagacaucuacaucagcagaagacgccggggcaccuucaccuggacccugagcgacagcgagggcaacgagacccccggcggcuacugccugaccagauggaugcugaucgaggccgagcugaagugcuucggcaacaccgccguggccaagugcaacgagaagcacgacgaggaguucugcgacaugcugagacuguucgacuucaacaagcaggccaucaagagacugaagacccccgcccagaugagcauccagcugaucaacaaggccgugaacgcccugaucaacgaccagcugaucaugaagaaccaccugagagacaucaugugcauccccuacugcaacuacagcaaguacugguaccugaaccacaccgugaccggcaagaccagccugcccagaugcuggcuggugagcaacggcagcuaccugaacgagacccacuucagcgacgacaucgagcagcaggccgacaacaugaucaccgagcugcugcagaaggaguacaucgacagacagggcaagaccccccugggccugguggaccuguucguguucagcaccagcuucuaccugaucagcaucuuccugcaccuggugaagauccccacccacagacacguggugggcaagcccugccccaagccccacagacugaaccacaugggcaucugcagcugcggccuguacaagcaccccggcgugcccgugaaguggaagagaugaggacuagugcaucacauuuaaaagcaucucagccuaccaugagaauaagagaaagaaaaugaagaucaauagcuuauucaucucuuuuucuuuuucguugguguaaagccaacacccugucuaaaaaacauaaauuucuuuaaucauuuugccucuuuucucugugcuucaauuaauaaaaaauggaaagaaccuagaucuaaaaaaaaaaaaaaaaaaaaaaaaaaaaaaaaaaaaaaaaaaaaaaaaaaaaaaaaaaaaaaaaugcaucccccccccccccccccccccccccccccccaaaggcucuuuucagagccaccagaauu

SEQ ID NO: 7148 - RNA, 1855 nt, Artificial Sequence
  mRNA product Design i-2 comprising derived and/or modified sequence from LASV(LASV221-NIG-2010;Clade II)__AIT17624__GPCstabilized (opt4)
ggggcgcugccuacggagguggcagccaucuccuucucggcaucaagcuuaccaugggccagaucaucaccuucuuccaggaggugccccacgugaucgaggaggugaugaacaucgugcugaucgcccugagccugcuggccauccugaagggcaucuacaacguggccaccugcggccuguucggccuggugagcuuccugcugcugugcggcagaagcugcagcaccaccuacaagggcguguacgagcugcagacccuggagcuggacauggccagccugaacaugaccaugccccugagcugcaccaagaacaacagccaccacuacaucauggugggcaacgagaccggccuggagcugacccugaccaacaccagcaucaucaaccacaaguucugcaaccugagcgacgcccacaagaagaaccuguacgaccacgcccugaugagcaucaucagcaccuuccaccugagcauccccaacuucaaccaguacgaggccaugagcugcgacuucaacggcggcaagaucagcgugcaguacaaccugagccacaccuacgccaucgacgccgccaaccacugcggcaccaucgccaacggcgugcugcagaccuucaugagaauggccuggggcggcagcuacaucgcccuggacagcggcugcggcagcugggacugcaucaugaccagcuaccaguaccugaucauccagaacaccaccugggaggaccacugccaguucagcagacccagccccaucggcuaccugggccugcugagccagagaaccagagacaucuacaucagcagaagacgccggggcaccuucaccuggacccugagcgacagcgagggcaacgagacccccggcggcuacugccugaccagauggaugcugaucgaggccgagcugaagugcuucggcaacaccgccguggccaagugcaacgagaagcacgacgaggaguucugcgacaugcugagacuguucgacuucaacaagcaggccaucagaagacugaagacccccgcccagaugagcauccagcugaucaacaaggccgugaacgcccugaucaacgaccagcugaucaugaagaaccaccugagagacaucaugugcauccccuacugcaacuacagcaaguacugguaccugaaccacaccgugaccggcaagaccagccugcccagaugcuggcuggugagcaacggcagcuaccugaacgagacccacuucagcgacgacaucgagcagcaggccgacaacaugaucaccgagaugcugcagaaggaguacauggacagacagggcaagaccccccugggccugguggaccuguucguguucagcaccagcuucuaccugaucagcaucuuccugcaccuggugaagauccccacccacagacacgugaucggcaagcccugccccaagccccacagacugaaccacaugggcaucugcagcugcggccuguacaagcaccccggcgugcccgugaaguggaagagaugaggacuagugcaucacauuuaaaagcaucucagccuaccaugagaauaagagaaagaaaaugaagaucaauagcuuauucaucucuuuuucuuuuucguugguguaaagccaacacccugucuaaaaaacauaaauuucuuuaaucauuuugccucuuuucucugugcuucaauuaauaaaaaauggaaagaaccuagaucuaaaaaaaaaaaaaaaaaaaaaaaaaaaaaaaaaaaaaaaaaaaaaaaaaaaaaaaaaaaaaaaaugcaucccccccccccccccccccccccccccccccaaaggcucuuuucagagccaccagaauu

SEQ ID NO: 7149 - RNA, 1855 nt, Artificial Sequence
  mRNA product Design i-2 comprising derived and/or modified sequence from LASV(LASV237-NIG-2010;Clade II)__AIT17638__GPCstabilized (opt4)
ggggcgcugccuacggagguggcagccaucuccuucucggcaucaagcuuaccaugggccagaucaucaccuucuuccaggaggugccccacgugaucgaggaggugaugaacaucgugcugaucgcccugagccugcuggccauccugaagggcaucuacaacguggccaccugcggccuguucggccuggugagcuuccugcugcugugcggcagaagcugcagcaccaccuacaagggcguguacgagcugcagacccuggagcuggacauggccagccugaacaugaccaugccccugagcugcaccaagaacaacagccaccacuacaucauggugggcaacgagaccggccuggagcugacccugaccaacaccagcaucaucaaccacaaguucugcaaccugagcgacgcccacaagaaggaccuguacgaccacgcccugaugagcaucaucagcaccuuccaccugagcauccccaacuucaaccaguacgaggccaugagcugcgacuucaacggcggcaagaucagcgugcaguacaaccugagccacaccuacgccguggacgccgccaaccacugcggcaccaucgccaacggcgugcugcagaccuucaugagaauggccuggggcggcagcuacaucgcccuggacagcggcugcggcagcugggacugcaucaugaccagcuaccaguaccugaucauccagaacaccaccugggaggaccacugccaguucagcagacccagccccaucggcuaccugggccugcugagccagagaaccagagacaucuacaucagcagaagacgccggggcaccuucaccuggacccugagcgacagcgagggcaacgagacccccggcggcuacugccugaccagauggaugcugaucgaggccgagcugaagugcuucggcaacaccgccguggccaagugcaacgagaagcacgacgaggaguucugcgacaugcugagacuguucgacuucaacaagcaggccaucagaagacugaagacccccgcccagaugagcauccagcugaucaacaaggccgugaacgcccugaucaacgaccagcugaucaugaagaaccaccugagagacaucaugugcauccccuacugcaacuacagcaaguacugguaccugaaccacaccgugaccggcaagaccagccugcccagaugcuggcuggugagcaacggcagcuaccugaacgagacccacuucagcgacgacaucgagcagcaggccgacaacaugaucaccgagcugcugcagaaggaguacauggacagacagggcaagaccccccugggccugguggaccuguucguguucagcaccagcuucuaccugaucagcaucuuccugcaccugaucaagauccccacccacagacacaucaccggcaagcccugccccaagccccacagacugaaccacaugggcaucugcagcugcggccuguacaagcaccccggcgugcccgugaaguggaagagaugaggacuagugcaucacauuuaaaagcaucucagccuaccaugagaauaagagaaagaaaaugaagaucaauagcuuauucaucucuuuuucuuuuucguugguguaaagccaacacccugucuaaaaaacauaaauuucuuuaaucauuuugccucuuuucucugugcuucaauuaauaaaaaauggaaagaaccuagaucuaaaaaaaaaaaaaaaaaaaaaaaaaaaaaaaaaaaaaaaaaaaaaaaaaaaaaaaaaaaaaaaaugcaucccccccccccccccccccccccccccccccaaaggcucuuuucagagccaccagaauu

SEQ ID NO: 7150 - RNA, 1855 nt, Artificial Sequence
  mRNA product Design i-2 comprising derived and/or modified sequence from LASV(LASV253-NIG-2011;Clade II)__AIT17670__GPCstabilized (opt4)
ggggcgcugccuacggagguggcagccaucuccuucucggcaucaagcuuaccaugggccagaucaucaccuucuuccaggaggugccccacgugaucgaggaggugaugaacaucgugcugaucgcccugagccugcuggccauccugaagggcaucuacaacguggccaccugcggccuguucggccuggugagcuuccugcugcugugcggcagaagcugcagcaccaccuacaagggcguguacgagcugcagacccuggagcuggacauggccagccugaacaugaccaugccccugagcugcaccaagaacaacagccaccacuacaucauggugggcaacgagaccggccuggagcugacccugaccaacaccagcaucaucaaccacaaguucugcaaccugagcgacgcccacaagaagaaccuguacgaccacgcccugaugagcaucaucagcaccuuccaccugagcauccccaacuucaaccaguacgaggccaugagcugcgacuucaacggcggcaagaucagcgugcaguacaaccugagccacaccuacgccguggacgccgccaaccacugcggcaccaucgccaacggcgugcugcagaccuucaugagaauggccuggggcggcagcuacaucgcccuggacagcggcugcggcagcugggacugcaucaugaccagcuaccaguaccugaucauccagaacaccaccugggaggaccacugccaguucagcagacccagccccaucggcuaccugggccugcugagccagagaaccagagacaucuacaucagcagaagacgccggggcaccuucaccuggacccugagcgacagcgagggcaacgagacccccggcggcuacugccugaccagauggaugcugaucgaggccgagcugaagugcuucggcaacaccgccguggccaagugcaacgagaagcacgacgaggaguucugcgacaugcugagacuguucgacuucaacaagcaggccaucagaagacugaaggcccccgcccagaugagcauccagcugaucaacaaggccgugaacgcccugaucaacgaccagcugaucaugaagaaccaccugagagacaucaugugcauccccuacugcaacuacagcaaguacugguaccugaaccacaccgugaccggcagaaccagccugcccagaugcuggcuggugagcaacggcagcuaccugaacgagacccacuucagcgacgacaucgagcagcaggccgacaacaugaucaccgagcugcugcagaaggaguacaucgacagacagggcaagaccccccugggccugguggaccuguucguguucagcaccagcuucuaccugaucagcaucuuccugcaccuggugaagauccccacccacagacacaucaucggcaagcccugccccaagccccacagacugaaccacaugggcaucugcagcugcggccuguacaagcaccccggcgugcccgugaaguggaagagaugaggacuagugcaucacauuuaaaagcaucucagccuaccaugagaauaagagaaagaaaaugaagaucaauagcuuauucaucucuuuuucuuuuucguugguguaaagccaacacccugucuaaaaaacauaaauuucuuuaaucauuuugccucuuuucucugugcuucaauuaauaaaaaauggaaagaaccuagaucuaaaaaaaaaaaaaaaaaaaaaaaaaaaaaaaaaaaaaaaaaaaaaaaaaaaaaaaaaaaaaaaaugcaucccccccccccccccccccccccccccccccaaaggcucuuuucagagccaccagaauu

SEQ ID NO: 7151 - RNA, 1855 nt, Artificial Sequence
  mRNA product Design i-2 comprising derived and/or modified sequence from LASV(LASV254-NIG-2011;Clade II)__AIT17674__GPCstabilized (opt4)
ggggcgcugccuacggagguggcagccaucuccuucucggcaucaagcuuaccaugggccagaucaucaccuucuuccaggaggugccccacgugaucgaggaggugaugaacaucgugcugaucgcccugagccugcuggccauccugaagggcaucuacaacguggccaccugcggccuguucggccuggugagcuuccugcugcugugcggcagaagcugcagcaccaccuacaagggcguguacgagcugcagacccuggagcuggacaugaccaaccugaacaugaccaugccccugagcugcaccaagaacaacagccaccacuacaucauggugggcaacgagaccggccuggagcugacccugaccaacaccagcaucaucaaccacaaguucugcaaccugagcgacgcccacaagaagaaccuguacaaccacgcccugaugagcaucaucagcaccuuccaccugagcauccccaacuucaaccaguacgaggccaugagcugcgacuucaacggcggcaagaucagcgugcaguacaaccugagccacagcuacgccguggacgccgccaaccacugcggcaccaucgccaacggcgugcugcagaccuucaugagaauggccuggggcggcagcuacaucgcccuggacagcggcugcggcaacugggacugcaucaugaccagcuaccaguaccugaucauccagaacaccaccugggaggaccacugccaguucagcagacccagccccaucggcuaccugggccugcugagccagagaaccagagacaucuacaucagcagaagacgccggggcaccuucaccuggacccugagcgacagcgagggcaacgagacccccggcggcuacugccugaccagauggaugcugaucgaggccgagcugaagugcuucggcaacaccgccguggccaagugcaacgagaagcacgacgaggaguucugcgacaugcugagacuguucgacuucaacaagcaggccaucagaagacugaagacccccgcccaggccaacauccagcugaucaacaaggccgugaacgcccugaucaacgaccagcugaucaugaagaaccaccugagagacaucaugugcauccccuacugcaacuacagcaaguacugguaccugaaccacaccgugaccggcaagaccagccugcccagaugcuggcuggugagcaacggcagcuaccugaacgagacccacuucagcgacgacaucgagcagcaggccgacaacaugaucaccgagcugcugcagaaggaguacauggacagacagggcaagaccccccugggccugguggaccuguucguguucagcaccagcuucuaccugaucagcaucuuccugcaccuggugaagauccccacccacagacacgugaucggcaagcccugccccaagccccacagacugaaccacaugggcaucugcagcugcggccuguacaagcaccccggcgugcccgugaaguggaagagaugaggacuagugcaucacauuuaaaagcaucucagccuaccaugagaauaagagaaagaaaaugaagaucaauagcuuauucaucucuuuuucuuuuucguugguguaaagccaacacccugucuaaaaaacauaaauuucuuuaaucauuuugccucuuuucucugugcuucaauuaauaaaaaauggaaagaaccuagaucuaaaaaaaaaaaaaaaaaaaaaaaaaaaaaaaaaaaaaaaaaaaaaaaaaaaaaaaaaaaaaaaaugcaucccccccccccccccccccccccccccccccaaaggcucuuuucagagccaccagaauu

SEQ ID NO: 7152 - RNA, 1855 nt, Artificial Sequence
  mRNA product Design i-2 comprising derived and/or modified sequence from LASV(Nig08-A19;Clade III)__ADU56618__GPCstabilized (opt4)
ggggcgcugccuacggagguggcagccaucuccuucucggcaucaagcuuaccaugggccagaucgugaccuucuuccaggaggugccccacgugaucgaggaggugaugaacaucgugcugaucgcccugagcauccuggccauccugaagggccuguacaacaucgccaccugcggccugaucggccuggugaccuuccugcugcugagcggcagaagcugcagcaugaccuacaagggcguguacgagcugcagacccuggagcugaacaugaacacccugaacaugaccaugccccugagcugcaccaagaacaacagccaccacuacaucauggugggcaacgagaccggccuggagcugacccugaccaacaccagccugcugcaccacaaguucugcaaccugagcgacgcccacaagaagaaccuguacgaccacacccugaugagcaucaucagcaccuuccaccugagcauccccaacuucaaccaguacgaggccaugagcugcgacuucaacggcggcaagaucaccgugcaguacaaccugagccacagcuacgccaucgacgccgccaaccacugcggcaccguggccaacggcgugcugcagaccuucaugagaauggccuggggcggcagcuacaucgcccuggacagcggcugcggcaagugggacugcaucaugaccagcuaccaguaccugaucauccagaacaccaccugggaggaccacugccaguucagcagacccagccccaucggcuaccugggccugcugagccagagaaccagagacaucuacaucagcagaagacgccggggcaccuucaccuggacccugagcgacagcgagggcaacgagacccccggcggcuacugccugaccagauggaugcugaucgaggccgagcugaagugcuucggcaacaccgccguggccaagugcaacgagaagcacgacgaggaguucugcgacaugcugagacuguucgacuucaacaagcaggccaucagaagacugaaggcccccgcccagaugagcauccagcugaucaacaaggccgugaacgcccugaucaacgaccagcugaucaugaagaaccaccugagagacaucaugugcauccccuacugcaacuacagcaaguacugguaccugaaccacaccagcaccggcagaaccagccugcccagaugcuggcuggugagcaacggcagcuaccugaacgagacccacuucagcgacgacaucgagcagcaggccgacaacaugaucaccgagaugcugcagaaggaguaccuggacagacagggcaagaccccccugggccugguggaccuguucguguucagcaccagcuucuaccugaucagcaucuuccugcaccuggugaagauccccacccacagacacaucgugggcaagcccugccccaagccccacagacugaaccacaugggcaucugcagcugcggccuguacaagcagcccggcgugcccgugagauggaagagaugaggacuagugcaucacauuuaaaagcaucucagccuaccaugagaauaagagaaagaaaaugaagaucaauagcuuauucaucucuuuuucuuuuucguugguguaaagccaacacccugucuaaaaaacauaaauuucuuuaaucauuuugccucuuuucucugugcuucaauuaauaaaaaauggaaagaaccuagaucuaaaaaaaaaaaaaaaaaaaaaaaaaaaaaaaaaaaaaaaaaaaaaaaaaaaaaaaaaaaaaaaaugcaucccccccccccccccccccccccccccccccaaaggcucuuuucagagccaccagaauu

SEQ ID NO: 7153 - RNA, 1858 nt, Artificial Sequence
  mRNA product Design i-2 comprising derived and/or modified sequence from LASV(G1180-SLE-2010;Clade IV)__AIT17168__GPCstabilized (opt4)
ggggcgcugccuacggagguggcagccaucuccuucucggcaucaagcuuaccaugggccagaucgugaccuucuuccaggaggugccccacgugaucgaggaggugaugaacaucgugcugaucgcccugagcauccuggccgugcugaagggccuguacaacuucgccaccugcggccuggugggccugcugaccuuccugcugcugugcggcagaagcugcaccgccagcagauacaagggcguguacgagcugcagacccuggagcugaacauggagacccugaacaugaccaugccccugagcugcaccaagaacaacagccaccacuacaucauggugggcaacgagaccggccuggagcugacccugaccaacaccagcaucaucaaccacaaguucugcaaccugagcgacgcccacaagaagaaccuguacgaccacgcccugaugagcaucaucagcaccuuccaccugagcauccccaacuucaaccaguacgaggccaugagcugcgacuucaacggcggcaagaucagcgugcaguacaaccugagccacagcuacgccggcgacgccgccaaccacugcggcaccguggccaacggcgugcugcagaccuucaugagaauggccuggggcggcagcuacaucgcccuggacagcggcugcggcagcugggacugcaucaugaccagcuaccaguaccugaucauccagaacaccaccugggaggaccacugccaguucagcagacccagccccaucggcuaccugggccugcugagccagagaaccagagacaucuacaucagcagaagacgccggggcaccuucaccuggacccugagcgacagcgagggcaaggacacccccggcggcuacugccugaccagauggaugcugaucgaggccgagcugaagugcuucggcaacaccgccguggccaagugcaacgagaagcacgacgaggaguucugcgacaugcugagacuguucgacuucaacaagcaggccauccagagacugaaggcccccgcccagaugagcauccagcugaucaacaaggccgugaacgcccugaucaacgaccagcugaucaugaagaaccaccugagagacaucaugugcauccccuacugcaacuacagcaaguacugguaccugaaccacaccaccaccggcaagaccagccugcccaagugcuggcuggugagcaacggcagcuaccugaacgagacccacuucagcgacgacaucgagcagcaggccgacaacaugaucaccgagaugcugcagaaggaguacauggagagacagggcaagaccccccugggccugguggaccuguucguguucagcaccagcuucuaccugaucagcaucuuccugcaccuggugaagauccccacccacagacacaucgugggcaagagcugccccaagccccacagacugaaccacaugggcaucugcagcugcggccuguacaagcagcccggcgugcccgugaaguggaagagaugaggacuagugcaucacauuuaaaagcaucucagccuaccaugagaauaagagaaagaaaaugaagaucaauagcuuauucaucucuuuuucuuuuucguugguguaaagccaacacccugucuaaaaaacauaaauuucuuuaaucauuuugccucuuuucucugugcuucaauuaauaaaaaauggaaagaaccuagaucuaaaaaaaaaaaaaaaaaaaaaaaaaaaaaaaaaaaaaaaaaaaaaaaaaaaaaaaaaaaaaaaaugcaucccccccccccccccccccccccccccccccaaaggcucuuuucagagccaccagaauu

SEQ ID NO: 7154 - RNA, 1858 nt, Artificial Sequence
  mRNA product Design i-2 comprising derived and/or modified sequence from LASV(G1442-SLE-2011;Clade IV)__AIT17180__GPCstabilized (opt4)
ggggcgcugccuacggagguggcagccaucuccuucucggcaucaagcuuaccaugggccagaucgugaccuucuuccaggaggugccccacgugaucgaggaggugaugaacaucgugcugaucgcccugagcauccuggccgugcugaagggccuguacaacguggccaccugcggccugaucggccuggugaccuuccugcugcugugcggcagaagcugcaccaccacccuguacaagggcguguacgagcugcagacccuggagcugaacauggagacccugaacaugaccaugccccugagcugcaccaagaacaacagccaccacuacaucagagugggcaacgagaccggccuggagcugacccugaccaacaccagcaucaucaaccacaaguucugcaaccugagcgacgcccacaagaagaaccuguacgaccacgcccugaugagcaucaucagcaccuuccaccugagcauccccaacuucaaccaguacgaggccaugagcugcgacuucaacggcggcaagaucagcgugcaguacaaccugagccacagcuacgccggcgacgccgccaaccacugcggcaccguggccaacggcgugcugcagaccuucaugagaauggccuggggcggcagcuacaucgcccuggacagcggcugcggcaacugggacugcaucaugaccagcuaccaguaccugaucauccagaacaccaccugggacgaccacugccaguucagcagacccagccccaucggcuaccugggccugcugagccagagaaccagagacguguacaucagcagaagacgccggggcaccuucaccuggacccugagcgacagcgagggcaaggacacccccggcggcuacugccugaccagauggaugcugaucgaggccgagcugaagugcuucggcaacaccgccguggccaagugcaacgagaagcacgacgaggaguucugcgacaugcugagacuguucgacuucaacaagcaggccauccagagacugaaggcccccgcccagaugagcauccagcugaucaacaaggccgugaacgcccugaucaacgaccagcugaucaugaagaaccaccugagagacaucaugugcauccccuacugcaacuacagcaaguacugguaccugaacaacaccgccaccggcaagaccagccugcccaagugcuggcugaucagcaacggcagcuaccugaacgagacccacuucagcgacgacaucgagcaggaggccgacaacaugaucaccgagaugcugcagaaggaguacauggagagacagggcaagaccccccugggccugguggaccuguucguguucagcaccagcuucuaccugaucagcaucuuccugcaccuggugaagauccccacccacagacacaucgugggcaagagcugccccaagccccacagacugaaccacaugggcaucugcagcugcggccuguacaagcagcccggcgugcccgugagauggaagagaugaggacuagugcaucacauuuaaaagcaucucagccuaccaugagaauaagagaaagaaaaugaagaucaauagcuuauucaucucuuuuucuuuuucguugguguaaagccaacacccugucuaaaaaacauaaauuucuuuaaucauuuugccucuuuucucugugcuucaauuaauaaaaaauggaaagaaccuagaucuaaaaaaaaaaaaaaaaaaaaaaaaaaaaaaaaaaaaaaaaaaaaaaaaaaaaaaaaaaaaaaaaugcaucccccccccccccccccccccccccccccccaaaggcucuuuucagagccaccagaauu

SEQ ID NO: 7155 - RNA, 1858 nt, Artificial Sequence
  mRNA product Design i-2 comprising derived and/or modified sequence from LASV(G3010-SLE-2013;Clade IV)__AIT17344__GPCstabilized (opt4)
ggggcgcugccuacggagguggcagccaucuccuucucggcaucaagcuuaccaugggccagaucgugaccuucuuccaggaggugccccacgugaucgaggaggugaugaacaucgugcugaucgcccugagcauccuggccgugcugaagggccuguacaacuucgccaccugcggccuggugggccuggugaccuuccugcugcugugcggcagaagcugcaccaccagccuguacaagggcguguacgagcugcagacccuggagcugaacauggagacccugaacaugaccaugccccugagcugcaccaagaacaacagccaccacuacaucauggugggcaacgagaccggccuggagcugacccugaccaacaccagcaucaucaaccacaaguucugcaaccugagcgacgcccacaagaagaaccuguacaaccacgcccugaugagcaucaucagcaccuuccaccugagcauccccaacuucaaccaguacgaggccaugagcugcgacuucaacggcggcaagaucagcgugcaguacaaccugagccacagcuacgccggcgacgccgccagccacugcggcaccguggccaacggcgugcugcagaccuucaugagaauggccuggggcggcagcuacaucgcccuggacagcggcugcggcaagugggacugcaucaugaccagcuaccaguaccugaucauccagaacaccaccugggaggaccacugccaguucagcagacccagccccaucggcuaccugggccugcugagccagagaaccagagacaucuacaucagcagaagacgccggggcaccuucaccuggacccugagcgacagcgagggcaaggacacccccggcggcuacugccugaccagauggaugcugaucgaggccgagcugaagugcuucggcaacaccgccguggccaagugcaacgagaagcacgacgaggaguucugcgacaugcugagacuguucgacuucaacaagcaggccauccagagacugaagacccccgcccagaugagcauccagcugaucaacaaggccgugaacgcccugaucaacgaccagcugaucaugaagaaccaccugagagacaucaugugcauccccuacugcaacuacagcaaguacugguaccugaaccacaccaccaccggcaagaccagccugcccaagugcuggcuggugagcaacggcagcuaccugaacgagacccacuucagcgacgacaucgagcagcaggccgacaacaugaucaccgagaugcugcagaaggaguacauggagagacagggcaagaccccccugggccugguggaccuguucguguucagcaccagcuucuaccugaucagcaucuuccugcaccuggugaagauccccacccacagacacaucgugggcaagagcugccccaagccccacagacugaaccacaugggcaucugcagcugcggccuguacaagcagcccggcgugcccgugagauggaagagaugaggacuagugcaucacauuuaaaagcaucucagccuaccaugagaauaagagaaagaaaaugaagaucaauagcuuauucaucucuuuuucuuuuucguugguguaaagccaacacccugucuaaaaaacauaaauuucuuuaaucauuuugccucuuuucucugugcuucaauuaauaaaaaauggaaagaaccuagaucuaaaaaaaaaaaaaaaaaaaaaaaaaaaaaaaaaaaaaaaaaaaaaaaaaaaaaaaaaaaaaaaaugcaucccccccccccccccccccccccccccccccaaaggcucuuuucagagccaccagaauu

SEQ ID NO: 7156 - RNA, 1858 nt, Artificial Sequence
  mRNA product Design i-2 comprising derived and/or modified sequence from LASV(G502-SLE-2009;Clade IV)__AIT17126__GPCstabilized (opt4)
ggggcgcugccuacggagguggcagccaucuccuucucggcaucaagcuuaccaugggccagaucgugaccuucuuccaggaggugccccacgugaucgaggaggugaugaacaucgugcugaucgcccugagcauccuggccgugcugaagggccuguacaacuucgccaccugcggccuggugggccugcugaccuuccugcugcugugcggcagaagcugcaccaccggccuguacaagggcguguacgagcugcagacccuggagcugaacauggagacccugaacaugaccaugccccugagcugcaccaagaacaacagccaccacuacaucauggugggcaacgagaccggccuggagcugacccugaccaacaccagcaucaucaaccacaaguucugcaaccugagcgacgcccacaagaagaaccuguacgaccacgcccugaugagcaucaucagcaccuuccaccugagcauccccaacuucaaccaguacgaggccaugagcugcgacuucaacggcggcaagaucagcgugcaguacaaccugagccacagcuacgccggcgacgccgccgaccacugcggcaccguggccaacggcgugcugcagaccuucaugagaauggccuggggcggcagcuacaucgcccuggacagcggcugcggcagaugggacugcaucaugaccagcuaccaguaccugaucauccagaacaccaccugggaggaccacugccaguucagcagacccagccccaucggcuaccugggccugcugagccagagaaccagagacaucuacaucagcagaagacgccggggcaccuucaccuggacccugagcgacagcgagggcaaggacacccccggcggcuacugccugaccagauggaugcugaucgaggccgagcugaagugcuucggcaacaccgccguggccaagugcaacgagaagcacgacgaggaguucugcgacaugcugagacuguucgacuucaacaagcaggccauccagagacugaaggcccccgcccagaugagcauccagcugaucaacaaggccgugaacgcccugaucaacgaccagcuggugaugaagaaccaccugagagacaucaugugcauccccuacugcaacuacagcagauacugguaccugaaccacaccaccaccggcagaaccagccugcccaagugcuggcuggugagcaacggcagcuaccugaacgagacccacuucagcgacgacaucgagcagcaggccgacaacaugaucaccgagaugcugcagaaggaguacauggagagacagggcaagaccccccugggccugguggaccuguucguguucagcaccagcuucuaccugaucagcaucuuccugcaccuggugaagauccccacccacagacacaucgugggcaagagcugccccaagccccacagacugaaccacaugggcaucugcagcugcggccuguacaagcagcccggcgugcccgugaaguggaagagaugaggacuagugcaucacauuuaaaagcaucucagccuaccaugagaauaagagaaagaaaaugaagaucaauagcuuauucaucucuuuuucuuuuucguugguguaaagccaacacccugucuaaaaaacauaaauuucuuuaaucauuuugccucuuuucucugugcuucaauuaauaaaaaauggaaagaaccuagaucuaaaaaaaaaaaaaaaaaaaaaaaaaaaaaaaaaaaaaaaaaaaaaaaaaaaaaaaaaaaaaaaaugcaucccccccccccccccccccccccccccccccaaaggcucuuuucagagccaccagaauu

SEQ ID NO: 7157 - RNA, 1858 nt, Artificial Sequence
  mRNA product Design i-2 comprising derived and/or modified sequence from LASV(G733-SLE-2010;Clade IV)__AIT17154__GPCstabilized (opt4)
ggggcgcugccuacggagguggcagccaucuccuucucggcaucaagcuuaccaugggccagaucgugaccuucuuccaggaggugccccacgugaucgaggaggugaugaacaucgugcugaucgcccugagcauccuggccgugcugaagggccuguacaacuucgccaccugcggcaucgugggccuggugagcuuccugcugcugugcggcagaagcugcaccaccagccuguacaagggcguguacgagcugcagacccuggagcugaacauggagacccugaacaugaccaugccccugagcugcaccaagaacaacagccaccacuacaucauggugggcaacgagaccggccuggagcugacccugaccaacaccagcaucaucaaccacaaguucugcaaccugagcgacgcccacaagaagaaccuguacgaccacgcccugaugagcaucaucagcaccuuccaccugagcauccccaacuucaaccaguacgaggccaugagcugcgacuucaacggcggcaagaucagcgugcaguacaaccugagccacagcuacgccggcgacgccgccaaccacugcggcaccaucgccaacggcgugcugcagaccuucaugagaauggccuggggcggcagcuacaucgcccuggacagcggcugcgacagaugggacugcaucaugaccagcuaccaguaccugaucauccagaacaccaccugggaggaccacugccaguucagcagacccagccccaucggcuaccugggccugcugagccagagaaccagagacaucuacaucagcagaagacgccggggcaccuucaccuggacccugagcgacagcgagggcaaggacacccccggcggcuacugccugaccagauggaugcugaucgaggccgagcugaagugcuucggcaacaccgccguggccaagugcaacgagaagcacgacgaggaguucugcgacaugcugagacuguucgacuucaacaagcaggccauccagagacugaaggcccccgcccagaugagcauccagcugaucaacaaggccgugaacgcccugaucaacgaccagcugaucaugaagaaccaccugagagacaucaugugcauccccuacugcaacuacagcaaguacugguaccugaaccacaccaccaccggcaagaccagccugcccaagugcuggcuggugagcaacggcagcuaccugaacgagacccacuucagcgacgacaucgagcagcaggccgacaacaugaucaccgagaugcugcagaaggaguacauggagagacagggcaagaccccccugggccugguggaccuguucguguucagcaccagcuucuaccugaucagcaucuuccugcaccuggugaagauccccacccacagacacguggugggcaagagcugccccaagccccacagacugaaccacaugggcaucugcagcugcggccuguacggccagcccggcgugcccgugaaguggaagagaugaggacuagugcaucacauuuaaaagcaucucagccuaccaugagaauaagagaaagaaaaugaagaucaauagcuuauucaucucuuuuucuuuuucguugguguaaagccaacacccugucuaaaaaacauaaauuucuuuaaucauuuugccucuuuucucugugcuucaauuaauaaaaaauggaaagaaccuagaucuaaaaaaaaaaaaaaaaaaaaaaaaaaaaaaaaaaaaaaaaaaaaaaaaaaaaaaaaaaaaaaaaugcaucccccccccccccccccccccccccccccccaaaggcucuuuucagagccaccagaauu

SEQ ID NO: 7158 - RNA, 1858 nt, Artificial Sequence
  mRNA product Design i-2 comprising derived and/or modified sequence from MOPV/LASV reassortant(IGS-1;Clade IV)__AFY05576__GPCstabilized (opt4)
ggggcgcugccuacggagguggcagccaucuccuucucggcaucaagcuuaccaugggccagaucgugaccuucuuccaggaggugccccacgugaucgaggaggugaugaacaucgugcugaucgcccugagcgugcuggccgugcugaagggccuguacaacuucgccaccugcggccuggugggccuggugaccuuccugcugcugugcggcagaagcugcaccaccagccuguacaagggcguguacgagcugcagacccuggagcugaacauggagacccugaacaugaccaugccccugagcugcaccaagaacaacagccaccacuacaucauggugggcaacgagaccggccuggagcugacccugaccaacaccagcaucaucaaccacaaguucugcaaccugagcgacgcccacaagaagaaccuguacgaccacgcccugaugagcaucaucagcaccuuccaccugagcauccccaacuucaaccaguacgaggccaugagcugcgacuucaacggcggcaagaucagcgugcaguacaaccugagccacagcuacgccggcgacgccgccaaccacugcggcaccguggccaacggcgugcugcagaccuucaugagaauggccuggggcggcagcuacaucgcccuggacagcggcugcggcaacugggacugcaucaugaccagcuaccaguaccugaucauccagaacaccaccugggaggaccacugccaguucagcagacccagccccaucggcuaccugggccugcugagccagagaaccagagacaucuacaucagcagaagacgccggggcaccuucaccuggacccugagcgacagcgagggcgaggacacccccggcggcuacugccugaccagauggaugcugaucgaggccgagcugaagugcuucggcaacaccgccguggccaagugcaacgagaagcacgacgaggaguucugcgacaugcugagacuguucgacuucaacaagcaggccauccagagacugaaggcccccgcccagaugagcauccagcugaucaacaaggccgugaacgcccugaucaacgaccagcugaucaugaagaaccaccugagagacaucaugugcauccccuacugcaacuacagcaaguacugguaccugaaccacaccaccaccggcagaaccagccugcccaagugcuggcuggugagcaacggcagcuaccugaacgagacccacuucagcgacgacaucgagcagcaggccgacaacaugaucaccgagaugcugcagaaggaguacauggagagacagggcaagaccccccugggccugguggaccuguucguguucagcaccagcuucuaccugaucagcaucuuccugcaccuggugaagauccccacccacagacacaucgugggcaagagcugccccaagccccacagacugaaccacaugggcaucugcagcugcggccuguacaagcagcccggcgugcccgugaaguggaagagaugaggacuagugcaucacauuuaaaagcaucucagccuaccaugagaauaagagaaagaaaaugaagaucaauagcuuauucaucucuuuuucuuuuucguugguguaaagccaacacccugucuaaaaaacauaaauuucuuuaaucauuuugccucuuuucucugugcuucaauuaauaaaaaauggaaagaaccuagaucuaaaaaaaaaaaaaaaaaaaaaaaaaaaaaaaaaaaaaaaaaaaaaaaaaaaaaaaaaaaaaaaaugcaucccccccccccccccccccccccccccccccaaaggcucuuuucagagccaccagaauu

SEQ ID NO: 7159 - RNA, 1858 nt, Artificial Sequence
  mRNA product Design i-2 comprising derived and/or modified sequence from LASV(LM765-SLE-2012;Clade IV)__AIT17814__GPCstabilized (opt4)
ggggcgcugccuacggagguggcagccaucuccuucucggcaucaagcuuaccaugggccagaucgugaccuucuuccaggaggugccccacgugaucgaggaggugaugaacaucgugcugaucgcccugagcauccuggccgugcugaagggccuguacaacuucgccaccugcggccuggugggccuggugaccuuccugcugcugugcggcagaagcugcaccaccagccuguacaagggcguguacgagcugcagacccuggagcugaacauggagacccugaacaugaccaugccccugagcugcaccaagaacaacagccaccacuacaucauggugggcaacgagaccggccuggagcugacccugaccaacaccagcaucaucgaccacaaguucugcaaccugagcgacgcccacagaaagaaccuguacgaccacgcccugaugagcaucaucagcaccuuccaccugagcauccccaacuucaaccaguacgaggccaugagcugcgacuucaacggcggcaagaucagcgugcaguacaaccugagccacagcuacgccaaggacgccgccgaccacugcggcaccguggccaacggcgugcugcagaccuucaugagaauggccuggggcggcagcuacaucgcccuggacagcggcugcggcagaugggacugcaucaugaccagcuaccaguaccugaucauccagaacaccaccugggaggaccacugccaguucagcagacccagccccaucggcuaccugggccugcugagccagagaaccagagacaucuacaucagcagaagacgccggggcaccuucaccuggacccugagcgacagcgagggcaaggacacccccggcggcuacugccugaccagauggaugcugaucgaggccgagcugaagugcuucggcaacaccgccguggccaagugcaacgagaagcacgacgaggaguucugcgacaugcugagacuguucgacuucaacaagcaggccauccagagacugaaggcccccgcccagaugagcauccagcugaucaacaaggccgugaacgcccugaucaacgaccagcugaucaugaagaaccaccugagagacaucaugugcauccccuacugcaacuacagcaaguacugguaccugaaccacaccaccaccggcaagaccagccugcccaagugcuggcuggugagcaacggcagcuaccugaacgagacccacuucagcgacgacaucgagcagcaggccgacaacaugaucaccgagaugcugcagaaggaguacauggagagacagggcaagaccccccugggccugguggaccuguucguguucagcaccagcuucuaccugaucagcaucuuccugcaccuggugaagauccccacccacagacacaucgugggcaagcccugccccaagccccacagacugaaccacaugggcaucugcagcugcggccuguacaagcagcccggcgugcccgugaaguggaagagaugaggacuagugcaucacauuuaaaagcaucucagccuaccaugagaauaagagaaagaaaaugaagaucaauagcuuauucaucucuuuuucuuuuucguugguguaaagccaacacccugucuaaaaaacauaaauuucuuuaaucauuuugccucuuuucucugugcuucaauuaauaaaaaauggaaagaaccuagaucuaaaaaaaaaaaaaaaaaaaaaaaaaaaaaaaaaaaaaaaaaaaaaaaaaaaaaaaaaaaaaaaaugcaucccccccccccccccccccccccccccccccaaaggcucuuuucagagccaccagaauu

SEQ ID NO: 7160 - RNA, 1858 nt, Artificial Sequence
  mRNA product Design i-2 comprising derived and/or modified sequence from LASV(LM776-SLE-2012;Clade IV)__AIT17824__GPCstabilized (opt4)
ggggcgcugccuacggagguggcagccaucuccuucucggcaucaagcuuaccaugggccagaucgugaccuucuuccaggaggugccccacgugaucgaggaggugaugaacaucgugcugaucgcccugagcauccuggccgugcugaagggccuguacaacuucgccaccugcggccuggugggccuggugaccuuccugcugcugugcggcagaagcugcaccaccagcguguacaagggcguguacgagcugcagacccuggagcugaacauggagacccugaacaugaccaugccccugagcugcaccaagaacaacagccaccacuacaucauggugggcaacgagaccggccuggagcugacccugaccaacaccagcaucaucaaccacaaguucugcaaccugagcgacgcccacaagaagaaccuguacgaccacgcccugaugagcaucaucagcaccuuccaccugagcauccccaacuucaaccaguacgaggccaugagcugcgacuucaacggcggcaagaucagcgugcaguacaaccugagccacagcuacgccggcgacgccgccaaccacugcggcaccguggccaacggcgugcugcagaccuucaugagaauggccuggggcggcagcuacaucgcccuggacagcggcugcggcaagugggacugcaucaugaccagcuaccaguaccugaucauccagaacaccaccugggaggaccacugccaguucagcagacccagccccaucggcuaccugggccugcugagccagagaaccagagacaucuacaucagcagaagacgccggggcaccuucaccuggacccugagcgacagcgagggcaaggacacccccggcggcuacugccugaccagauggaugcugaucgaggccgagcugaagugcuucggcaacaccgccguggccaagugcaacgagaagcacgacgaggaguucugcgacaugcugagacuguucgacuucaacaagcaggccauccagagacugaaggcccccgcccagaugagcauccagcugaucaacaaggccgugaacgcccugaucaacgaccagcugaucaugaagaaccaccugagagacaucaugugcauccccuacugcaacuacagcaaguacugguaccugaaccacaccaccaccggcaagaccagccugcccaagugcuggcuggugagcaacggcagcuaccugaacgagacccacuucagcgacgacaucgagcagcaggccgacaacaugaucaccgagaugcugcagaaggaguacauggagagacagggcaagaccccccugggccugguggaccuguucguguucagcaccagcuucuaccugaucagcaucuuccugcaccuggugaagauccccacccacagacacaucgugggcaagagcugccccaagccccacagacugaaccacaugggcaucugcagcugcggccuguacaagcagcccggcgugcccgugagauggaagagaugaggacuagugcaucacauuuaaaagcaucucagccuaccaugagaauaagagaaagaaaaugaagaucaauagcuuauucaucucuuuuucuuuuucguugguguaaagccaacacccugucuaaaaaacauaaauuucuuuaaucauuuugccucuuuucucugugcuucaauuaauaaaaaauggaaagaaccuagaucuaaaaaaaaaaaaaaaaaaaaaaaaaaaaaaaaaaaaaaaaaaaaaaaaaaaaaaaaaaaaaaaaugcaucccccccccccccccccccccccccccccccaaaggcucuuuucagagccaccagaauu

SEQ ID NO: 7161 - RNA, 1858 nt, Artificial Sequence
  mRNA product Design i-2 comprising derived and/or modified sequence from LASV(Mad39;Clade IV)__ANH09722__GPCstabilized (opt4)
ggggcgcugccuacggagguggcagccaucuccuucucggcaucaagcuuaccaugggccagaucgugaccuucuuccaggaggugccccacgugaucgaggaggugaugaacaucgugcugaucgcccugagcauccuggccgugcugaagggccuguacaacguggccaccugcggccugaucggccuggugaccuuccugcugcugugcggcagaagcugcaccaccacccuguacaagggcguguacgagcugcaggcccuggagcugaacauggagacccugaacaugaccaugccccugagcugcaccaagaacaacagccaccacuacaucagagugggcaacgagaccggccuggagcugacccugaccaacaccagccugaucaaccacaaguucugcaaccugagcgacgcccacaagaagaaccuguacgaccacgcccugaugagcaucaucagcaccuuccaccugagcauccccaacuucaaccaguacgaggccaugagcugcgacuucaacgacggcaagaucagcgugcaguacaaccugagccacaccuacgccggcgacaccgccaaccacugcggcaccguggccaacggcgugcugcagaccuucaugagaauggccuggggcggcagcuacaucgcccuggacagcggcugcggcggcugggacugcaucaugaccagcuaccaguaccugaucauccagaacaccaccugggaggaccacugccaguucagcagacccagccccaucggcuaccugggccugcugagccagagaaccagagacaucuacaucagcagaagacgccggggcaccuucaccuggacccugagcgacagcgagggcaaggacacccccggcggcuacugccugaccagauggaugcugaucgaggccgagcugaagugcuucggcaacaccgccguggccaagugcaacgagaagcacgacgaggaguucugcgacaugcugagacuguucgacuucaacaagcaggccauccagagacugaaggcccccgcccagaugagcauccagcugaucaacaaggccgugaacgcccugaucaacgaccagcugaucaugaagaaccaccugagagacaucaugugcauccccuacugcaacuacagcaaguacugguaccugaaccacaccgugaccggcaagaccagccugcccaagugcuggcuggugagcaacggcagcuaccugaacgagacccacuucagcgacgacaucgagcagcaggccgacaacaugaucaccgagaugcugcagaaggaguacauggagagacagggcaagaccccccugggccugguggaccuguucguguucagcaccagcuucuaccugaucagcaucuuccugcaccuggugaagauccccacccacagacacguggugggcaagcccugccccaagccccacagacugaaccacaugggcaucugcagcugcggcuucuacaagcagcccggcgugcccgugagauggaagagaugaggacuagugcaucacauuuaaaagcaucucagccuaccaugagaauaagagaaagaaaaugaagaucaauagcuuauucaucucuuuuucuuuuucguugguguaaagccaacacccugucuaaaaaacauaaauuucuuuaaucauuuugccucuuuucucugugcuucaauuaauaaaaaauggaaagaaccuagaucuaaaaaaaaaaaaaaaaaaaaaaaaaaaaaaaaaaaaaaaaaaaaaaaaaaaaaaaaaaaaaaaaugcaucccccccccccccccccccccccccccccccaaaggcucuuuucagagccaccagaauu

SEQ ID NO: 7162 - RNA, 1858 nt, Artificial Sequence
  mRNA product Design i-2 comprising derived and/or modified sequence from LASV(Z0947-SLE-2011;Clade IV)__AIT17840__GPCstabilized (opt4)
ggggcgcugccuacggagguggcagccaucuccuucucggcaucaagcuuaccaugggccagaucgugaccuucuuccaggaggugccccacgugaucgaggaggugaugaacaucgugcugaucgcccugagcauccuggccgugcugaagggccuguacaacuucgccaccugcggccuggugggccuggugaccuuccugcugcugugcggcagaagcugcaccaucagccuguacaagggcguguacgagcugcagacccuggagcugaacauggagacccugaacaugaccaugccccugagcugcaccaagaacaacagccaccacuacaucauggugggcaacgagaccggccuggagcugacccugaccaacaccagcaucaucaaccacaaguucugcaaccugagcgacgcccacaagaagaaccuguacgaccacgcccugaugagcaucaucagcaccuuccaccugagcauccccaacuucaaccaguacgaggccaugagcugcgacuucaacggcggcaagaucagcgugcaguacaaccugagccacagcuacgccggcgacgccgccaaccacugcggcaccguggccaacggcgugcugcagaccuucaugagaauggccuggggcggcagcuacaucgcccuggacagcggcugcgacagaugggacugcaucaugaccagcuaccaguaccugaucauccagaacaccaccugggaggaccacugccaguucagcagacccagccccaucggcuaccugggccugcugagccagagaaccagagacaucuacaucagcagaagacgccggggcaccuucaccuggacccugagcgacagcgagggcaaggacacccccggcggcuacugccugaccagauggaugcugaucgaggccgagcugaagugcuucggcaacaccgccguggccaagugcaacgagaagcacgacgaggaguucugcgacaugcugagacuguucgacuucaacaagcaggccauccagagacugaaggcccccgcccagaugagcauccagcugaucaacaaggccgugaacgcccugaucaacgaccagcugaucaugaagaaccaccugagagacaucaugugcauccccuacugcaacuacagcaaguacugguaccugaaccacaccaccaccggcaagaccagccugcccaagugcuggcuggugagcaacggcagcuaccugaacgagacccacuucagcgacgacaucgagcagcaggccgacaacaugaucaccgagaugcugcagaaggaguacauggagagacagggcaagaccccccugggccugguggaccuguucguguucagcaccagcuucuaccugaucagcaucuuccugcaccuggugaagauccccacccacagacacaucgugggcaagcccugccccaagccccacagacugaaccacaugggcaucugcagcugcggccuguacaagcagcccggcgugcccgugaaguggaagagaugaggacuagugcaucacauuuaaaagcaucucagccuaccaugagaauaagagaaagaaaaugaagaucaauagcuuauucaucucuuuuucuuuuucguugguguaaagccaacacccugucuaaaaaacauaaauuucuuuaaucauuuugccucuuuucucugugcuucaauuaauaaaaaauggaaagaaccuagaucuaaaaaaaaaaaaaaaaaaaaaaaaaaaaaaaaaaaaaaaaaaaaaaaaaaaaaaaaaaaaaaaaugcaucccccccccccccccccccccccccccccccaaaggcucuuuucagagccaccagaauu

SEQ ID NO: 7163 - RNA, 1858 nt, Artificial Sequence
  mRNA product Design i-2 comprising derived and/or modified sequence from LASV(Josiah;Clade IV)__NP_694870__GPCstabilized (opt5)
ggggcgcugccuacggagguggcagccaucuccuucucggcaucaagcuuaccaugggccagaucgugaccuucuuucaagaggucccccacguuauugaagaggugaugaacaucgugcugauugcccucagcguccuggcugugcuuaaggggcuguacaauuucgccacaugcggacucguuggccuggugacguuucuucugcucugugggagauccugcaccacaucucuguauaaaggagucuacgaacugcagacccucgagcugaacauggaaacacuuaauaugaccaugccucugagcuguacaaagaacaauucccaucacuauaucauggugggcaacgagaccgggcucgagcugacgcuuaccaauacaucuauuaucaaccauaaauucugcaaucugagcgacgcgcacaagaaaaaccucuacgaucaugcucugauguccaucauuucuaccuuucaccugagcaucccgaauuucaaccaguaugaagccauguccugugacuuuaauggaggcaagauuagcguucaguacaaccucucucacuccuaugccggcgaugcugccaaucauugcgggacaguggcuaacggaguccugcaaaccuucaugcggauggccuggggcgggagcuacaucgcgcuugacucuggaugcggcaacugggauuguauuaugacguccuaccaguaucugaucauucagaauacaaccugggaggaccacugccaguuuagcagacccucuccuaucggguaccucggacugcuuucccaacggacacgcgauaucuauauuagcagacggcgccggggcaccuucaccuggacacuguccgacucugaaggcaaggauacgcccgggggauacugucugacccgcuggaugcucaucgaggccgagcugaaaugcuuuggcaacacagcuguggccaaguguaaugaaaaacaugacgaggaguucugcgauaugcuuagacuguuugacuucaacaagcaggcuauucagcggcucaaagcccccgcgcagaugagcauccaacugauuaauaaggccgugaacgcucuuaucaaugaucagcugaucaugaagaaccaccuccgcgacauuaugugcaucccuuauugcaauuacuccaaauauugguaccugaaccacaccacaaccggaagaacgagccugcccaaguguuggcucgucucuaauggcuccuaccugaacgaaacacauuucagcgacgauauugagcagcaagccgacaauaugaucaccgagaugcuucagaaagaauauauggagcggcaggggaagaccccucugggacucguugaucuguuuguguucucuaccagcuuuuaccugauuuccaucuuccuucaccucgugaaaaucccgacacaucgccacauugucggcaagucuugccccaaaccucauagacugaaccacaugggcaucuguagcugcgggcuguauaagcagcccggagugccuguuaaguggaaacggugaggacuagugcaucacauuuaaaagcaucucagccuaccaugagaauaagagaaagaaaaugaagaucaauagcuuauucaucucuuuuucuuuuucguugguguaaagccaacacccugucuaaaaaacauaaauuucuuuaaucauuuugccucuuuucucugugcuucaauuaauaaaaaauggaaagaaccuagaucuaaaaaaaaaaaaaaaaaaaaaaaaaaaaaaaaaaaaaaaaaaaaaaaaaaaaaaaaaaaaaaaaugcaucccccccccccccccccccccccccccccccaaaggcucuuuucagagccaccagaauu

SEQ ID NO: 7164 - RNA, 1855 nt, Artificial Sequence
  mRNA product Design i-2 comprising derived and/or modified sequence from LASV(LP;Clade I)__AAF86701__GPCstabilized (opt5)
ggggcgcugccuacggagguggcagccaucuccuucucggcaucaagcuuaccaugggccagaucauuaccuucuuucaagaggugccccacgucaucgaagagguuaugaacauugugcugaucgcccucagccugcuugcuauucugaaggggcucuacaauaucgccacaugcggaaucauuggccugguggcguuccuuuuucugugugggaaauccugcucucucacgcugaagggaggcuaugaacugcagacccucgagcugaacauggaaacacuuaauaugaccaugccucugagcuguaccaaaaacuccucucaucacuacaucagagucgggaaugagacaggacucgagcugacacuuaccaacacgagcauuaucaaucauaaguucugcaaccuguccgacgcucacaaaaagaaucucuaugaucaugcccugaugucuauuaucagcaccuuucaccuguccauuccgaacuucaaucaguacgaagccaugagcugugacuuuaacggcggcaagaucucugugcaguauaaucucucccacagcuacgcuggggaugccgcugagcauugcggaacaguugccaacggcgugcugcaaaccuucaugcggauggcguggggagggcgcuauaucgcccuugacucuggcugcgggaauugggauuguauuaugacauccuaccaguaccugaucauucagaacaccacgugggaagaccacugccaguuuagcagacccucuccuaucggauaucucggccugcuuucccaacggacacgcgauauuuacaucagcagacggcgccggggcaccuucacauggacccuguccgacucugaggggaacgagacccccggaggcuauugucugacacgcuggaugcucaucgaagcugagcugaagugcuuugggaauacggccgucgcuaaauguaacgaaaagcaugaugaggaguucugcgacaugcuuagacuguuugauuucaauaaacaggccauucggcgccucaaggcgcccgcccagaugagcauccagcugauuaacaaggcugugaaugcccuuaucaacgaccaacugauuaugaaaaaucaccucagagauaucaugugcaucccuuacugcaacuauuccaaguacugguaucugaaucacaccagcucuggccggacaucccugcccaaauguuggcucauuagcaacgggucuuaccugaaugagacccaguucagcgacgacaucgaacagcaagcugauaacaugauuacagagaugcuucagaaggaauacaucgagcgccagggaaaaaccccucugggccucguugacauuuuuaucuucuccacgucuuuuuaucugauuagcaucuuccugcaucuuaucaagauuccgacacacagacauaucgugggcaaacccugcccuaagccccaccggcucaaucauaugggggucuguuccugcggacuguacaagcacccuggcgugcccaccaaauggaagcgcugaggacuagugcaucacauuuaaaagcaucucagccuaccaugagaauaagagaaagaaaaugaagaucaauagcuuauucaucucuuuuucuuuuucguugguguaaagccaacacccugucuaaaaaacauaaauuucuuuaaucauuuugccucuuuucucugugcuucaauuaauaaaaaauggaaagaaccuagaucuaaaaaaaaaaaaaaaaaaaaaaaaaaaaaaaaaaaaaaaaaaaaaaaaaaaaaaaaaaaaaaaaugcaucccccccccccccccccccccccccccccccaaaggcucuuuucagagccaccagaauu

SEQ ID NO: 7165 - RNA, 1855 nt, Artificial Sequence
  mRNA product Design i-2 comprising derived and/or modified sequence from LASV(803213;Clade II)__AAF86703__GPCstabilized (opt5)
ggggcgcugccuacggagguggcagccaucuccuucucggcaucaagcuuaccaugggccagaucauuaccuucuuucaagaggugccccacgucaucgaagagguuaugaacauugugcugaucgcccucagccugcuugcuauucugaaggggaucuacaauguggccacaugcggacucuucggccugaucuccuuucuucugcucugugggagaucuugcagcgucacguauaaaggaguguacgaacugcagacccuggagcucaacauggcgaaucugaacaugacaaugccucuuuccuguaccaagaauaacucucaucacuauauuaugguuggcaaugaaacagggcuggagcucacccugacaaacaccagcaucauuaaucauaaauucugcaaccuuuccgacgcucacaagaaaaaucuguacgaucaugcccucaugucuaucauuagcacguuucaccuguccaucccgaacuucaaucaguaugaggccaugagcugugacuuuaacggaggcaagauuucugugcaguacaaucugucccacagcuucgcugucgaugccgcuaaccauugcggcaccaucgccaacggggugcuccaaacauuuaugcggauggcguggggaggcucuuauaucgcccuggacuccgggugcggaaauugggauuguauuaugaccagcuaccaguaccuuaucauucagaacacaaccugggaagaccacugccaguucucucgccccuccccuaucggcuaucuggggcuccugagccaaagaacgcgggauauuuacaucucccgcagacgccggggaacauuuaccuggacacucucugacagcgagggcaaugaagcucccggcggguauugucugacccgguggaugcugaucgaggccgagcucaaaugcuucggaaacaccgcuguugccaaguguaaugaaaaacaugaugaggaauuuugcgacaugcugcgccuuuucgauuucaacaagcaggcgauuaaaagacugaagacacccgcccagauguccauccagcucauuaauaaggcugugaacgcccugaucaaugaccaacuuauuaugaaaaaccaucugcgggauaucaugugcaucccuuacugcaauuauagccgcuacugguaucucaaccacacggucaccgggaagacaucucugcccagauguuggcugguguccaauggaagcuaccucaacgaaacccacuuuucugacgacauugagcagcaggcugauaauaugaucacagagaugcugcaaaaagaauacauggaccggcagggcaagaccccucuugggcugguggaucucuucgucuuuagcacguccuucuaucugauuucuaucuuucugcaccuuguuaaaauuccgacacaucgccacaucgugggaaagcccugcccuaaaccccauagacucaaccacaugggcauuuguagcugcggccuguacaagcacccuggggugcccgucaaguggaaacggugaggacuagugcaucacauuuaaaagcaucucagccuaccaugagaauaagagaaagaaaaugaagaucaauagcuuauucaucucuuuuucuuuuucguugguguaaagccaacacccugucuaaaaaacauaaauuucuuuaaucauuuugccucuuuucucugugcuucaauuaauaaaaaauggaaagaaccuagaucuaaaaaaaaaaaaaaaaaaaaaaaaaaaaaaaaaaaaaaaaaaaaaaaaaaaaaaaaaaaaaaaaugcaucccccccccccccccccccccccccccccccaaaggcucuuuucagagccaccagaauu

SEQ ID NO: 7166 - RNA, 1855 nt, Artificial Sequence
  mRNA product Design i-2 comprising derived and/or modified sequence from LASV(GA391;Clade III)__CAA36645__GPCstabilized (opt5)
ggggcgcugccuacggagguggcagccaucuccuucucggcaucaagcuuaccaugggccagaucgugaccuucuuucaagaggucccccacguuauugaagaggugaugaacaucgugcugauugcccucagcauccuggcuauucuuaaggggcuguacaaugucgccacaugcggacucaucggccuggugacguuccuucugcucuccgggagaucuuguagccugaucuauaaaggaaccuacgaacugcagacacucgagcugaacauggaaacccuuaauaugacaaugccucuguccugcaccaagaacaauucucaucacuauauucggguuggcaacgagacagggcucgagcugacccuuacgaauaccagcauccugaaccauaaauuuuguaaucucuccgacgcgcacaagcgcaaccuguacgaucauucucugaugagcauuaucuccacauuccaccucagcauuccgaauuuuaaccaguaugaagcuaugucuugcgacuucaauggaggcaaaaucaccgugcaguacaaccugucccacagcuuugccgucgaugccgcuggccauugugggacacuugccaauggagugcugcaaaccuucaugagaauggcuuggggcgggucuuauauugcccucgacuccggaugcggcaacugggauugcaucaugacgagcuaccaguaccugaucauucagaacacaaccugggacgaucacugucaguuuucucgccccuccccuaucggguaucuuggacugcucagccaaagaacacgggacauuuacaucucccgcagacgccggggcaccuucaccuggacacucucugauagcgagggcaaugaaacgcccgggggauauugccugacccgguggaugcuuauugaggcggagcugaaguguuuuggcaacacagccguugcuaagugcaaugaaaaacaugacgaggaguucugugauaugcuccgccuguuugacuucaacaagcaggccaucagacggcuuaaaacccccgcucagauguccauccagcugauuaauaaggccgugaacgcgcucaucaaugaucaacugauuaugaaaaaccaucugcgcgacaucaugugcauuccuuacugcaauuauagcagauacugguaucucaaccacacaucuaccggaaagacgucccugccccggugcuggcuuaucagcaauggcucuuaccugaacgaaacaaaguucagcgacgauaucgagcagcaggccgacaauaugauuaccgagaugcuccaaaaagaauacaucgaucgccaggggaagaccccucugggacuggucgaccuuuuuguguucuccacaucuuuuuaucucauuagcaucuuccugcaccuggugaaaauuccgacccacagacauaucgucggcaagcccuguccuaaaccccaccggcucaaccauaugggcauuugcuccugugggcuguacaagcagccuggaguucccgugagauggaaacgcugaggacuagugcaucacauuuaaaagcaucucagccuaccaugagaauaagagaaagaaaaugaagaucaauagcuuauucaucucuuuuucuuuuucguugguguaaagccaacacccugucuaaaaaacauaaauuucuuuaaucauuuugccucuuuucucugugcuucaauuaauaaaaaauggaaagaaccuagaucuaaaaaaaaaaaaaaaaaaaaaaaaaaaaaaaaaaaaaaaaaaaaaaaaaaaaaaaaaaaaaaaaugcaucccccccccccccccccccccccccccccccaaaggcucuuuucagagccaccagaauu

SEQ ID NO: 7167 - RNA, 1858 nt, Artificial Sequence
  mRNA product Design i-2 comprising derived and/or modified sequence from LASV(AV;Clade V)__CCA30314__GPCstabilized (opt5)
ggggcgcugccuacggagguggcagccaucuccuucucggcaucaagcuuaccaugggccagaucgugaccuucuuucaagaggucccccacguuauugaagaggugaugaacaucgugcugauugcccucagcauccuggcuguccuuaaggggcuguacaauauugccacaugcggacucaucggccugaucacguuccuucugcucugugggagauccugcucuagcaaccuguauaaaggaguguacgaacugcagucccucgaccugaauauggagacccuuaacaugacaaugccucugucuuguaccaagaauaacagccaucacuauauucggguuggcaaugauacagggcucgaacugacccuuacaaacaccuccauccugaaucauaaauuuugcaaccucucugacgcgcacaagaaagaucuguacgaccaugcucugaugagcauuaucuccacguuccaccucagcauuccgaauuuuaaccaguaugaggccaugucuugugauuucaauggaggcaagaucuccgugcaguacaaccugagccacucuuaugccauugacgcugccaaucauugcggcaccgucgcuaacgggauccuucaaacauuuaugcgcauggccuggggaggcuccuacaucgcgcuggauagcgggugcggaaacugggacuguauuaugaccucuuaccaguaucucaucauucagaauacaaccugggagaaccacugccaguucucccggcccagcccuaucggcuaccuggggcuucugucccaacgcacgagagauauuuauaucucucggcgccgccggggaacauuuaccuggacacugagcgacuccgaaggcaaugccacccccggcggguacugucucaccagauggaugcugaucgaggcugaacuuaagugcuucggaaacacagccguggcuaaauguaaugagaagcaugaugaggaauuuugcgacaugcugcgccucuucgauuuuaacaaacaggccauuagccggcugaagucucccgcgcagauguccauccagcuuauuaauaaagccguuaacgcucugaucaaugaccaacucauuaugaagaaccaccugagagacaucaugugcaucccuuauugcaauuacagcaaguauugguaccugaaccacacgauuaccgggaaaacaucucuccccaaguguuggcuggugagcaauggauccuaccuuaacgaaacccauuucucugaugacaucgagcagcaggccgauaauaugauuacagaaaugcugcaaaaagaguauauggagcggcagggcaagaccccucucgggcuggucgaccuguucguguuuagcacguccuucuaccuuaucagcauuuuucuccgccuggugaaaaucccgacacacagacauauugucggaaagcccugcccuaaaccccaccggcugaaccauaugggcaucuguucuugcggccucuauaagcagccugggguucccgugcgcuggaagagaugaggacuagugcaucacauuuaaaagcaucucagccuaccaugagaauaagagaaagaaaaugaagaucaauagcuuauucaucucuuuuucuuuuucguugguguaaagccaacacccugucuaaaaaacauaaauuucuuuaaucauuuugccucuuuucucugugcuucaauuaauaaaaaauggaaagaaccuagaucuaaaaaaaaaaaaaaaaaaaaaaaaaaaaaaaaaaaaaaaaaaaaaaaaaaaaaaaaaaaaaaaaugcaucccccccccccccccccccccccccccccccaaaggcucuuuucagagccaccagaauu

SEQ ID NO: 7168 - RNA, 1855 nt, Artificial Sequence
  mRNA product Design i-2 comprising derived and/or modified sequence from LASV(Togo/2016/7082;Clade VI)__AMR44577__GPCstabilized (opt5)
ggggcgcugccuacggagguggcagccaucuccuucucggcaucaagcuuaccaugggccagaucauuaccuucuuucaagaggugccccacgucaucgaagagguuaugaacauugugcugaucgcccucagccugcuugcuauucugaaggggguguacaaugucgccacaugcggaaucaucggccucgugacguuccuguuucuuugugggagauccugcucucugauuuauaaaggaagcuacgaacuccagacccuggagcugaacauggaaacacucaauaugaccaugccucuguccuguacaaagaacucuagccaucacuauauccggguuggcaaugagaccgggcuugagcugacacucaccaacacguccauuaucaaucauaaauucugcaaccugucugacgcgcacaagcgcaaucuuuacgaucaugcucugaugagcauucucuccaccuuucaccugagcaucccgaacuucaaucaguaugaagccaugucuugugacuuuaacggaggcaaaauuuccgugcaguacaaucugagccacgccuaugcugucgaugccgcugagcauugcggcacaguggccaacgggguucuccaaaccuucaugagaauggcguggggaggcucuuacaucgcccuggacuccgggugcggaaauugggauuguaucaugacaagcuaccaguaucuuauuauccagaacaccacgugggaagaccacugccaguuuucucgccccuccccuauuggcuaccuggggcuccugagccaaagaacacgggauaucuauauuucccgcagacgccggggaaccuucacauggacccucucugacagcgagggcaacgagacccccggcggguacugucugacacgguggaugcugaucgaagcugagcucaagugcuuuggaaauacggccguggcuaaguguaacgaaaaacaugaugaggaguucugcgacaugcugcgccuuuuugauuucaauaagcaggccauccagagacugaaaucccccgcgcagaugagcauucaacucaucaacaaggccgucaaugcucugauuaacgaccagcuuaucaugaaaaaucaucugcgggauaugaugugcauuccuuauugcaacuacucuaaguauugguaccucaaucacaccuccagcgggcgcacaucucugcccaaguguuggcuggugagcaacggauccuaccucaaugagacccacuucucugacgacaucgaacagcaagccgauaacaugaucacagagaugcugcagaaagaauauauugacagacagggcaagaccccucuugggcugguggaucucuuugucuucagcacguccuuuuaccugaucagcauuuuccugcaccuuaucaaaauuccgacacaucggcacaucguuggaaagcccugcccuaaaccccaucgccucaaucacaugggcauuuguucuugcggccuguauaagcagccuggggugcccaccagauggaaacggugaggacuagugcaucacauuuaaaagcaucucagccuaccaugagaauaagagaaagaaaaugaagaucaauagcuuauucaucucuuuuucuuuuucguugguguaaagccaacacccugucuaaaaaacauaaauuucuuuaaucauuuugccucuuuucucugugcuucaauuaauaaaaaauggaaagaaccuagaucuaaaaaaaaaaaaaaaaaaaaaaaaaaaaaaaaaaaaaaaaaaaaaaaaaaaaaaaaaaaaaaaaugcaucccccccccccccccccccccccccccccccaaaggcucuuuucagagccaccagaauu

SEQ ID NO: 7169 - RNA, 1855 nt, Artificial Sequence
  mRNA product Design i-2 comprising derived and/or modified sequence from LASV(KAK-428;Clade n.d. (VII))__ANH09740__GPCstabilized (opt5)
ggggcgcugccuacggagguggcagccaucuccuucucggcaucaagcuuaccaugggccagaucgugaccuucuuucaagaggucccccacguuauugaagaggugaugaacaucgugcugauugcccucagccugcuugcuauccugaaggggcucuacaauuucgccacaugcggagucauuggccugaucacguuucuucugcucugugggagauccugcucugcgaccuauaaaggacaguacgaacugcagacacuggagcucaacauggaaagccugaauaugaccaugccucuuuccuguacaaagaacaauucucaucacuauauccgggcuggcaacaauaccgggcuggagcucacacugaccaacacgagcauuaucucccauaaauucugcaaucuuucugacgcccacaagaaaaaccuguacgaucauacccucaugagcauuaucacaaccuuucaccuguccauuccgaauuucaaccaguaugaggccaugagcugugacuuuaauggaggcaagaucucuauucaauacaaccugucccacagcuaugcuggcgaugccgcucagcauugcgggacaguggccaauggaguucuccagaccuucaugcgcauggcguggggcgggucuuaccuggcccuugacuccggaugccggggcugggauuguaucaucagcucuuaccaguaucugauuauccaaaacacgacaugggacgaucacugccaguuuucccgccccagcccuauuggguaccucggauucgugucccagaagaccagagacaucuauauuucucggcgccgccggggcacauuuaccuggacccugagcgauuccgaaggccaugacaugcccgggggauacugucucacaagauggaugcugaucgaggcugaucugaaaugcuucggcaacacggccgucgcuaaguguaaugaaaaacacgacgaggaguuuugcgauauguggcgccucuucgacuucaacaagcaggccauccaacggcugaaagcgcccgcccagaugaauauucagcuuaucaacaaggcugugaaugcccugauuaacgaccaacucaugaugaagaaucaccugagagauaucaugugcauuccuuauugcaacuacagcaaauuuugguaucuuaauaacaccacaaccggacggacaucucugccccgcuguuggcucaucuccaauggcagcuaccugaacgagacccauuucucugacgauaucgaacagcaggcugacaauaugauuacggagaugcugcagaaggaauacauggauagacaagggaaaacaccucucggacugguugaccuuuuuguguucagcaccuccuuuuaucugaucaccauuuuccuccaccuggucaagaucccgacacaucggcacauugugggcaaacccugcccuaagccccaucgccugaaccacaugggcaucuguucuugcgggcuuuacaaacagccuggagugcccgucagauggaagcggugaggacuagugcaucacauuuaaaagcaucucagccuaccaugagaauaagagaaagaaaaugaagaucaauagcuuauucaucucuuuuucuuuuucguugguguaaagccaacacccugucuaaaaaacauaaauuucuuuaaucauuuugccucuuuucucugugcuucaauuaauaaaaaauggaaagaaccuagaucuaaaaaaaaaaaaaaaaaaaaaaaaaaaaaaaaaaaaaaaaaaaaaaaaaaaaaaaaaaaaaaaaugcaucccccccccccccccccccccccccccccccaaaggcucuuuucagagccaccagaauu

SEQ ID NO: 7170 - RNA, 1855 nt, Artificial Sequence; identical to SEQ ID NO: 7164
  mRNA product Design i-2 comprising derived and/or modified sequence from LASV(Pinneo-NIG-1969;Clade I)__AIT17836__GPCstabilized (opt5)

SEQ ID NO: 7171 - RNA, 1855 nt, Artificial Sequence
  mRNA product Design i-2 comprising derived and/or modified sequence from LASV(ISTH0009-NIG-2011;Clade II)__AIT17404__GPCstabilized (opt5)
ggggcgcugccuacggagguggcagccaucuccuucucggcaucaagcuuaccaugggccagaucauuaccuucuuucaagaggugccccacgucaucgaagagguuaugaacauugugcugaucgcccucagccugcuugcuauucugaaggggaucuacaauguggccacaugcggacucuucggccuggucuccuuucuucugcucugugggagaucuugcagcacgaccuauaaaggaguguacgaacugcagacacuggagcucgacauggcgucccugaacaugaccaugccucuuucuuguacaaagaauaacagccaucacuauaucaugguuggcaaugaaaccgggcuggagcucacacugaccaacacguccauuaucaaucauaaauucugcaaccuuucugaugcucacaagaaaaaucuguacgaccaugcccucaugagcauuaucuccaccuuucaccugagcauuccgaacuucaaucaguaugaggccaugucuugugauuuuaacggaggcaagaucuccgugcaguacaaucugagccacgcuuaugccgucgacgcugccaaccauugcggcacaauugcgaauggggugcuccaaaccuucaugcggauggccuggggaggcucuuacaucgcucuggauuccgggugcggaagcugggacuguaucaugacaucuuaccaguaucuuauuauccagaacaccacgugggaagaucacugccaguuuucccgccccagcccuauuggcuaccuggggcuccugucccaaagaacacgggacaucuauauuucucgcagacgccggggaaccuucacauggacccucagcgauuccgagggcaacgaaacccccggcggguacugucugacacgguggaugcugaucgaggccgagcucaaaugcuuuggaaauacggcuguugccaaguguaacgaaaaacaugacgaggaguucugcgauaugcugcgccuuuuugacuucaauaagcaggcgaucagacggcugaaaacccccgcccagaugagcauucagcucaucaacaaggcugugaaugcccugauuaacgaucaacuuaucaugaagaaucaucugcgcgacauuaugugcaucccuuauugcaacuacucuaaauauugguaccucaaucacacagucaccgggaagacaucccugcccagauguuggcuggugagcaacggaucuuaccucaaugaaacccacuucagcgacgauaucgagcagcaggcugacaacaugauuacggagcugcuucaaaaagaauauauggaucggcagggcaagacaccucuggggcucguggaccuguuugucuucuccaccucuuuuuaccugaucagcauuuuccuucaccucaucaaaauuccgacccaucgccacaucacaggaaagcccugcccuaaaccccauagacugaaucacaugggcauuuguuccugcggccuguauaagcacccugggguucccgugaaguggaaacggugaggacuagugcaucacauuuaaaagcaucucagccuaccaugagaauaagagaaagaaaaugaagaucaauagcuuauucaucucuuuuucuuuuucguugguguaaagccaacacccugucuaaaaaacauaaauuucuuuaaucauuuugccucuuuucucugugcuucaauuaauaaaaaauggaaagaaccuagaucuaaaaaaaaaaaaaaaaaaaaaaaaaaaaaaaaaaaaaaaaaaaaaaaaaaaaaaaaaaaaaaaaugcaucccccccccccccccccccccccccccccccaaaggcucuuuucagagccaccagaauu

SEQ ID NO: 7172 - RNA, 1855 nt, Artificial Sequence
  mRNA product Design i-2 comprising derived and/or modified sequence from LASV(ISTH2010-NIG-2012;Clade II)__AIT17482__GPCstabilized (opt5)
ggggcgcugccuacggagguggcagccaucuccuucucggcaucaagcuuaccaugggccagaucauuaccuucuuucaagaggugccccacgucaucgaagagguuaugaacauugugcugaucgcccucagccugcuugcuauucugaaggggaucuacaauguggccacaugcggacucuucggccuggucuccuuucuucugcucugugggagaucuugcagcacgaccuauaaaggaguguacgaacugcagacacuggagcucgacauggcgucccugaacaugaccaugccucuuucuuguacaaagaauaacagccaucacuauaucaugguuggcaaugaaaccgggcuggagcucacacugaccaacacguccauuaucaaucauaaauucugcaaccuuucugaugcucacaagaaaaaucuguacgaccaugcccucaugagcauuaucuccaccuuucaccugagcauuccgaacuucaaucaguaugaggccaugucuugugauuuuaacggaggcaagaucuccgugcaguacaaucugagccacgcuuaugccgucgacgcugccaaccauugcggcacaauugcgaauggggugcuccaaaccuucaugcggauggccuggggaggcucuuacaucgcucuggauuccgggugcggaagcugggacuguaucaugacaucuuaccaguaucuuauuauccagaacauuaccugggaagaucacugccaguuuucccgccccagcccuaucggcuaccuggggcuccugucccaaagaacgcgggacauuuauaucucucgcagacgccggggaacauucaccuggacacucagcgauuccgagggcaacgaaacccccggcggguacugucugacccgguggaugcugaucgaggccgagcucaaaugcuuuggaaauacagcuguugccaaguguaacgaaaaacaugacgaggaguucugcgauaugcugcgccuuuuugacuucaauaagcaggcgauuagacggcugaaaacgcccgcccagaugagcauccagcucauuaacaaggcugugaaugcccugaucaacgaucaacuuauuaugaagaaucaucugcgcgacaucaugugcaucccuuauugcaacuacucuaaauauugguaccucaaucacaccgucacagggaagaccucccugcccagauguuggcuggugagcaacggaucuuaccucaaugaaacacacuucagcgacgauauugagcagcaggcugacaacaugaucaccgagcugcuucaaaaagaauauauugaucggcagggcaagacgccucuggggcucguggaccuguuugucuucuccacaucuuuuuaccugaucagcauuuuccuucaccucguuaaaaucccgacccaucgccacguggugggaaagcccugcccuaaaccccauagacugaaucacaugggcauuuguuccugcggccuguauaagcacccugggguccccgugaaguggaaacggugaggacuagugcaucacauuuaaaagcaucucagccuaccaugagaauaagagaaagaaaaugaagaucaauagcuuauucaucucuuuuucuuuuucguugguguaaagccaacacccugucuaaaaaacauaaauuucuuuaaucauuuugccucuuuucucugugcuucaauuaauaaaaaauggaaagaaccuagaucuaaaaaaaaaaaaaaaaaaaaaaaaaaaaaaaaaaaaaaaaaaaaaaaaaaaaaaaaaaaaaaaaugcaucccccccccccccccccccccccccccccccaaaggcucuuuucagagccaccagaauu

SEQ ID NO: 7173 - RNA, 1855 nt, Artificial Sequence
  mRNA product Design i-2 comprising derived and/or modified sequence from LASV(Lassa virus/H.sapiens-wt/NGA/2015/ISTH_0543;Clade II)__AVO03639__GPCstabilized (opt5)
ggggcgcugccuacggagguggcagccaucuccuucucggcaucaagcuuaccaugggccagaucauuaccuucuuucaagaggugccccacgucaucgaagagguuaugaacauugugcugaucgcccucagccugcuugcuauucugaaggggaucuacaauguggccacaugcggacucuucggccuggucuccuuucuucugcucugugggagaucuugcagcacgaccuauaaaggaguguacgaacugcagacacuggagcucgacauggcgaaccugaauaugaccaugccucuuuccuguacaaagaacaauucucaucacuauaucaugguuggcaacgaaaccgggcuggagcucacacugaccaauacgagcauuaucaaccauaaauucugcaaucuuuccgaugcucacaagaaaaaccuguacgaccaugcccucaugucuauuaucagcaccuuucaccuguccauuccgaauuucaaccaguaugaggccaugagcugugauuuuaauggaggcaagaucucugugcaguacaaccugucccacacauaugcugucgacgccgcuaaucauugcggcaccauugccaacggggugcuccaaacauucaugcggauggcguggggaggcagcuacaucgcccuggauucugggugcggauccugggacuguaucaugaccagcuaccaguaucuuguuauucagaacacgacaugggaagaucacugccaguuuucucgccccuccccuaucggcuaccuggggcuccugagccaaagaacccgggacauuuauaucucccgcagacgccggggaacauucaccuggacccucucugauagcgagggcaaugaaacacccggcggguacugucugacgcgguggaugcugauugaggcugagcucaaaugcuuuggaaacaccgccguggcuaaguguaaugaaaaacaugacgaggaguucugcgauaugcugcgccuuuuugacuucaacaagcaggccaucagacggcugaaaacacccgcgcagauguccauccagcucauuaauaaggccgucaacgcucugaucaaugaucaacuuauuaugaagaaccaucugcgcgacaucaugugcauuccuuauugcaauuacagcaaauauugguaccucaaccacaccgugacagggaagaccucucugcccagauguuggcugguguccaauggaagcuaccucaacgaaacgcacuucucugacgauaucgagcagcaggccgacaauaugaucacagagcugcuucaaaaagaauauauugaucggcagggcaagaccccucuggggcucgucgaccuguuuguuuucagcaccuccuuuuaccugaucucuauuuuccuucaccucgugaaaaucccgacacaucgccacauuaccggaaagcccugcccuaaaccccauagacugaaccacaugggcaucuguagcugcggccuguauaagcacccuggggugcccgucaaguggaaacggugaggacuagugcaucacauuuaaaagcaucucagccuaccaugagaauaagagaaagaaaaugaagaucaauagcuuauucaucucuuuuucuuuuucguugguguaaagccaacacccugucuaaaaaacauaaauuucuuuaaucauuuugccucuuuucucugugcuucaauuaauaaaaaauggaaagaaccuagaucuaaaaaaaaaaaaaaaaaaaaaaaaaaaaaaaaaaaaaaaaaaaaaaaaaaaaaaaaaaaaaaaaugcaucccccccccccccccccccccccccccccccaaaggcucuuuucagagccaccagaauu

SEQ ID NO: 7174 - RNA, 1855 nt, Artificial Sequence
  mRNA product Design i-2 comprising derived and/or modified sequence from LASV(Lassa virus/H.sapiens-wt/NGA/2016/ISTH_0009;Clade II)__AVO03571__GPCstabilized (opt5)
ggggcgcugccuacggagguggcagccaucuccuucucggcaucaagcuuaccaugggccagaucauuaccuucuuucaagaggugccccacgucaucgaagagguuaugaacauugugcugaucgcccucagccugcuugcuauucugaaggggaucuacaauguggccacaugcggacuccugggccuugucuccuuccugcuccugugugggagaucuugcagcacgaccuauaaaggaguguacgaacugcagacacucgagcuggacauggcgucccuuaacaugaccaugccucugucuuguacaaagaauaacagccaucacuauaucaugguuggcaaugaaaccgggcucgagcugacacuuaccaacacguccauuaucaaucauaaauuuugcaaccugucugaugcucacaagaaaaaucucuacgaccaugcccugaugagcauuaucuccaccuuccaccugagcauuccgaacuuuaaucaguaugaggccaugucuugugauuucaacggaggccggaucuccgugcaguacaaucucagccacucuuaugcugucgacgccgcuaaccauugcggcacaauugccaauggggugcugcaaaccuuuaugcgcauggcguggggaggcuccuacaucgcccuugauagcgggugcggaucuugggacuguaucaugacauccuaccaguaucugauuauccagaacaccacgugggaagaucacugccaguucagcagacccuccccuauuggcuaccucgggcugcuuucucaacggacacgcgacaucuauauuagcagacggcgccggggaaccuuuacauggacccuguccgauagcgagggcaacgaaacccccggcggguacugucugacacgcuggaugcucaucgaggcugagcugaagugcuucggaaauacggccguugcuaaauguaacgaaaagcaugacgaggaauuuugcgauaugcuuagacuguucgacuuuaauaaacaggccauccggcgccucaagacccccgcgcagaugucuauucagcugaucaacaaagccgugaaugcucuuauuaacgaucaacugaucaugaagaaucaccucagagacauuaugugcaucccuuauugcaacuacuccaaguauugguaccugaaucacacagucaccgggaaaacaagccugccccgguguuggcucgugucuaacggaagcuaccugaaugaaacccauuucuccgacgauaucgagcagcaggccgacaacaugauuacggagcuucugcaaaaggaauauaucgaucgccagggcaaaacaccucucgggcugguggaccuguucgucuuuucuaccagcuucuaccuuauuuccaucuuucuccaccugguuaagauuccgacccauagacacaucacaggaaaacccugcccuaagccccaucggcugaaucacaugggcauuuguagcugcggccucuauaaccacccuggggugcccgugaaauggaagcgcugaggacuagugcaucacauuuaaaagcaucucagccuaccaugagaauaagagaaagaaaaugaagaucaauagcuuauucaucucuuuuucuuuuucguugguguaaagccaacacccugucuaaaaaacauaaauuucuuuaaucauuuugccucuuuucucugugcuucaauuaauaaaaaauggaaagaaccuagaucuaaaaaaaaaaaaaaaaaaaaaaaaaaaaaaaaaaaaaaaaaaaaaaaaaaaaaaaaaaaaaaaaugcaucccccccccccccccccccccccccccccccaaaggcucuuuucagagccaccagaauu

SEQ ID NO: 7175 - RNA, 1855 nt, Artificial Sequence
  mRNA product Design i-2 comprising derived and/or modified sequence from LASV(Lassa virus/H.sapiens-wt/NGA/2016/ISTH_0017;Clade II)__AVO03567__GPCstabilized (opt5)
ggggcgcugccuacggagguggcagccaucuccuucucggcaucaagcuuaccaugggccagaucauuaccuucuuucaagaggugccccacgucaucgaagagguuaugaacauugugcugaucgcccucagccugcuugcuauucugaaggggaucuacaauguggccacaugcggacucuucggccuggucuccuuucuucugcucugugggagaucuugcagcacgaccuauaaaggaguguacgaacugcagacacuggagcucgacauggcgucccugaacaugaccaugccucuuucuuguacaaagaauaacagccaucacuauaucaugguuggcaaugaaaccgggcuggagcucacacugaccaacacguccauuaucaaucauaaauucugcaaccuuucugaugcucacaagaaaaaucuguacgaccaugcccucaugagcauuaucuccaccuuucaccugagcauuccgaacuucaaucaguaugaggccaugucuugugauuuuaacggaggcaagaucuccgugcaguacaaucugagccacacauaugcuauugacgccgcuaaccauugcggcaccaucgccaaugggguccuccaaacauucaugcggauggcguggggaggcucuuacaucgcccuggauuccgggugcggaagcugggacuguauuaugaccucuuaccaguaucuuaucauucagaacacgacaugggaagaucacugccaguuuucccgccccagcccuaucggcuaccuggggcuccugucccaaagaacccgggacauuuauaucucucgcagacgccggggaacauucaccuggacccucagcgauuccgagggcaacgaaacacccggcggguacugucugacgcgguggaugcugaucgaggcugagcucaaaugcuuuggaaauaccgccguggcuaaguguaacgaaaaacaugacgaggaguucugcgauaugcugcgccuuuuugacuucaauaagcaggccauuagacggcugaaaacacccgcgcagaugagcauccagcucauuaacaaggccguuaaugcucugaucaacgaucaacuuauuaugaagaaucaucugcgcgacaucaugugcaucccuuauugcaacuacucuaaauauugguaccucaaucacaccgugacagggaagaccucccugcccagauguuggcuggucagcaacggaucuuaccucaaugaaacgcacuucagcgacgauauugagcagcaggccgacaacaugaucacagagcugcuucaaaaagaauauauggaucggcagggcaagaccccucuggggcucguggaccuguuuguguucuccaccucuuuuuaccugauuagcaucuuccuucaccucguccgcauuccgacacauagacacguuaucggaaaacccugcccuaagccccaucggcugaaucacaugggcauuuguuccugcggccuguauaaacacccuggggugcccgugaaguggaagcgcugaggacuagugcaucacauuuaaaagcaucucagccuaccaugagaauaagagaaagaaaaugaagaucaauagcuuauucaucucuuuuucuuuuucguugguguaaagccaacacccugucuaaaaaacauaaauuucuuuaaucauuuugccucuuuucucugugcuucaauuaauaaaaaauggaaagaaccuagaucuaaaaaaaaaaaaaaaaaaaaaaaaaaaaaaaaaaaaaaaaaaaaaaaaaaaaaaaaaaaaaaaaugcaucccccccccccccccccccccccccccccccaaaggcucuuuucagagccaccagaauu

SEQ ID NO: 7176 - RNA, 1855 nt, Artificial Sequence
  mRNA product Design i-2 comprising derived and/or modified sequence from LASV(Lassa virus/H.sapiens-wt/NGA/2018/ISTH_0959;Clade II)__AVV65099__GPCstabilized (opt5)
ggggcgcugccuacggagguggcagccaucuccuucucggcaucaagcuuaccaugggccagaucauuaccuucuuucaagaggugccccacgucaucgaagagguuaugaacauugugcugaucgcccucagccugcuugcuauucugaaggggaucuacaauguggucacaugcggacucuucggccugguguccuuucuucugcucugugggagaucuugcagcacgaccuauaaaggaguuuacgaacugcagacacuggagcucgacauggccucccugaacaugaccaugccucuuucuuguacaaagaauaacagccaucacuauaucauggugggcaaugaaaccgggcuggagcucacacugaccaacacguccauuaucaaucauaaauucugcaaccuuucugaugcgcacaagaaaaaucuguacgaccaugcucucaugagcauuaucuccaccuuucaccugagcauuccgaacuucaaucaguaugaggccaugucuugugauuuuaacggaggcaagaucuccguccaguacaaucugagccacgccuaugcuauugacgccgcuaaccauugcggcacaaucgccaauggggugcuccaaaccuucaugcggauggcguggggaggcucuuacaucgcccuggauuccgggugcggaagcugggacuguauuaugacaucuuaccaguaucuuaucauucagaacaccacgugggaagaucacugccaguuuucccgccccagcccuaucggcuaccuggggcuccugucccaaagaacacgggacauuuauaucucucgcagacgccggggaaccuucacauggacccucagcgauuccgagggcaacgaaacccccggcggguacugucugacacgguggaugcugaucgaggcugagcucaaaugcuuuggaaauacggccguugcuaaguguaacgaaaaacaugacgaggaguucugcgauaugcugcgccuuuuugacuucaauaagcaggccauuagacggcugaaaacccccgcgcagaugagcauccagcucauuaacaaggccgugaaugcucugaucaacgaucaacuuauuaugaagaaucaucugcgcgacaucaugugcaucccuuauugcaacuacucuaaauauugguaccucaaucacacagucaccgggaagacaucccugcccagauguuggcuggugagcaacggaucuuaccucaaugaaacccacuucagcgacgauauugagcagcaggccgacaacaugaucacggagcugcuucaaaaagaauauauugaucggcagggcaagacaccucuggggcucguggaccuguuugucuucuccaccucuuuuuaccugaucagcauuuuccuucaccucguuaaaaucccgacccaucgccacgugauuggaaagcccugcccuaaaccccauagacugaaucacaugggcaucuguuccugcggccuguauaagcacccuggggugcccgucaaguggaaacggugaggacuagugcaucacauuuaaaagcaucucagccuaccaugagaauaagagaaagaaaaugaagaucaauagcuuauucaucucuuuuucuuuuucguugguguaaagccaacacccugucuaaaaaacauaaauuucuuuaaucauuuugccucuuuucucugugcuucaauuaauaaaaaauggaaagaaccuagaucuaaaaaaaaaaaaaaaaaaaaaaaaaaaaaaaaaaaaaaaaaaaaaaaaaaaaaaaaaaaaaaaaugcaucccccccccccccccccccccccccccccccaaaggcucuuuucagagccaccagaauu

SEQ ID NO: 7177 - RNA, 1855 nt, Artificial Sequence
  mRNA product Design i-2 comprising derived and/or modified sequence from LASV(LASV003-NIG-2008;Clade II)__AIT17580__GPCstabilized (opt5)
ggggcgcugccuacggagguggcagccaucuccuucucggcaucaagcuuaccaugggccagaucauuaccuucuuucaagaggugccccacgucaucgaagagguuaugaacauugugcugaucgcccucagccugcuugcuauucugaaggggaucuacaauguggccacaugcggacucuucggccuggucuccuuucuucugcucugugggagaucuugcagcacgaccuauaaaggaguguacgaacugcagacacuggagcucgacauggcgucccugaacaugaccaugccucuuucuuguacaaagaauaacagccaucacuauaucaugguuggcaaugaaaccgggcuggagcucacacugaccaacacguccauuaucaaucauaaauucugcaaccuuucugaugcucacaagaaaaaucuguacgaccaugcccucaugagcauuaucuccaccuuucaccugagcauuccgaacuucaaucaguaugaggccaugucuugugauuuuaacggaggcaagaucuccgugcaguacaaucugagccacacauaugcugucgacgccgcuaaccauugcggcaccauugccaauggggugcuccaaacauucaugcggauggcguggggaggcucuuacaucgcccuggauuccgggugcggaagcugggacuguaucaugaccucuuaccaguaucuuauuauccagaacacgacaugggaagaucacugccaguuuucccgccccagcccuauuggcuaccuggggcuccugucccaaagaacccgggacaucuauauuucucgcagacgccggggaacauucaccuggacccucagcgauuccgagagcaacgaaacacccggcggcuacugucugacgcgguggaugcugaucgaggcugagcucaaaugcuuugggaauaccgccguugcuaaguguaacgaaaaacaugacgaggaguucugcgauaugcugcgccuuuuugacuucaauaagcaggccaucagacggcugaaagcgcccgcccagaugucuauucagcucaucaacaaggcugugaaugcccugauuaacgaucaacuuaucaugaagaaucaucugcgcgacauuaugugcaucccuuauugcaacuacuccaaauauugguaccucaaucacacagucaccggcagaacaagccugccccgguguuggcuggugucuaacgggagcuaccucaaugaaacccacuucuccgacgauaucgagcagcaggcugacaacaugauuacggagcugcuucaaaaggaauauauggaucgccagggaaaaacaccucugggccucguggaccuguuugucuucucuaccagcuuuuaccugaucuccauuuuccuucaccucguuaagaucccgacccauagacacgugauugggaaacccugcccuaagccccaucggcugaaucacaugggaaucuguagcugcggccuguauaaacacccuggcgugcccgucaaguggaagcgcugaggacuagugcaucacauuuaaaagcaucucagccuaccaugagaauaagagaaagaaaaugaagaucaauagcuuauucaucucuuuuucuuuuucguugguguaaagccaacacccugucuaaaaaacauaaauuucuuuaaucauuuugccucuuuucucugugcuucaauuaauaaaaaauggaaagaaccuagaucuaaaaaaaaaaaaaaaaaaaaaaaaaaaaaaaaaaaaaaaaaaaaaaaaaaaaaaaaaaaaaaaaugcaucccccccccccccccccccccccccccccccaaaggcucuuuucagagccaccagaauu

SEQ ID NO: 7178 - RNA, 1855 nt, Artificial Sequence
  mRNA product Design i-2 comprising derived and/or modified sequence from LASV(LASV035-NIG-2009;Clade II)__AIT17588__GPCstabilized (opt5)
ggggcgcugccuacggagguggcagccaucuccuucucggcaucaagcuuaccaugggccagaucauuaccuucuuucaagaggugccccacgucaucgaagagguuaugaacauugugcugaucgcccucagccugcuugcuauucugaaggggaucuacaauguggccacaugcggacucuucggccuggucuccuuucuucugcucugugggagaucuugcagcacgaccuauaaaggaguguacgaacugcagacacuggagcucgacauggcgucccugaacaugaccaugccucuuucuuguacaaagaauaacagccaucacuauaucaugguuggcaaugaaaccgggcuggagcucacacugaccaacacguccauuaucaaucauaaauucugcaaccuuucugaugcucacaagaaaaaucuguacgaccaugcccucaugagcauuaucuccaccuuucaccugagcauuccgaacuucaaucaguaugaggccaugucuugugauuuuaacggaggcaagaucuccgugcaguacaaucugagccacgcuuaugccgucgacgcugccaaccauugcggcacaauugcgaauggggugcuccaaaccuucaugcggauggccuggggaggcucuuacaucgcucuggauuccgggugcggaagcugggacuguaucaugacaucuuaccaguaucuuauuauccagaacaccacgugggaagaucacugccaguuuucccgccccagcccuauuggcuaccuggggcuccugucccaaagaacacgggacaucuauauuucucgcagacgccggggaaccuucacauggacccucagcgauuccgagggcaacgaaacccccggcggguacugucugacacgguggaugcugaucgaggccgagcucaaaugcuuuggaaauacggcuguugccaaguguaacgaaaaacaugacgaggaguucugcgauaugcugcgccuuuuugacuucaauaagcaggcgaucagacggcugaaagcccccgcucagaugagcauucagcucaucaacaaggccgugaaugcucugauuaacgaucaacuuaucaugaagaaucaucugcgcgacauuaugugcaucccuuauugcaacuacucuaaauauugguaccucaaucacaccgucacagggaagaccucccugcccagauguuggcuggugagcaacggaucuuaccucaaugaaacacacuucagcgacgauaucgagcagcaggccgacaacaugauuaccgagcugcuucaaaaagaauauaucgaucggcagggcaagacgccucuggggcucguggaccuguuugucuucuccacaucuuuuuaccugauuagcaucuuccuucaccucguuaaaauuccgacccaucgccacgugaucggaaagcccugcccuaaaccccauagacugaaucacaugggcauuuguuccugcggccuguauaagcacccuggggugcccgucaaguggaaacggugaggacuagugcaucacauuuaaaagcaucucagccuaccaugagaauaagagaaagaaaaugaagaucaauagcuuauucaucucuuuuucuuuuucguugguguaaagccaacacccugucuaaaaaacauaaauuucuuuaaucauuuugccucuuuucucugugcuucaauuaauaaaaaauggaaagaaccuagaucuaaaaaaaaaaaaaaaaaaaaaaaaaaaaaaaaaaaaaaaaaaaaaaaaaaaaaaaaaaaaaaaaugcaucccccccccccccccccccccccccccccccaaaggcucuuuucagagccaccagaauu

SEQ ID NO: 7179 - RNA, 1855 nt, Artificial Sequence
  mRNA product Design i-2 comprising derived and/or modified sequence from LASV(LASV1000-NIG-2009;Clade II)__AIT17782__GPCstabilized (opt5)
ggggcgcugccuacggagguggcagccaucuccuucucggcaucaagcuuaccaugggccagaucauuaccuucuuucaagaggugccccacgucaucgaagagguuaugaacauugugcugaucgcccucagccugcuugcuauucugaaggggaucuacaauguggccacaugcggacucuucggccuggucuccuuucuucugcucugugggagaucuugcagcacgaccuauaaaggaguguacgaacugcagacacuggagcucgacauggcgucccugaacaugaccaugccucuuucuuguacaaagaauaacagccaucacuauaucaugguuggcaaugaaaccgggcuggagcucacacugaccaacacguccauuaucaaucauaaauucugcaaccuuucugaugcucacaagaaaaaucuguacgaccaugcccucaugagcauuaucuccaccuuucaccugagcauuccgaacuucaaucaguaugaggccaugucuugugauuuuaacggaggcaagaucuccgugcaguacaaucugagccacacauaugcugucgacgccgcuaaccauugcggcaccauugccaauggggugcuccaaacauucaugcggauggcguggggaggcucuuacaucgcccuggauuccgggugcggaagcugggacuguaucaugaccucuuaccaguaucuuauuauccagaacacgacaugggaagaucacugccaguuuucccgccccagcccuauuggcuaccuggggcuccugucccaaagaacccgggacaucuauauuucucgcagacgccggggaacauucaccuggacccucagcgauuccgagggcaacgaaacacccggcggguacugucugacgcgguggaugcugaucgaggcugagcucaaaugcuuuggaaauaccgccguugcuaaguguaacgaaaaacaugacgaggaguucugcgauaugcugcgccuuuuugacuucaauaagcaggccaucaaaagacugaagacacccgcgcagaugagcauucagcucaucaacaaggccgugaaugcucugauuaacgaucaacuuaucaugaaaaaucaucugcgggacauuaugugcaucccuuauugcaacuacucuaaguauugguaccucaaucacaccgucacagggaaaaccucccugccccgcuguuggcuggugagcaacggaucuuaccucaaugaaacgcacuucagcgacgauaucgagcagcaggccgacaacaugauuacagagcugcuucaaaaggaauauaucgauagacagggcaaaaccccucuggggcucguggaccuguuugucuucuccaccucuuuuuaccugauuagcaucuuccuucaccucguuaagauuccgacacaucggcacguggugggaaaacccugcccuaagccccaucgccugaaucacaugggcaucuguuccugcggccuguauaagcacccugggguccccgugaaauggaagagaugaggacuagugcaucacauuuaaaagcaucucagccuaccaugagaauaagagaaagaaaaugaagaucaauagcuuauucaucucuuuuucuuuuucguugguguaaagccaacacccugucuaaaaaacauaaauuucuuuaaucauuuugccucuuuucucugugcuucaauuaauaaaaaauggaaagaaccuagaucuaaaaaaaaaaaaaaaaaaaaaaaaaaaaaaaaaaaaaaaaaaaaaaaaaaaaaaaaaaaaaaaaugcaucccccccccccccccccccccccccccccccaaaggcucuuuucagagccaccagaauu

SEQ ID NO: 7180 - RNA, 1855 nt, Artificial Sequence
  mRNA product Design i-2 comprising derived and/or modified sequence from LASV(LASV221-NIG-2010;Clade II)__AIT17624__GPCstabilized (opt5)
ggggcgcugccuacggagguggcagccaucuccuucucggcaucaagcuuaccaugggccagaucauuaccuucuuucaagaggugccccacgucaucgaagagguuaugaacauugugcugaucgcccucagccugcuugcuauucugaaggggaucuacaauguggccacaugcggacucuucggccuggucuccuuucuucugcucugugggagaucuugcagcacgaccuauaaaggaguguacgaacugcagacacuggagcucgacauggcgucccugaacaugaccaugccucuuucuuguacaaagaauaacagccaucacuauaucaugguuggcaaugaaaccgggcuggagcucacacugaccaacacguccauuaucaaucauaaauucugcaaccuuucugaugcucacaagaaaaaucuguacgaccaugcccucaugagcauuaucuccaccuuucaccugagcauuccgaacuucaaucaguaugaggccaugucuugugauuuuaacggaggcaagaucuccgugcaguacaaucugagccacacauaugcuauugacgccgcuaaccauugcggcaccaucgccaaugggguccuccaaacauucaugcggauggcguggggaggcucuuacaucgcccuggauuccgggugcggaagcugggacuguauuaugaccucuuaccaguaucuuaucauucagaacacgacaugggaagaucacugccaguuuucccgccccagcccuaucggcuaccuggggcuccugucccaaagaacccgggacauuuauaucucucgcagacgccggggaacauucaccuggacccucagcgauuccgagggcaacgaaacacccggcggguacugucugacgcgguggaugcugaucgaggcugagcucaaaugcuuuggaaauaccgccguggcuaaguguaacgaaaaacaugacgaggaguucugcgauaugcugcgccuuuuugacuucaauaagcaggccauuagacggcugaaaacacccgcgcagaugagcauccagcucauuaacaaggccguuaaugcucugaucaacgaucaacuuauuaugaagaaucaucugcgcgacaucaugugcaucccuuauugcaacuacucuaaauauugguaccucaaucacaccgugacagggaagaccucccugcccagauguuggcuggucagcaacggaucuuaccucaaugaaacgcacuucagcgacgauauugagcagcaggccgacaacaugaucacagagaugcugcaaaaagaauauauggaucggcagggcaagaccccucuugggcugguggaccucuuuguguucuccaccucuuuuuaccugauuagcaucuuccugcaccuugucaaaauuccgacacaucgccacguuaucggaaagcccugcccuaaaccccauagacucaaucacaugggcauuuguuccugcggccuguauaagcacccuggggugcccgugaaguggaaacggugaggacuagugcaucacauuuaaaagcaucucagccuaccaugagaauaagagaaagaaaaugaagaucaauagcuuauucaucucuuuuucuuuuucguugguguaaagccaacacccugucuaaaaaacauaaauuucuuuaaucauuuugccucuuuucucugugcuucaauuaauaaaaaauggaaagaaccuagaucuaaaaaaaaaaaaaaaaaaaaaaaaaaaaaaaaaaaaaaaaaaaaaaaaaaaaaaaaaaaaaaaaugcaucccccccccccccccccccccccccccccccaaaggcucuuuucagagccaccagaauu

SEQ ID NO: 7181 - RNA, 1855 nt, Artificial Sequence
  mRNA product Design i-2 comprising derived and/or modified sequence from LASV(LASV237-NIG-2010;Clade II)__AIT17638__GPCstabilized (opt5)
ggggcgcugccuacggagguggcagccaucuccuucucggcaucaagcuuaccaugggccagaucauuaccuucuuucaagaggugccccacgucaucgaagagguuaugaacauugugcugaucgcccucagccugcuugcuauucugaaggggaucuacaauguggccacaugcggacucuucggccuggucuccuuucuucugcucugugggagaucuugcagcacgaccuauaaaggaguguacgaacugcagacacuggagcucgacauggcgucccugaacaugaccaugccucuuucuuguacaaagaauaacagccaucacuauaucaugguuggcaaugaaaccgggcuggagcucacacugaccaacacguccauuaucaaucauaaauucugcaaccuuucugaugcucacaagaaagaccuguacgaucaugcccucaugagcauuaucuccaccuuucaccugagcauuccgaauuucaaccaguaugaggccaugucuugugacuuuaauggaggcaagaucuccgugcaguacaaccugagccacacauaugcugucgaugccgcuaaucauugcggcaccauugccaacggggugcuccaaacauucaugcggauggcguggggaggcucuuacaucgcccuggacuccgggugcggaagcugggauuguaucaugaccucuuaccaguaucuuauuauccagaauacgacaugggaagaccacugccaguuuucccgccccagcccuauuggcuaccuggggcuccugucccaaagaacccgggauaucuauauuucucgcagacgccggggaacauucaccuggacccucagcgacuccgagggcaacgaaacacccggcggguacugucugacgcgguggaugcugaucgaggcugagcucaaaugcuuuggaaacaccgccguugcuaaguguaaugaaaaacaugaugaggaguucugcgacaugcugcgccuuuuugauuucaacaagcaggccaucagacggcugaaaacacccgcgcagaugagcauucagcucaucaauaaggccgugaacgcucugauuaaugaccaacuuaucaugaagaaccaucugcgcgacauuaugugcaucccuuauugcaauuacucuaaauauugguaccucaaccacaccgucacagggaagaccucccugcccagauguuggcuggugagcaauggaucuuaccucaacgaaacgcacuucagcgaugacaucgagcagcaggccgauaauaugauuacagagcugcuucaaaaagaauauauggaccggcagggcaagaccccucuggggcucguggaucuguuugucuucuccaccucuuuuuaccugaucagcauuuuccuucaccucaucaaaauuccgacacaucgccacaucaccggaaagcccugcccuaaaccccauagacugaaccacaugggcauuuguuccugcggccuguauaagcacccugggguucccgugaaguggaaacggugaggacuagugcaucacauuuaaaagcaucucagccuaccaugagaauaagagaaagaaaaugaagaucaauagcuuauucaucucuuuuucuuuuucguugguguaaagccaacacccugucuaaaaaacauaaauuucuuuaaucauuuugccucuuuucucugugcuucaauuaauaaaaaauggaaagaaccuagaucuaaaaaaaaaaaaaaaaaaaaaaaaaaaaaaaaaaaaaaaaaaaaaaaaaaaaaaaaaaaaaaaaugcaucccccccccccccccccccccccccccccccaaaggcucuuuucagagccaccagaauu

SEQ ID NO: 7182 - RNA, 1855 nt, Artificial Sequence
  mRNA product Design i-2 comprising derived and/or modified sequence from LASV(LASV253-NIG-2011;Clade II)__AIT17670__GPCstabilized (opt5)
ggggcgcugccuacggagguggcagccaucuccuucucggcaucaagcuuaccaugggccagaucauuaccuucuuucaagaggugccccacgucaucgaagagguuaugaacauugugcugaucgcccucagccugcuugcuauucugaaggggaucuacaauguggccacaugcggacucuucggccuggucuccuuucuucugcucugugggagaucuugcagcacgaccuauaaaggaguguacgaacugcagacacuggagcucgacauggcgucccugaacaugaccaugccucuuucuuguacaaagaauaacagccaucacuauaucaugguuggcaaugaaaccgggcuggagcucacacugaccaacacguccauuaucaaucauaaauucugcaaccuuucugaugcucacaagaaaaaucuguacgaccaugcccucaugagcauuaucuccaccuuucaccugagcauuccgaacuucaaucaguaugaggccaugucuugugauuuuaacggaggcaagaucuccgugcaguacaaucugagccacacauaugcugucgacgccgcuaaccauugcggcaccauugccaauggggugcuccaaacauucaugcggauggcguggggaggcucuuacaucgcccuggauuccgggugcggaagcugggacuguaucaugaccucuuaccaguaucuuauuauccagaacacgacaugggaagaucacugccaguuuucccgccccagcccuauuggcuaccuggggcuccugucccaaagaacccgggacaucuauauuucucgcagacgccggggaacauucaccuggacccucagcgauuccgagggcaacgaaacacccggcggguacugucugacgcgguggaugcugaucgaggcugagcucaaaugcuuuggaaauaccgccguugcuaaguguaacgaaaaacaugacgaggaguucugcgauaugcugcgccuuuuugacuucaauaagcaggccaucagacggcugaaagcgcccgcccagaugagcauucagcucaucaacaaggcugugaaugcccugauuaacgaucaacuuaucaugaagaaucaucugcgcgacauuaugugcaucccuuauugcaacuacucuaaauauugguaccucaaucacacagucaccgggagaacaucccugccccgguguuggcuggugagcaacggaucuuaccucaaugaaacccacuucagcgacgauaucgagcagcaggcugacaacaugauuacggagcugcuucaaaaggaauauaucgaucgccagggcaaaacaccucuggggcucguggaccuguuugucuucuccaccucuuuuuaccugauuagcaucuuccuucaccucguuaagauuccgacccauagacacaucauuggaaaacccugcccuaagccccaucggcugaaucacaugggcaucuguuccugcggccuguauaaacacccuggggugcccgugaaguggaagcgcugaggacuagugcaucacauuuaaaagcaucucagccuaccaugagaauaagagaaagaaaaugaagaucaauagcuuauucaucucuuuuucuuuuucguugguguaaagccaacacccugucuaaaaaacauaaauuucuuuaaucauuuugccucuuuucucugugcuucaauuaauaaaaaauggaaagaaccuagaucuaaaaaaaaaaaaaaaaaaaaaaaaaaaaaaaaaaaaaaaaaaaaaaaaaaaaaaaaaaaaaaaaugcaucccccccccccccccccccccccccccccccaaaggcucuuuucagagccaccagaauu

SEQ ID NO: 7183 - RNA, 1855 nt, Artificial Sequence
  mRNA product Design i-2 comprising derived and/or modified sequence from LASV(LASV254-NIG-2011;Clade II)__AIT17674__GPCstabilized (opt5)
ggggcgcugccuacggagguggcagccaucuccuucucggcaucaagcuuaccaugggccagaucauuaccuucuuucaagaggugccccacgucaucgaagagguuaugaacauugugcugaucgcccucagccugcuugcuauucugaaggggaucuacaauguggccacaugcggacucuucggccuggucuccuuucuucugcucugugggagaucuugcagcacgaccuauaaaggaguguacgaacugcagacacuggagcucgacaugaccaaccugaauaugacaaugccucuuuccuguaccaagaacaauucucaucacuauaucaugguuggcaacgaaacagggcuggagcucacccugacgaauaccagcauuaucaaccauaaauucugcaaucuuuccgaugcgcacaagaaaaaccuguacaaucaugcucucaugucuauuaucagcacauuucaccuguccauuccgaacuucaaucaguaugaggccaugagcugugacuuuaacggaggcaagaucucugugcaguacaaucugucccacagcuaugccgucgaugcugccaaccauugcggcaccauugcuaacggggugcuccaaacauucaugcggauggccuggggaggcucuuacaucgcgcuggacuccgggugcggaaauugggauuguaucaugaccagcuaccaguaucuuauuauccagaacacgacaugggaagaccacugccaguuuucucgccccuccccuauuggcuaccuggggcuccugagccaaagaacccgggauaucuauauuucccgcagacgccggggaacauucaccuggacccucucugacagcgagggcaaugaaacacccggcggguacugucugacgcgguggaugcugaucgaggccgagcucaaaugcuuuggaaacaccgcuguugccaaguguaaugaaaaacaugaugaggaguucugcgacaugcugcgccuuuuugauuucaacaagcaggcuaucagacggcugaaaacacccgcccaggcgaauauucagcucaucaacaaggccgugaaugcucugauuaacgaccaacuuaucaugaagaaucaucugcgcgauauuaugugcaucccuuauugcaacuacuccaaauauugguaccucaaucacaccgucacagggaagaccagccugcccagauguuggcuggugucuaacggauccuaccucaaugaaacgcacuucagcgacgacaucgagcagcaggccgauaacaugauuacagagcugcuucaaaaagaauauauggaccggcagggcaagaccccucuggggcucguggaucuguuugucuucucuaccagcuuuuaccugaucuccauuuuccuucaccucguuaaaaucccgacacaucgccacgugauuggaaagcccugcccuaaaccccauagacugaaccacaugggcaucuguucuugcggccuguauaagcacccuggggugcccgucaaguggaaacggugaggacuagugcaucacauuuaaaagcaucucagccuaccaugagaauaagagaaagaaaaugaagaucaauagcuuauucaucucuuuuucuuuuucguugguguaaagccaacacccugucuaaaaaacauaaauuucuuuaaucauuuugccucuuuucucugugcuucaauuaauaaaaaauggaaagaaccuagaucuaaaaaaaaaaaaaaaaaaaaaaaaaaaaaaaaaaaaaaaaaaaaaaaaaaaaaaaaaaaaaaaaugcaucccccccccccccccccccccccccccccccaaaggcucuuuucagagccaccagaauu

SEQ ID NO: 7184 - RNA, 1855 nt, Artificial Sequence
  mRNA product Design i-2 comprising derived and/or modified sequence from LASV(Nig08-A19;Clade III)__ADU56618__GPCstabilized (opt5)
ggggcgcugccuacggagguggcagccaucuccuucucggcaucaagcuuaccaugggccagaucgugaccuucuuucaagaggucccccacguuauugaagaggugaugaacaucgugcugauugcccucagcauccuggcuauucuuaaggggcuguacaauaucgccacaugcggacucaucggccuggucacguuccuucugcucuccgggagaucuuguagcaugaccuauaaaggaguguacgaacugcagacacuggagcucaacaugaauacccugaacaugacaaugccucuuuccugcaccaagaauaacucucaucacuauauuaugguuggcaaugaaacagggcuggagcucacccugacgaacaccagccuucugcaucacaaauuuuguaaucucuccgacgcgcauaagaaaaaccuguacgaucacacacugaugucuaucauuagcaccuuccaccucuccaucccgaauuuuaaccaguaugaggcuaugagcugcgacuucaauggaggcaagauuacagugcaguacaaccugucucauuccuaugccaucgaugccgcuaaucacuguggcaccgucgccaacggggugcuucaaacguuuaugcggauggcuuggggaggcagcuacauugcccuggacucugggugcggaaagugggauugcaucaugacauccuaccaguaucucaucauucagaacaccacaugggaagaccauugucaguucagcagacccucuccuaucggcuaccuggggcuucugucccaacggacccgcgauauuuauaucagcagacggcgccggggaaccuuuacauggacgcuguccgacucugagggcaaugaaacccccggcggguacugccucacacgcuggaugcugauugaggcggagcuuaaauguuucggaaacaccgccguugcuaagugcaaugaaaaacacgaugaggaauuuugugacaugcugagacucuucgauuuuaacaagcaggccauccggcgccugaaagcucccgcccagaugagcauccagcuuauuaauaaggcggugaacgcccugaucaaugaccaacucauuaugaagaaccaccugagagauaucaugugcauuccuuauugcaauuacuccaaauauugguaccugaaccauacaagcaccgggcggacgucucucccccgcugcuggcuggucuccaauggaagcuaccuuaacgaaacacacuucucugacgacaucgagcagcaggcugauaauaugaucaccgagaugcugcaaaaggaauaucucgacagacagggcaaaaccccucuggggcugguggaucuuuucguguuuagcacauccuucuaccucauuucuaucuuucugcaucuggucaagauuccgacccaccggcauaucguuggaaaacccuguccuaagccccaccgccucaaccacaugggcauuugcagcuguggccuguauaaacagccuggggugcccgugagauggaagcggugaggacuagugcaucacauuuaaaagcaucucagccuaccaugagaauaagagaaagaaaaugaagaucaauagcuuauucaucucuuuuucuuuuucguugguguaaagccaacacccugucuaaaaaacauaaauuucuuuaaucauuuugccucuuuucucugugcuucaauuaauaaaaaauggaaagaaccuagaucuaaaaaaaaaaaaaaaaaaaaaaaaaaaaaaaaaaaaaaaaaaaaaaaaaaaaaaaaaaaaaaaaugcaucccccccccccccccccccccccccccccccaaaggcucuuuucagagccaccagaauu

SEQ ID NO: 7185 - RNA, 1858 nt, Artificial Sequence
  mRNA product Design i-2 comprising derived and/or modified sequence from LASV(G1180-SLE-2010;Clade IV)__AIT17168__GPCstabilized (opt5)
ggggcgcugccuacggagguggcagccaucuccuucucggcaucaagcuuaccaugggccagaucgugaccuucuuucaagaggucccccacguuauugaagaggugaugaacaucgugcugauugcccucagcauccuggcuguccuuaaggggcuguacaauuucgccacaugcggacucgugggccugcuuacguuucugcuccugugugggagauccugcaccgcgucucgguauaaaggaguuuacgaacugcagacacucgagcugaacauggaaacccuuaauaugacaaugccucugagcuguaccaagaacaauucccaucacuauauuauggugggcaacgagacagggcucgagcugacccuuacgaauaccucuaucaucaaccauaaauucugcaaucugagcgacgcucacaagaaaaaccucuacgaucaugcccugauguccauuaucucuacauuucaccugagcauuccgaauuucaaccaguaugaagccauguccugugacuuuaauggaggcaagaucagcguccaguacaaccucucucacuccuaugcuggcgaugccgcuaaucauugcgggaccguggccaacggaguucugcaaacauucaugcgcauggcguggggcgggagcuacauugcccuugacucuggaugcggcuccugggauuguaucaugaccagcuaccaguaucugauuauccagaacacgacaugggaggaccauugccaguuuucuagacccuccccuaucggguaccucggacugcuuagccaacggacccgcgauauuuauaucuccagacggcgccggggcacauucaccuggacccugucugacagcgaaggcaaggauacacccgggggauacugucugacgcgcuggaugcucauugaggcugagcugaaaugcuuuggcaauaccgccguggcuaaguguaacgaaaaacacgacgaggaguucugcgauaugcuuagacuguuugacuucaauaagcaggccauccagcggcucaaagcgcccgcccagauguccauucaacugaucaacaaggcugucaaugcccuuaucaacgaucagcugauuaugaagaaucaccuccgcgacaucaugugcauuccuuauugcaacuacagcaaauauugguaccugaaucauacaaccacaggaaagaccucucugcccaaauguuggcucguguccaacggcagcuaccugaaugaaacgcacuucucugacgauaucgagcagcaagcugacaacaugauuacagagaugcuucagaaggaauauauggagagacaggggaaaaccccucugggacucguggaucuguuugucuucagcaccuccuuuuaccugaucucuaucuuccuucaucucguuaagauuccgacacaccggcauaucgugggcaaaagcugccccaagccucaccgccugaaucacaugggcauuuguuccugcgggcuguauaagcagcccggagugccugucaaauggaagagaugaggacuagugcaucacauuuaaaagcaucucagccuaccaugagaauaagagaaagaaaaugaagaucaauagcuuauucaucucuuuuucuuuuucguugguguaaagccaacacccugucuaaaaaacauaaauuucuuuaaucauuuugccucuuuucucugugcuucaauuaauaaaaaauggaaagaaccuagaucuaaaaaaaaaaaaaaaaaaaaaaaaaaaaaaaaaaaaaaaaaaaaaaaaaaaaaaaaaaaaaaaaugcaucccccccccccccccccccccccccccccccaaaggcucuuuucagagccaccagaauu

SEQ ID NO: 7186 - RNA, 1858 nt, Artificial Sequence
  mRNA product Design i-2 comprising derived and/or modified sequence from LASV(G1442-SLE-2011;Clade IV)__AIT17180__GPCstabilized (opt5)
ggggcgcugccuacggagguggcagccaucuccuucucggcaucaagcuuaccaugggccagaucgugaccuucuuucaagaggucccccacguuauugaagaggugaugaacaucgugcugauugcccucagcauccuggcuguccuuaaggggcuguacaauguggccacaugcggacucauuggccugguuacguuccuucugcucugugggagauccugcaccacaacccuguauaaaggaguguacgaacugcagacacucgagcugaacauggaaacccuuaauaugacaaugccucugucuuguaccaagaacaauagccaucacuauauccgggucggcaacgagacggggcucgagcugacccuuacaaauaccuccaucauuaaccauaaauuuugcaaucugucugacgcgcacaagaaaaaccucuacgaucaugcucugaugagcaucauuuccacauuccaccugucuaucccgaauuuuaaccaguaugaagccaugagcugugacuucaauggaggcaagauuuccgugcaguacaaccucagccacucuuaugccggcgaugcugccaaucauugcgggaccguugcuaacggagugcugcaaacguuuaugcgcauggccuggggcggguccuacaucgcgcuugacagcggaugcggcaacugggauuguauuaugacaucuuaccaguaucugaucauccagaauaccacaugggacgaucacugccaguucucccggcccagcccuauuggguaccucggacugcuuucucaacgcaccagagacgucuauaucucccggcgccgccggggcaccuuuacauggacgcugagcgauuccgagggcaaggacacccccgggggauacugucugacaagauggaugcucauugaagccgagcugaaaugcuucggcaacaccgcuguggccaaguguaaugagaaacaugaugaagaguuuugcgacaugcuucggcuguucgauuuuaacaagcaggcuauccagcgccucaaagcccccgcgcagaugucuauucaacugaucaauaaggccgugaacgcucuuaucaaugaccagcugauuaugaagaaccaccucagagacaucaugugcauuccuuauugcaauuacagcaaauauugguaccugaacaauacagccaccggaaagacgucccugcccaaauguuggcucaucagcaacggcucuuaccugaaugagacacacuucuccgaugacauugaacaggaggcugauaacaugaucaccgagaugcuucaaaaggaauauauggagcggcaggggaaaaccccucugggacucgucgaccuguucguuuuuagcacaucuuucuaccugaucagcauuuuucuucaucucgugaagaucccgacccaccgccauauugugggcaaauccugccccaagccucacagacugaaucauaugggcaucuguucuugcgggcuguauaagcagcccggagucccugugcgguggaaacgcugaggacuagugcaucacauuuaaaagcaucucagccuaccaugagaauaagagaaagaaaaugaagaucaauagcuuauucaucucuuuuucuuuuucguugguguaaagccaacacccugucuaaaaaacauaaauuucuuuaaucauuuugccucuuuucucugugcuucaauuaauaaaaaauggaaagaaccuagaucuaaaaaaaaaaaaaaaaaaaaaaaaaaaaaaaaaaaaaaaaaaaaaaaaaaaaaaaaaaaaaaaaugcaucccccccccccccccccccccccccccccccaaaggcucuuuucagagccaccagaauu

SEQ ID NO: 7187 - RNA, 1858 nt, Artificial Sequence
  mRNA product Design i-2 comprising derived and/or modified sequence from LASV(G3010-SLE-2013;Clade IV)__AIT17344__GPCstabilized (opt5)
ggggcgcugccuacggagguggcagccaucuccuucucggcaucaagcuuaccaugggccagaucgugaccuucuuucaagaggucccccacguuauugaagaggugaugaacaucgugcugauugcccucagcauccuggcuguccuuaaggggcuguacaauuucgccacaugcggacucgugggccugguuacguuucuucugcucugugggagauccugcaccacaucucuguauaaaggaguguacgaacugcagacccucgagcugaacauggaaacacuuaauaugaccaugccucugagcuguacaaagaacaauucccaucacuauauuauggucggcaacgagaccgggcucgagcugacgcuuaccaauacaucuaucaucaaccauaaauucugcaaucugagcgacgcgcacaagaaaaaccucuacaaucaugcucugauguccauuaucucuaccuuucaccugagcauuccgaacuucaaucaguaugaagccauguccugugauuuuaacggaggcaagaucagcgugcaguacaaucucucucacuccuaugccggcgacgcugccagccauugcgggacaguugcuaacggagugcugcaaaccuucaugcggauggccuggggcgggucuuacauugcgcuugauuccggaugcggcaagugggacuguaucaugacgagcuaucaguaccugauuauccagaacacaaccugggaggaucacugccaguuuucucgccccuccccuaucggguaucucggacugcuuagccaaagaacacgggacauuuacaucucccgcagacgccggggcaccuucaccuggacacugucugauagcgaaggcaaagacacgcccgggggauauugucugacccgguggaugcucauugaggccgagcugaagugcuuuggcaauacagcugucgccaaauguaacgaaaagcaugaugaggaguucugcgacaugcuucgccuguuugauuucaauaaacaggcuauccagagacucaagacccccgcccagauguccauucaacugaucaacaaggcggugaaugcccuuaucaacgaccagcugauuaugaaaaaucaccuccgggauaucaugugcauuccuuacugcaacuauagcaaguacugguaccugaaucacacaaccacgggaaaaacaucucugcccaaguguuggcucguguccaacggcagcuaucugaaugaaacccauuucucugacgacaucgagcagcaagcugauaacaugauuaccgagaugcuucagaaagaauacauggagcgccaggggaagacaccucugggacucgucgaccuguuuguuuucagcaccuccuuuuaucugaucucuaucuuccuucaccucgugaaaauuccgacacauagacacaucgugggcaagagcugccccaagccucaucggcugaaucacaugggcauuuguuccugcgggcuguacaaacagcccggagucccugugcgcuggaagagaugaggacuagugcaucacauuuaaaagcaucucagccuaccaugagaauaagagaaagaaaaugaagaucaauagcuuauucaucucuuuuucuuuuucguugguguaaagccaacacccugucuaaaaaacauaaauuucuuuaaucauuuugccucuuuucucugugcuucaauuaauaaaaaauggaaagaaccuagaucuaaaaaaaaaaaaaaaaaaaaaaaaaaaaaaaaaaaaaaaaaaaaaaaaaaaaaaaaaaaaaaaaugcaucccccccccccccccccccccccccccccccaaaggcucuuuucagagccaccagaauu

SEQ ID NO: 7188 - RNA, 1858 nt, Artificial Sequence
  mRNA product Design i-2 comprising derived and/or modified sequence from LASV(G502-SLE-2009;Clade IV)__AIT17126__GPCstabilized (opt5)
ggggcgcugccuacggagguggcagccaucuccuucucggcaucaagcuuaccaugggccagaucgugaccuucuuucaagaggucccccacguuauugaagaggugaugaacaucgugcugauugcccucagcauccuggcuguccuuaaggggcuguacaauuucgccacaugcggacucgugggccugcuuacguuucugcuccugugugggagauccugcaccacaggacuguauaaaggcguuuacgaacuccagacccuggagcuuaacauggaaacacugaauaugaccaugccucucucuuguacaaagaacaauagccaucacuauauuaugguggggaacgagaccggacuggagcuuacgcugaccaauacauccaucaucaaccauaaauucugcaaucucucugacgcgcacaagaaaaaccuguacgaucaugcucugaugagcauuaucuccaccuuucaccucucuauuccgaauuucaaccaguaugaagccaugagcugugacuuuaauggcggcaagaucuccguccaguacaaccugagccacucuuaugccggggaugcugccgaccauugcggaacaguggcuaauggcguucuucaaaccuucaugcggauggccuggggaggguccuacauugcgcuggauagcggcugcgggagaugggacuguaucaugacgucuuaccaguaucucauuauccagaacacaaccugggaggaucacugccaguuuucccggcccagcccuaucggauaccugggccuucugucucaacgcacaagagacauuuauaucucccggcgccgccggggcaccuucaccuggacacugagcgauuccgaagggaaggacacgcccggaggcuacugucucaccagauggaugcugauugaggccgagcuuaaaugcuuugggaacacagcuguggccaaguguaaugaaaaacaugaugaggaguucugcgacaugcugcggcucuuugauuucaacaagcaggcuauccagcgccugaaagcccccgcgcagaugucuauucaacuuaucaauaaggccgucaacgcucugaucaaugaccagcucgugaugaagaaccaccugagagacauuaugugcaucccuuauugcaauuacagccgguauugguaccugaaccacaccacaaccggccgcacgucccuccccaaauguuggcuggugagcaaugggucuuaccuuaacgaaacacauuucuccgaugacauugagcagcaagccgauaauaugaucaccgagaugcugcagaaggaauauauggagagacagggaaaaaccccucucggccuggucgaccuguuuguuuucagcacaucuuuuuaccuuauuagcaucuuccuccaccuggugaagaucccgacccaucggcacauugugggcaaauccugccccaagccucaucgccugaaccacauggggaucuguucuugcggacucuauaaacagcccggcgucccugugaaguggaagagaugaggacuagugcaucacauuuaaaagcaucucagccuaccaugagaauaagagaaagaaaaugaagaucaauagcuuauucaucucuuuuucuuuuucguugguguaaagccaacacccugucuaaaaaacauaaauuucuuuaaucauuuugccucuuuucucugugcuucaauuaauaaaaaauggaaagaaccuagaucuaaaaaaaaaaaaaaaaaaaaaaaaaaaaaaaaaaaaaaaaaaaaaaaaaaaaaaaaaaaaaaaaugcaucccccccccccccccccccccccccccccccaaaggcucuuuucagagccaccagaauu

SEQ ID NO: 7189 - RNA, 1858 nt, Artificial Sequence
  mRNA product Design i-2 comprising derived and/or modified sequence from LASV(G733-SLE-2010;Clade IV)__AIT17154__GPCstabilized (opt5)
ggggcgcugccuacggagguggcagccaucuccuucucggcaucaagcuuaccaugggccagaucgugaccuucuuucaagaggucccccacguuauugaagaggugaugaacaucgugcugauugcccucagcauccuggcuguccuuaaggggcuguacaauuucgccacaugcggaauugugggccucguuuccuuucugcuucugugugggagaucuugcacgaccagccucuauaaaggaguguacgaacugcagacacuggagcucaacauggaaacccugaauaugacaaugccucuuuccuguaccaagaacaauucucaucacuauaucauggucggcaacgagacagggcuggagcucacccugacgaauaccagcaucauuaaccauaaauucugcaaucuuuccgacgcgcacaagaaaaaccuguacgaucaugcucucaugucuaucauuagcacauuucaccuguccaucccgaauuucaaccaguaugaagccaugagcugugacuuuaauggaggcaagauuucugugcaguacaaccugucccacagcuaugccggcgaugcugccaaucauugcgggaccaucgcuaacggaguucuccaaacauucaugcggauggccuggggcgggucuuacauugcgcuggacuccggaugcgauagaugggacuguaucaugaccagcuaccaguaucuuaucauucagaacacgacaugggaggaucacugccaguuuucucggcccuccccuaucggcuaccuggggcuccugagccaacgcaccagagacauuuauaucucccggcgccgccggggaacauucaccuggacccucucugauagcgaaggcaaggacacacccggcggguacugucugacgagauggaugcugauugaggccgagcucaaaugcuuuggaaauaccgcuguggccaaguguaacgaaaaacaugaugaggaguucugcgacaugcugcggcuuuuugauuucaauaagcaggcuauccagcgccugaaagcccccgcgcagauguccauccaacucauuaacaaggccgucaaugcucugaucaacgaccagcuuauuaugaagaaucaccugagagacaucaugugcauuccuuauugcaacuacagcaaauauugguaccucaaucacacaaccacagggaagaccucucugcccaaauguuggcugguguccaacggaagcuaccucaaugaaacgcauuucucugaugacaucgagcagcaagccgauaacaugaucacagagaugcugcagaaggaauauauggagcggcagggcaaaaccccucuugggcugguggaccucuuugucuucagcaccuccuuuuaccugauuucuaucuuccugcaccuuguuaagauuccgacacaucgccacguggugggaaaaagcugccccaagccucauagacucaaucacaugggcaucuguuccugcggccuguaugggcagcccggagucccugugaaguggaaacggugaggacuagugcaucacauuuaaaagcaucucagccuaccaugagaauaagagaaagaaaaugaagaucaauagcuuauucaucucuuuuucuuuuucguugguguaaagccaacacccugucuaaaaaacauaaauuucuuuaaucauuuugccucuuuucucugugcuucaauuaauaaaaaauggaaagaaccuagaucuaaaaaaaaaaaaaaaaaaaaaaaaaaaaaaaaaaaaaaaaaaaaaaaaaaaaaaaaaaaaaaaaugcaucccccccccccccccccccccccccccccccaaaggcucuuuucagagccaccagaauu

SEQ ID NO: 7190 - RNA, 1858 nt, Artificial Sequence
  mRNA product Design i-2 comprising derived and/or modified sequence from MOPV/LASV reassortant(IGS-1;Clade IV)__AFY05576__GPCstabilized (opt5)
ggggcgcugccuacggagguggcagccaucuccuucucggcaucaagcuuaccaugggccagaucgugaccuucuuucaagaggucccccacguuauugaagaggugaugaacaucgugcugauugcccucagcguccuggcugugcuuaaggggcuguacaauuucgccacaugcggacucguuggccuggugacguuucuucugcucugugggagauccugcaccacaucucuguauaaaggagucuacgaacugcagacccucgagcugaacauggaaacacuuaauaugaccaugccucugagcuguacaaagaacaauucccaucacuauaucauggugggcaacgagaccgggcucgagcugacgcuuaccaauacaucuauuaucaaccauaaauucugcaaucugagcgacgcgcacaagaaaaaccucuacgaucaugcucugauguccaucauuucuaccuuucaccugagcaucccgaauuucaaccaguaugaagccauguccugugacuuuaauggaggcaagauuagcguucaguacaaccucucucacuccuaugccggcgaugcugccaaucauugcgggacaguggcuaacggaguccugcaaaccuucaugcggauggccuggggcgggagcuacaucgcgcuugacucuggaugcggcaacugggauuguauuaugacguccuaccaguaucugaucauucagaauacaaccugggaggaccacugccaguuuagcagacccucuccuaucggguaccucggacugcuuucccaacggacacgcgauaucuauauuagcagacggcgccggggcaccuucaccuggacacuguccgacucugaaggcgaggauacgcccgggggauacugucugacccgcuggaugcucaucgaggccgaacugaagugcuuuggcaacacagcuguggccaaauguaaugagaagcaugacgaagaguucugcgauaugcuuagacuguuugacuucaacaaacaggcuauucagcggcucaaggcccccgcgcagaugagcauccaacugauuaauaaagccgugaacgcucuuaucaaugaucagcugaucaugaagaaccaccuccgcgacauuaugugcaucccuuauugcaauuacuccaaguauugguaccugaaccacaccacaaccggaagaacgagccugcccaaauguuggcucgucucuaauggcuccuaccugaacgagacacauuucagcgacgauauugagcagcaagccgacaauaugaucaccgaaaugcuucagaaggaguauauggaacggcaggggaaaaccccucugggacucguugaucuguuuguguucucuaccagcuuuuaccugauuuccaucuuccuucaccucgugaagaucccgacacaucgccacauugucggcaaaucuugccccaagccucauagacugaaccacaugggcaucuguagcugcgggcuguauaaacagcccggagugccuguuaaguggaagcggugaggacuagugcaucacauuuaaaagcaucucagccuaccaugagaauaagagaaagaaaaugaagaucaauagcuuauucaucucuuuuucuuuuucguugguguaaagccaacacccugucuaaaaaacauaaauuucuuuaaucauuuugccucuuuucucugugcuucaauuaauaaaaaauggaaagaaccuagaucuaaaaaaaaaaaaaaaaaaaaaaaaaaaaaaaaaaaaaaaaaaaaaaaaaaaaaaaaaaaaaaaaugcaucccccccccccccccccccccccccccccccaaaggcucuuuucagagccaccagaauu

SEQ ID NO: 7191 - RNA, 1858 nt, Artificial Sequence
  mRNA product Design i-2 comprising derived and/or modified sequence from LASV(LM765-SLE-2012;Clade IV)__AIT17814__GPCstabilized (opt5)
ggggcgcugccuacggagguggcagccaucuccuucucggcaucaagcuuaccaugggccagaucgugaccuucuuucaagaggucccccacguuauugaagaggugaugaacaucgugcugauugcccucagcauccuggcuguccuuaaggggcuguacaauuucgccacaugcggacucgugggccugguuacguuucuucugcucugugggagauccugcaccacaucucuguauaaaggaguguacgaacugcagacccucgagcugaacauggaaacacuuaauaugaccaugccucugagcuguacaaagaacaauucccaucacuauauuauggucggcaacgagaccgggcucgagcugacgcuuaccaauacaucuaucaucgaccauaaauucugcaaccugagcgaugcgcaccggaagaaucucuacgaccaugcucugauguccauuaucucuaccuuucaccugagcauuccgaacuucaaucaguaugaagccauguccugugauuuuaacggaggcaaaaucagcgugcaguacaaucucucucacuccuaugccaaggacgcugccgaucauugcggcacaguugcuaacggggugcugcaaaccuucaugcgcauggccuggggaggcagcuacauugcgcuugacucugggugcggacggugggauuguaucaugacguccuaccaguaucugauuauccagaauacaaccugggaggaccacugccaguuuagccgccccucuccuaucggcuaccucgggcugcuuucccaaagaacacgggauauuuauaucagccgcagacgccggggaaccuucaccuggacacuguccgacucugaaggcaaggauacgcccggcggguacugucugacccgguggaugcucauugaggccgagcugaaaugcuuuggaaacacagcugucgccaaguguaacgaaaaacaugacgaggaguucugcgauaugcuucgccuguuugacuucaauaagcaggcuauccagagacucaaagcccccgcgcagaugagcauucaacugaucaacaaggccgugaaugcucuuaucaacgaccagcugauuaugaagaaucaccuccgggauaucaugugcauuccuuauugcaacuacuccaaauauugguaccugaaucacaccacaaccgggaagacgagccugcccaaauguuggcucgugucuaacggauccuaccugaaugaaacacauuucagcgacgauaucgagcagcaagccgacaacaugauuaccgagaugcuucagaaggaauauauggagcgccagggcaaaaccccucuggggcucgucgaucuguuuguuuucucuaccagcuuuuaccugaucuccaucuuccuucaccucgugaagauuccgacacauagacacaucgugggaaaacccugcccuaagccccaucggcugaaucacaugggcauuuguucuugcggccuguauaagcagccugggguccccgugaaauggaagcgcugaggacuagugcaucacauuuaaaagcaucucagccuaccaugagaauaagagaaagaaaaugaagaucaauagcuuauucaucucuuuuucuuuuucguugguguaaagccaacacccugucuaaaaaacauaaauuucuuuaaucauuuugccucuuuucucugugcuucaauuaauaaaaaauggaaagaaccuagaucuaaaaaaaaaaaaaaaaaaaaaaaaaaaaaaaaaaaaaaaaaaaaaaaaaaaaaaaaaaaaaaaaugcaucccccccccccccccccccccccccccccccaaaggcucuuuucagagccaccagaauu

SEQ ID NO: 7192 - RNA, 1858 nt, Artificial Sequence
  mRNA product Design i-2 comprising derived and/or modified sequence from LASV(LM776-SLE-2012;Clade IV)__AIT17824__GPCstabilized (opt5)
ggggcgcugccuacggagguggcagccaucuccuucucggcaucaagcuuaccaugggccagaucgugaccuucuuucaagaggucccccacguuauugaagaggugaugaacaucgugcugauugcccucagcauccuggcuguccuuaaggggcuguacaauuucgccacaugcggacucgugggccugguuacguuucuucugcucugugggagauccugcaccacaucuguguauaaaggagucuacgaacugcagacccuggagcucaacauggaaacacugaauaugaccaugccucuuagcuguacaaagaacaauucccaucacuauauuauggugggcaacgagaccgggcuggagcucacgcugaccaauacaucuaucaucaaccauaaauucugcaaucuuagcgacgcgcacaagaaaaaccuguacgaucaugcucucauguccauuaucucuaccuuucaccugagcauuccgaauuucaaccaguaugaagccauguccugugacuuuaauggaggcaagaucagcguucaguacaaccugucucacuccuaugccggcgaugcugccaaucauugcgggacaguggcuaacggaguccuccaaaccuucaugcggauggccuggggcgggagcuacauugcgcuggacucuggaugcggcaagugggauuguaucaugacguccuaccaguaucuuauuauccagaacacaaccugggaggaccauugccaguuuagccgccccucuccuaucggguaccugggacuccugucccaaagaacacgggauauuuauaucagccgcagacgccggggcaccuucaccuggacacucuccgacucugaaggcaaagauacgcccgggggauacugucugacccgguggaugcugauugaggccgagcucaagugcuuuggcaauacagcuguggccaaauguaacgaaaagcacgacgaggaguucugcgauaugcugcgccuuuuugacuucaauaaacaggcuauccagagacugaaggcccccgcgcagaugagcauucaacucaucaacaaggccgugaaugcucugaucaacgaucagcuuauuaugaaaaaucaucugcgggacaucaugugcauuccuuauugcaacuacuccaaguauugguaccucaaucacaccacaaccggaaaaacgagccugcccaaguguuggcuggucucuaacggcuccuaccucaaugaaacacacuucagcgacgauaucgagcagcaagccgacaacaugauuaccgagaugcugcagaaagaauauauggagcgccaggggaagaccccucuuggacugguugaucucuuuguguucucuaccagcuuuuaccugaucuccaucuuccugcaucuugugaaaauuccgacacacagacauaucgucggcaagucuugccccaagccucaccggcucaaucacaugggcauuuguagcugcgggcuguauaaacagcccggagugccuguucgcuggaagagaugaggacuagugcaucacauuuaaaagcaucucagccuaccaugagaauaagagaaagaaaaugaagaucaauagcuuauucaucucuuuuucuuuuucguugguguaaagccaacacccugucuaaaaaacauaaauuucuuuaaucauuuugccucuuuucucugugcuucaauuaauaaaaaauggaaagaaccuagaucuaaaaaaaaaaaaaaaaaaaaaaaaaaaaaaaaaaaaaaaaaaaaaaaaaaaaaaaaaaaaaaaaugcaucccccccccccccccccccccccccccccccaaaggcucuuuucagagccaccagaauu

SEQ ID NO: 7193 - RNA, 1858 nt, Artificial Sequence
  mRNA product Design i-2 comprising derived and/or modified sequence from LASV(Mad39;Clade IV)__ANH09722__GPCstabilized (opt5)
ggggcgcugccuacggagguggcagccaucuccuucucggcaucaagcuuaccaugggccagaucgugaccuucuuucaagaggucccccacguuauugaagaggugaugaacaucgugcugauugcccucagcauccuggcuguccuuaaggggcuguacaauguggccacaugcggacucauuggccugguuacguuccuucugcucugugggagauccugcaccacaacccuguauaaaggaguguacgaacugcaggcgcucgagcugaacauggaaacacuuaauaugaccaugccucugucuuguacaaagaacaauagccaucacuauauccgggucggcaacgagaccgggcucgagcugacgcuuaccaauacaucccugaucaaccauaaauuuugcaaucucucugacgcucacaagaaaaaccuguacgaucaugcccugaugagcauuaucuccaccuuccaccucucuauuccgaauuuuaaccaguaugaagccaugagcugugacuucaaugauggaaagaucuccgugcaguacaaccugagccacacauaugcuggcgacaccgccaaucauugcggcacgguugcuaacggggugcuucaaacauuuaugcgcauggccuggggaggcucuuacauugcgcuggauuccgggugcggaggcugggacuguaucaugaccagcuaccaguaucucauuauccagaacacaaccugggaggaucacugccaguucucucggcccuccccuaucggguaccugggacuucugagccaacgcaccagagacauuuauaucucucggcgccgccggggcacauuuacguggacccuguccgauagcgaaggcaaggacacacccgggggauacugucucaccagauggaugcugauugaggccgagcuuaaaugcuucggcaauacagcugucgccaaguguaacgaaaaacaugaugaggaauuuugcgacaugcugcgccucuucgauuuuaauaagcaggcuauccagcggcugaaagcccccgcgcagauguccauucaacuuaucaacaaggccgugaaugcucugaucaacgaccagcucauuaugaagaaucaccugagagacaucaugugcauuccuuauugcaacuacucuaaauauugguaccugaaucacaccgugacgggaaagacaagccuccccaaauguuggcuggucuccaacggcagcuaccuuaaugaaacccauuucucugaugacaucgagcagcaagccgauaacaugauuaccgagaugcugcagaaggaauauauggagcggcaggggaaaacaccucucggacugguugaccuguucguguuuuccaccagcuucuaccuuaucucuaucuuucuccaccuggugaagauuccgacacaucgccacgucgugggcaaacccugcccuaagccccauagacugaaucacaugggcaucuguagcugcggguucuauaagcagccuggaguucccgugcgguggaaacgcugaggacuagugcaucacauuuaaaagcaucucagccuaccaugagaauaagagaaagaaaaugaagaucaauagcuuauucaucucuuuuucuuuuucguugguguaaagccaacacccugucuaaaaaacauaaauuucuuuaaucauuuugccucuuuucucugugcuucaauuaauaaaaaauggaaagaaccuagaucuaaaaaaaaaaaaaaaaaaaaaaaaaaaaaaaaaaaaaaaaaaaaaaaaaaaaaaaaaaaaaaaaugcaucccccccccccccccccccccccccccccccaaaggcucuuuucagagccaccagaauu

SEQ ID NO: 7194 - RNA, 1858 nt, Artificial Sequence
  mRNA product Design i-2 comprising derived and/or modified sequence from LASV(Z0947-SLE-2011;Clade IV)__AIT17840__GPCstabilized (opt5)
ggggcgcugccuacggagguggcagccaucuccuucucggcaucaagcuuaccaugggccagaucgugaccuucuuucaagaggucccccacguuauugaagaggugaugaacaucgugcugauugcccucagcauccuggcuguccuuaaggggcuguacaauuucgccacaugcggacucgugggccugguuacguuucuucugcucugugggagauccugcaccauuucucuguauaaaggaguguacgaacugcagacacucgagcugaacauggaaacccuuaauaugacaaugccucugagcuguaccaagaacaauucccaucacuauaucauggucggcaacgagacagggcucgagcugacccuuacgaauaccucuaucauuaaccauaaauucugcaaucugagcgacgcgcacaagaaaaaccucuacgaucaugcucugauguccaucauuucuacauuucaccugagcaucccgaauuucaaccaguaugaagccauguccugugacuuuaauggaggcaagauuagcgugcaguacaaccucucucacuccuaugccggcgaugcugccaaucauugcgggaccguugcuaacggagugcugcaaacauucaugcggauggccuggggcgggagcuacaucgcgcuugacucuggaugcgauagaugggacuguauuaugaccuccuaccaguaucugaucauccagaacacgacaugggaggaucacugccaguuuagccggcccucuccuauuggcuaccucgggcugcuuucccaacgcaccagagacaucuauauuagccggcgccgccggggaacauucaccuggacccuguccgauucugaaggcaaggacacacccggcggguacugucugacgagauggaugcucaucgaggccgagcugaaaugcuuuggaaauaccgcugucgccaaguguaacgaaaaacaugaugaggaguucugcgacaugcuucggcuguuugauuucaauaagcaggcuauucagcgccucaaagcccccgcgcagaugagcauccaacugaucaacaaggccgugaaugcucuuauuaacgaccagcugaucaugaagaaucaccucagagacauuaugugcaucccuuauugcaacuacuccaaauauugguaccugaaucacacaaccacagggaagaccagccugcccaaauguuggcucgugucuaacggauccuaccugaaugaaacgcauuucagcgaugacauugagcagcaagccgauaacaugaucacagagaugcuucagaaggaauauauggagcggcagggcaaaaccccucuggggcucgucgaccuguuuguuuucucuaccagcuuuuaccugaucuccauuuuccuucaccucgugaagaucccgacacaucgccacauugugggaaaacccugcccuaagccccauagacugaaucacaugggcaucuguucuugcggccuguauaagcagccugggguccccgugaaauggaagcggugaggacuagugcaucacauuuaaaagcaucucagccuaccaugagaauaagagaaagaaaaugaagaucaauagcuuauucaucucuuuuucuuuuucguugguguaaagccaacacccugucuaaaaaacauaaauuucuuuaaucauuuugccucuuuucucugugcuucaauuaauaaaaaauggaaagaaccuagaucuaaaaaaaaaaaaaaaaaaaaaaaaaaaaaaaaaaaaaaaaaaaaaaaaaaaaaaaaaaaaaaaaugcaucccccccccccccccccccccccccccccccaaaggcucuuuucagagccaccagaauu

SEQ ID NO: 7195 - RNA, 1858 nt, Artificial Sequence
  mRNA product Design i-2 comprising derived and/or modified sequence from LASV(Josiah;Clade IV)__NP_694870__GPCstabilized (opt6)
ggggcgcugccuacggagguggcagccaucuccuucucggcaucaagcuuaccaugggacaaaucguuacauucuuucaagaaguaccccacguaauagaagaagucaugaacauaguacuaauagcacuaucaguucucgcaguacuaaaaggucuauauaauuuugcuacauguggcuuagucggccuaguaaccuuccuacuccuaugcggaagaucaugcaccacuucacucuacaaaggaguauacgaauuacaaacccuagaacuaaacauggaaacacuaaauaugacaaugccacuuucauguaccaaaaacaacagccaccacuauauaaugguaggaaaugaaacaggacuugaauuaacauuaaccaacacaucuauaaucaaucauaaauucugcaaccuaucagaugcacauaagaaaaauuuauacgaucacgcauuaaugucaauaauauccacauuccaccuaucaauaccaaacuuuaaucaauacgaagcaaugucuugcgauuucaacggaggaaaaauaucaguacaauacaaccuuucacacucuuaugcuggagacgcagcaaaucacuguggaacagucgcaaacggagucuuacaaacauuuaugagaauggcauggggaggaucuuacauagcacuagauucaggaugcggaaacugggacugcauaaugacaucauaccaauauuuaaucauacaaaacacaacaugggaagaccacugccaauucucaagaccaucaccuauaggauaccuaggacuuuuaucacaaagaacacgcgacauuuacauauccagaagaagaagaggcacuuucaccuggacacuaucagacucagaaggcaaagacacaccaggaggauacugcuuaacgagauggaugcuaauagaagcagaacuaaaaugcuucggcaacacagcaguagcaaaauguaacgaaaaacaugaugaagaauuuugcgacaugcucagacuauucgauuucaacaaacaagccauacaaagacuaaaagcuccugcacaaaugucaauacaacuaauaaauaaagcaguaaacgcacuaauaaacgaucaacuaauaaugaaaaaccaccuaagagacauaauguguaucccauacugcaacuauucaaaauacugguaccuaaaccacaccacaacaggaagaacaagccuaccaaaaugcuggcuaguaucaaacggaucauauuuaaaugaaacccacuucuccgaugauauagaacaacaagcagauaacaugauaacagaaaugcuacaaaaagaauacauggaacgacaaggaaaaacaccucugggccuaguagaccuauucguauucuccacaucauucuaccuaauauccauauucuuacaccuagucaaaauaccaacacacagacacauaguaggaaaauccugcccaaaaccccauagacucaaucauaugggaauaugcuccuguggacuauacaaacaaccgggaguaccaguaaaauggaaaagauaaggacuagugcaucacauuuaaaagcaucucagccuaccaugagaauaagagaaagaaaaugaagaucaauagcuuauucaucucuuuuucuuuuucguugguguaaagccaacacccugucuaaaaaacauaaauuucuuuaaucauuuugccucuuuucucugugcuucaauuaauaaaaaauggaaagaaccuagaucuaaaaaaaaaaaaaaaaaaaaaaaaaaaaaaaaaaaaaaaaaaaaaaaaaaaaaaaaaaaaaaaaugcaucccccccccccccccccccccccccccccccaaaggcucuuuucagagccaccagaauu

SEQ ID NO: 7196 - RNA, 1855 nt, Artificial Sequence
  mRNA product Design i-2 comprising derived and/or modified sequence from LASV(LP;Clade I)__AAF86701__GPCstabilized (opt6)
ggggcgcugccuacggagguggcagccaucuccuucucggcaucaagcuuaccaugggacagauaauaacuuucuuccaagaaguaccucacguaauagaagaaguaaugaacauaguauuaauugcacucucacuacucgccauacuaaaaggacuauacaauauugcuaccugcgguauaauuggauuaguagcauucuuauuccuaugcggaaaaucaugcucacuaacauuaaaaggaggauacgaacuacaaacacuagaacuaaauauggaaacacuaaauaugacaaugccacuaucauguacuaaaaacucaucacaccacuacauuagaguaggcaacgaaacgggacuagaauuaacccuuacgaauacaucuauaauaaaucauaaauuuugcaacuuaucagacgcacacaagaaaaaucuauacgaccacgcccuaaugucaauuauuucaacguuccaccuauccauaccaaacuucaaccaauacgaagcaaugucaugugacuucaaugguggcaaaaucuccguacaauacaauuuaucacacuccuacgcaggagaugcagcagaacauugcggcacaguagccaacggaguacuacaaacauuuaugagaauggcauggggcggcagauacauagcauuagauucaggaugcggcaauugggacugcauaaugacuucauaccaauaccuaauaauacaaaacacaacaugggaagaccacugucaauucucaagaccauccccaauaggauaccuaggacugcuuucccaaagaacaagagauauauauauaucacgacgaagacguggaacauucacauggacauuaucagacucagaaggaaacgaaacaccaggaggcuacugucuaacaagauggaugcuuauagaagcagaacuaaaaugcuucggaaauacagccguagcuaaaugcaacgaaaaacacgaugaagaauuuugcgacauguuaagacuuuucgacuucaauaaacaggcuauccgaagacuaaaagcucccgcacaaaugucaauccaacuaauaaacaaagccguaaacgcacuaauaaacgaccaacuaaucaugaaaaaccacuuaagagauauaaugugcauaccauauugcaauuacucuaaauacugguaccucaaucacacaucaucaggacgaacaucauuaccaaaauguuggcuaaucaguaacggaucauaccuuaaugaaacccaauuuucagacgacauagaacaacaagccgauaacaugaucacagaaaugcuacaaaaagaauauauagaacgacaaggaaaaaccccacucggucuaguagacauauucaucuuuucaacaucauucuaccuaauuuccauuuuccuacaccuaaucaaaauaccuacacaccgacacauaguaggaaaaccauguccaaaaccacauagacuaaaccacaugggaguaugcucaugcggauuauacaaacacccuggaguaccaacaaaauggaaaagauaaggacuagugcaucacauuuaaaagcaucucagccuaccaugagaauaagagaaagaaaaugaagaucaauagcuuauucaucucuuuuucuuuuucguugguguaaagccaacacccugucuaaaaaacauaaauuucuuuaaucauuuugccucuuuucucugugcuucaauuaauaaaaaauggaaagaaccuagaucuaaaaaaaaaaaaaaaaaaaaaaaaaaaaaaaaaaaaaaaaaaaaaaaaaaaaaaaaaaaaaaaaugcaucccccccccccccccccccccccccccccccaaaggcucuuuucagagccaccagaauu

SEQ ID NO: 7197 - RNA, 1855 nt, Artificial Sequence
  mRNA product Design i-2 comprising derived and/or modified sequence from LASV(803213;Clade II)__AAF86703__GPCstabilized (opt6)
ggggcgcugccuacggagguggcagccaucuccuucucggcaucaagcuuaccaugggacaaauaauaacauucuuucaagaagucccacacguaauugaagaaguuaugaauauaguacuaaucgcacuaucgcuauuagcaauacuaaaaggaaucuacaacguagcaacaugcggacuauuuggacucauauccuuucugcuauuaugcggcagauccugcucagucaccuauaaaggaguauaugaacuacaaacacuagaacuaaauauggcuaaucuuaauaugacaaugccacuaucaugcacaaaaaacaacucucaccacuauauaaugguaggaaaugaaaccggacuagagcuuacacuaacaaauaccuccauaauaaaccacaaauuuuguaacuuaucagacgcacacaaaaaaaacuuauacgaccacgcacuaaugucuauaauuagcacauuucacuuauccauaccuaacuuuaaccaauaugaagcaaugucaugcgauuuuaacggcggcaaaaucagcguacaauacaacuuaucccauucauuugccguagaugcagcuaaccacugcggaacaaucgcaaauggcguacuacaaacauucaugagaauggcauggggaggaucuuacauugcacuugauucagguugcggaaauugggacuguaucaugacaucauaucaauaucuaauaauacaaaacaccacaugggaagaccacugccaauucucaagaccaucaccaaucggauaccuaggacuauuaucacaaagaacaagagauauauacauaucaagaagacgaagaggaaccuuuaccuggacauuaucagauucagaaggaaacgaagcccccggaggauacugucucacaagauggaugcuuauagaagcagaacuaaaaugcuuuggaaauaccgccguagcaaaaugcaacgaaaaacacgaugaagaauucugugacaugcuacgacuauucgacuucaacaaacaagcuauaaaaagacuaaaaacaccagcacaaaugucaauccaacuaaucaauaaagcaguaaacgcacuaauaaacgaucaacucauaaugaaaaaccaccuaagagauauaauguguaucccauacuguaacuacuccagauacugguaccuaaaucacacaguaacaggaaaaacaucacuaccacgaugcuggcuaguaucuaacggaaguuacuuaaacgaaacacacuucucugacgauauagaacaacaagcagacaacaugauuacugaaaugcuacaaaaagaauacauggacagacaaggaaaaacaccauuaggacuaguagacuuauucguauucuccaccuccuucuaucuaauauccauauuccuccacuuaguaaaaauacccacacauagacacaucgucggaaaaccauguccaaaaccucaccgccucaaccacaugggaauauguuccugcggauuauacaaacaucccggcguaccagucaaauggaaaagauaaggacuagugcaucacauuuaaaagcaucucagccuaccaugagaauaagagaaagaaaaugaagaucaauagcuuauucaucucuuuuucuuuuucguugguguaaagccaacacccugucuaaaaaacauaaauuucuuuaaucauuuugccucuuuucucugugcuucaauuaauaaaaaauggaaagaaccuagaucuaaaaaaaaaaaaaaaaaaaaaaaaaaaaaaaaaaaaaaaaaaaaaaaaaaaaaaaaaaaaaaaaugcaucccccccccccccccccccccccccccccccaaaggcucuuuucagagccaccagaauu

SEQ ID NO: 7198 - RNA, 1855 nt, Artificial Sequence
  mRNA product Design i-2 comprising derived and/or modified sequence from LASV(GA391;Clade III)__CAA36645__GPCstabilized (opt6)
ggggcgcugccuacggagguggcagccaucuccuucucggcaucaagcuuaccaugggccaaauaguaacauuuuuccaagaaguaccacacguaauagaagaaguaaugaauaucguccuaauagcacucagcauauuagcaauauuaaaaggacuauauaaugucgcaacauguggacuaauaggucuagucacauuucucuuacuaucaggaagauccugcucccucauauacaaaggaacuuacgaauuacaaacucuagaauuaaacauggaaacacuaaacaugacaaugccacuaucauguaccaaaaacaauucacaccacuacauacgaguaggcaacgaaacaggccuagaauuaacauuaacaaacacaucuauacuaaaccauaaauuuuguaaccuauccgacgcacacaaaaggaaucuauacgaccauucacuaaugagcauaauaucuaccuuccaucuuucuauuccaaacuucaaccaauacgaagccaugucaugcgacuucaacggcggaaaaauaacaguacaauacaacuuaucacacucauucgcaguagaugcagcaggacacugcggaacacuagccaacggaguauuacaaacauucaugagaauggcauggggaggaucuuacauagcacuagacucuggaugcgguaacugggacugcauuaugacaucauaucaauaucuaauaauacaaaauacaacuugggacgaucauugccaauucucacguccaucacccauaggcuauuuaggucuacuaucacaaagaacaagagacauauacauuucgagacgaagaagagguacauucacauggaccuuaucagacucagaagguaacgaaaccccuggaggauacugccuaacaagauggauguuaauagaagccgaacuaaaaugcuucggaaauacagcaguagcaaaauguaacgaaaaacaugacgaagaauuuugcgacaugcuacgacucuucgauuucaacaaacaagcaauaagaagacuaaaaacacccgcacaaauguccauacaacucauaaacaaagcaguaaacgcacucauaaacgaccaacuaauaaugaaaaaucaccuccgagacauaauguguauucccuacugcaacuacucaagauacugguaccuaaaucacacaucaacaggaaaaacuucacuaccaagaugcuggcuuauaucuaacggaucauaccuaaacgaaacaaaauuuagcgacgauauagaacaacaagcagacaacaugauaacagaaauguuacaaaaagaauacauagaucgacaaggaaaaacuccucuaggucuaguagaccuauucguauucucuacaucauucuauuuaauaagcauauuccuacauuuaguaaaaauacccacacaccgccauauaguaggaaaaccauguccaaaaccccacagauuaaaccacauggguauauguucauguggauuauauaaacaaccaggagucccagucagauggaaaagauaaggacuagugcaucacauuuaaaagcaucucagccuaccaugagaauaagagaaagaaaaugaagaucaauagcuuauucaucucuuuuucuuuuucguugguguaaagccaacacccugucuaaaaaacauaaauuucuuuaaucauuuugccucuuuucucugugcuucaauuaauaaaaaauggaaagaaccuagaucuaaaaaaaaaaaaaaaaaaaaaaaaaaaaaaaaaaaaaaaaaaaaaaaaaaaaaaaaaaaaaaaaugcaucccccccccccccccccccccccccccccccaaaggcucuuuucagagccaccagaauu

SEQ ID NO: 7199 - RNA, 1858 nt, Artificial Sequence
  mRNA product Design i-2 comprising derived and/or modified sequence from LASV(AV;Clade V)__CCA30314__GPCstabilized (opt6)
ggggcgcugccuacggagguggcagccaucuccuucucggcaucaagcuuaccauggggcaaaucguaacauucuuccaagaaguuccacacguaauagaagaaguaaugaauauaguauuaaucgcauuaucaauacuagcaguauuaaaaggacuauauaauauagcaacaugcggccucaucggacuaauaacauuccucuuacuaugcggaagaagcuguucaucaaaucuuuacaaaggaguuuacgaauuacaaucauuagacuuaaacauggaaacacuaaacaugacuaugccauuaucauguacaaaaaacaauucacaccauuauauaagaguaggcaaugacacaggacuagaauuaacacuaacaaacaccucaauacuaaaccacaaauucugcaacuuaucagacgcccacaaaaaagauuuauacgaccacgcacuaauguccauaauaucaaccuuccaccuaucaauaccuaacuucaaucaauaugaagcaaugucaugugacuucaauggaggaaaaauuucuguacaauacaacuuaucucacucauacgcaauagacgcagccaaccacugcggaacgguugcaaacggcauacuacaaacuuucaugagaauggcuugggguggaucauauaucgcucuagauucuggaugcggcaacugggacugcauaaugacauccuaccaauaccuaauuauacaaaacaccacaugggaaaaccacugccaauucagccgaccaucuccaauuggauaccuaggauuauuaucucaacgaacaagagauauauauaucucaagaagaagaagaggcacauucacuuggacacuaagcgacucugaaggaaacgcaaccccaggcgguuauuguuuaacacguuggaugcuaauagaagcagaauuaaaauguuucggaaacacagcaguagcaaaaugcaacgaaaaacacgacgaagaauuuugugacauguuaagauuauucgacuucaacaaacaagcaauaucacgauuaaaaagcccugcacaaauguccauccaauuaauaaauaaagcuguuaaugcacuaauaaacgaccaauuaauaaugaaaaaccacuuaagagacauaauguguauaccauacugcaacuacucaaaauauugguaucucaaccacacuauaacuggaaaaacaucucuaccaaaaugcuggcucguaucaaacggaucauacuuaaaugaaacccacuucucagacgauauagaacaacaagccgacaauaugaucaccgaaaugcuccaaaaagaauacauggaaagacaaggaaaaacaccacuuggauuagucgaccuauucgucuucucaacaucauucuaccuaauauccauauucuuaagacucguaaaaauacccacacauagacauauaguaggaaaaccaugccccaaaccccacagacuaaaccacaugggaauaugcagcuguggacuauacaaacaaccaggaguacccguaagauggaaacgguagggacuagugcaucacauuuaaaagcaucucagccuaccaugagaauaagagaaagaaaaugaagaucaauagcuuauucaucucuuuuucuuuuucguugguguaaagccaacacccugucuaaaaaacauaaauuucuuuaaucauuuugccucuuuucucugugcuucaauuaauaaaaaauggaaagaaccuagaucuaaaaaaaaaaaaaaaaaaaaaaaaaaaaaaaaaaaaaaaaaaaaaaaaaaaaaaaaaaaaaaaaugcaucccccccccccccccccccccccccccccccaaaggcucuuuucagagccaccagaauu

SEQ ID NO: 7200 - RNA, 1855 nt, Artificial Sequence
  mRNA product Design i-2 comprising derived and/or modified sequence from LASV(Togo/2016/7082;Clade VI)__AMR44577__GPCstabilized (opt6)
ggggcgcugccuacggagguggcagccaucuccuucucggcaucaagcuuaccaugggacaaauaaucacauuuuuccaagaaguaccacauguaauagaagaagucaugaacauaguacuaauagcacucucauuauuagcaauacucaaaggcguauacaauguagcaacuuguggaauaauaggucuagucacauuucuauuucuaugcggacgaucaugcucacuaauauauaaaggauccuacgaauuacaaacauuagaauuaaacauggaaacacucaauaugaccaugccacuauccuguaccaaaaacucaucacaccauuacauaagaguaggaaaugaaacaggauuagaauuaacauuaacaaauacaucuauaauaaaucauaaauucugcaaucucuccgacgcccauaaaagaaacuuauacgaccacgcacuaaugucaauacuaucaaccuuccaccuaucaauuccaaacuuuaaccaauaugaagccauguccugcgauuuuaacggaggaaaaauaagcguucaauacaaccuaucccacgcauacgcuguagacgcagcagaacacugcgguaccguagcaaacggaguacuacaaaccuuuaugagaauggccuggggaggaucauauauagcauuagauucaggaugcggcaacugggacugcauuaugaccucuuaccaauaucuaauaauacaaaacacaaccugggaagaucacugccaauucucaagaccaucaccaauaggcuauuuagguuuauuaucacaaagaacuagagauauauauaucucaagaagaagacgcggaacauuuacuuggacauuaucagacuccgaaggcaaugaaacaccaggaggcuacugucuaacacgauggaugcuaauagaagcagaauuaaaauguuuuggaaacacagccguagccaaaugcaacgaaaaacaugacgaagaauuuugcgacaugcuaagacuauucgacuucaacaaacaagcaauccaaagacuaaaaucaccagcacaaaugucuauacaacuaauuaacaaagcagugaaugccuuaauaaacgaucaacucaucaugaaaaaccaucuuagagauaugauguguauaccauauuguaacuauucuaaauacugguaccucaaucauacaucaucaggacgaacaucccuaccuaaauguuggcucguaucuaacggaucauaccuuaaugaaacccacuucagcgacgacauagaacaacaagccgauaacaugauaacagaaauguuacaaaaagaauauauagauagacaaggaaaaacaccacucggauuagucgaucucuucguauucuccacaucuuucuauuuaauuucuauauuuuuacaccuaauaaaaauacccacacacagacauauaguaggaaaaccauguccaaaaccacacagacuaaaucacaugggcauaugcucauguggauuauacaaacaaccuggagucccaacuagauggaaacgauaaggacuagugcaucacauuuaaaagcaucucagccuaccaugagaauaagagaaagaaaaugaagaucaauagcuuauucaucucuuuuucuuuuucguugguguaaagccaacacccugucuaaaaaacauaaauuucuuuaaucauuuugccucuuuucucugugcuucaauuaauaaaaaauggaaagaaccuagaucuaaaaaaaaaaaaaaaaaaaaaaaaaaaaaaaaaaaaaaaaaaaaaaaaaaaaaaaaaaaaaaaaugcaucccccccccccccccccccccccccccccccaaaggcucuuuucagagccaccagaauu

SEQ ID NO: 7201 - RNA, 1855 nt, Artificial Sequence
  mRNA product Design i-2 comprising derived and/or modified sequence from LASV(KAK-428;Clade n.d. (VII))__ANH09740__GPCstabilized (opt6)
ggggcgcugccuacggagguggcagccaucuccuucucggcaucaagcuuaccaugggacaaauaguuacauucuuccaagaaguaccacacguaauugaagaagucaugaauauaguauuaaucgcacuuucacuacuagccauacucaaaggauuauacaacuucgcaacaugcggaguuaucggauuaauaacauucuuacucuuaugcggacgaucauguucagcaacauacaaaggccaauacgaacuacaaacacuagaauuaaacauggaauccuuaaacaugacaaugcccuuaucauguaccaaaaacaacucacaucacuauauacgagcagguaauaauaccggacuugaacucacauuaacaaacacuucgaucauaucacacaaauucugcaacuuaucagacgcacacaaaaaaaauuuauacgaccauacuuuaaugucuauaauaaccacauuccacuuaucuauaccaaacuucaaucaauacgaagcaaugucuugcgauuucaacggaggaaaaauaaguauacaauauaaccuaucacacucauacgcaggagacgcagcacaacacuguggaacaguagcaaacggaguacuacaaaccuuuaugagaauggccuggggaggaucuuauuuagcuuuagauucaggaugccgaggaugggauugcauaauaucaucauaccaauacuuaauaauacaaaacaccaccugggacgaccacugccaauucuccagacccaguccuauaggauaccucggauuuguaucacaaaaaaccagagacaucuacauaucaagaagaagacgaggaacauucacauggacacuuucagauagugaaggacacgacaugccaggaggauauugccuaacaagauggauguuaauagaagcagacuuaaaauguuucggaaacacagcaguagcaaaaugcaacgaaaaacacgacgaagaauuuugcgacauguggcgauuauucgauuucaacaaacaagcaauacaaagauuaaaagcacccgcacaaaugaauauacaauuaaucaacaaagccguuaacgcacucauaaacgaccaacuaaugaugaaaaaccauuuacgagacauaaugugcauaccauacugcaacuacuccaaauucugguaccuaaauaacacaacaacaggaagaacaucccuaccucguugcuggcuaaucagcaauggauccuaccuaaaugaaacacacuucucagaugacauagaacaacaagcugauaacaugaucacagaaaugcuacaaaaagaauauauggaucgacaaggaaaaacaccuuuaggauuaguagaccuuuucgucuucucaacuucuuucuaccuaaucacaaucuucuuacauuuaguaaagaucccuacccacagacacauaguuggaaaacccugcccaaaaccacacagacuaaaucacaugggaaucugcucaugcggauuauacaaacaaccagguguaccuguaagauggaaacgauaaggacuagugcaucacauuuaaaagcaucucagccuaccaugagaauaagagaaagaaaaugaagaucaauagcuuauucaucucuuuuucuuuuucguugguguaaagccaacacccugucuaaaaaacauaaauuucuuuaaucauuuugccucuuuucucugugcuucaauuaauaaaaaauggaaagaaccuagaucuaaaaaaaaaaaaaaaaaaaaaaaaaaaaaaaaaaaaaaaaaaaaaaaaaaaaaaaaaaaaaaaaugcaucccccccccccccccccccccccccccccccaaaggcucuuuucagagccaccagaauu

SEQ ID NO: 7202 - RNA, 1855 nt, Artificial Sequence
  mRNA product Design i-2 comprising derived and/or modified sequence from LASV(Pinneo-NIG-1969;Clade I)__AIT17836__GPCstabilized (opt6)
ggggcgcugccuacggagguggcagccaucuccuucucggcaucaagcuuaccaugggacaaauuauuacauucuuccaagaaguaccucacguaauagaagaaguaaugaacaucguacuaauagcauuaucacuacuagccauacuaaaaggacuauacaacauagcaacauguggaauaauaggccuuguagccuuccuauuccuaugcggaaaauccugcucacuaacacuaaaagguggcuacgaauuacaaacauuagaacuaaacauggaaacuuuaaauaugacaaugccacucuccugcaccaaaaauucaagucaucacuacaucagaguaggaaacgaaacaggauuagaacuaacauuaaccaauacauccaucauaaaccauaaauucuguaaccuaucagaugcacacaaaaaaaacuuauaugaccacgcauuaaugagcauuauaagcaccuuucaccuaucaauaccaaacuucaaccaauaugaagcaaugucaugugacuuuaacgguggaaaaauaucaguacaauauaaccuaucacauucauacgccggugacgcagccgaacacugcggaacaguagcaaacggaguacuacaaacauuuaugcgcauggccuggggaggacgcuacauagcacuagauucaggaugcggaaauugggacuguaucaugacuuccuaccaauauuuaauaauacaaaacacaaccugggaagaucacugucaauuuucccgaccaucaccaauaggauauuuaggacuacuaagucaaagaacaagggauauauacaucucuagaagaaggagaggaacauuuacauggacccuaucugacuccgaaggaaacgaaacaccaggaggauacugcuuaacacgauggauguuaauagaagcagaacucaaaugcuucggaaacacagccguagcaaaauguaacgaaaaacacgaugaagaauucugugacaugcuacgauuauuugauuucaacaaacaagcaauaagacgacucaaagcaccagcacaaaugucaauacaacuaauaaacaaagcaguaaacgcauuaauaaaugaccaacucauaaugaaaaaucaccuaagagauauaaugugcauaccauauugcaauuacucaaaauacugguacuuaaaccacaccucauccggacgaacaucauuaccaaaaugcuggcuaauaucaaauggaaguuaccuaaacgaaacacaauucucagacgacauugagcaacaagccgauaacaugauuacagaaauguuacaaaaagaauacauagaaagacaaggcaaaacucccuuaggccuuguagacauauucauauuuucuacaucauuuuaccuaauaucaauauuucuacacuuaauuaaaauaccaacgcauagacauaucgucggaaaaccaugcccaaaaccacauagauuaaaucacaugggaguaugcucaugcggauuauacaaacacccuggaguaccaacaaaauggaaacgauaaggacuagugcaucacauuuaaaagcaucucagccuaccaugagaauaagagaaagaaaaugaagaucaauagcuuauucaucucuuuuucuuuuucguugguguaaagccaacacccugucuaaaaaacauaaauuucuuuaaucauuuugccucuuuucucugugcuucaauuaauaaaaaauggaaagaaccuagaucuaaaaaaaaaaaaaaaaaaaaaaaaaaaaaaaaaaaaaaaaaaaaaaaaaaaaaaaaaaaaaaaaugcaucccccccccccccccccccccccccccccccaaaggcucuuuucagagccaccagaauu

SEQ ID NO: 7203 - RNA, 1855 nt, Artificial Sequence
  mRNA product Design i-2 comprising derived and/or modified sequence from LASV(ISTH0009-NIG-2011;Clade II)__AIT17404__GPCstabilized (opt6)
ggggcgcugccuacggagguggcagccaucuccuucucggcaucaagcuuaccaugggacaaauaaucacauuuuuccaagaaguaccccacgucauagaagaaguuaugaacauaguacucauagcauuaagccuacuagcaauauuaaaaggcauauacaacguagcaaccugcggauuauucggacuuguaucuuuccuuuuacucuguggaagaucaugcucuacaacauacaagggcgucuacgaacuacaaacauuagaacuugacauggcaucacucaacaugacaaugccacuaucaugcaccaaaaauaacucacaucauuacauaaugguaggaaacgaaacuggacuugaacuaacacuaaccaacacuucaauaaucaaucauaaauucugcaaccuaucagaugcccacaagaaaaaucuauaugaccaugcauuaaugucuauaauaucuaccuuccaccucuccauaccaaauuuuaaccaauaugaagcaaugucaugugauuucaacggaggaaaaaucucuguacaauacaaccuaucucacgcauacgcaguagacgccgcaaaccauugcggaacaauagccaacggagucuuacaaacauucaugcgaauggcauggggaggaucuuauauagcacuggacucaggauguggaucaugggacugcauaaugacaucauaucaauacuuaaucauacaaaauacaacuugggaagaccacugccaauucucacgaccaucacccauaggauaccuaggacuucuaucacaaagaaccagagacauauacauaucuagacguagaagaggaacauucaccuggacacuaucagacucugaaggcaacgaaacacccggaggcuauugccuaacaagauggaugcuaauagaagcagaacuaaaaugcuuuggaaacaccgcaguagcaaaaugcaaugaaaaacacgacgaagaauuuugcgauaugcuaagauuauucgacuuuaacaaacaagcaauacgacgccuaaaaacucccgcccaaauguccauccaacuaauaaacaaagcaguaaacgcauuaauaaaugaccaacuaauaaugaaaaaucaccuaagagauauaaugugcauaccauacuguaauuacuccaaauacugguaccucaaucauaccguaaccggaaaaacaucauuaccccgaugcuggcuaguaucuaauggcucauaccuaaacgaaacacauuucucagacgacaucgaacaacaagcagacaauaugauaacagaacuauuacaaaaagaauacauggacagacaaggaaaaacuccacuaggcuuaguagacuuauucgucuuuucaaccucauucuacuuaauaucaauauuccuccaucuaauaaaaauacccacacaccgacacauaacaggaaaaccaugcccaaaaccacacagauuaaaccacaugggcauauguaguugugguuuauauaaacacccaggaguaccaguuaaauggaaacguuaaggacuagugcaucacauuuaaaagcaucucagccuaccaugagaauaagagaaagaaaaugaagaucaauagcuuauucaucucuuuuucuuuuucguugguguaaagccaacacccugucuaaaaaacauaaauuucuuuaaucauuuugccucuuuucucugugcuucaauuaauaaaaaauggaaagaaccuagaucuaaaaaaaaaaaaaaaaaaaaaaaaaaaaaaaaaaaaaaaaaaaaaaaaaaaaaaaaaaaaaaaaugcaucccccccccccccccccccccccccccccccaaaggcucuuuucagagccaccagaauu

SEQ ID NO: 7204 - RNA, 1855 nt, Artificial Sequence
  mRNA product Design i-2 comprising derived and/or modified sequence from LASV(ISTH2010-NIG-2012;Clade II)__AIT17482__GPCstabilized (opt6)
ggggcgcugccuacggagguggcagccaucuccuucucggcaucaagcuuaccaugggacaaauaaucacauucuuccaagaaguuccacacgucauagaagaaguaaugaacauaguucuaauugcccuaucacuacuugcaauacuaaaaggaauauacaacguagcaacaugcggucuuuucggccuaguaucauuccuauuauuaugcggaagaucaugcucaacaacauauaaaggaguauacgaauuacaaacgcucgaacuagauauggcaucauuaaauaugacaaugccacuaucuugcaccaaaaacaacucucaccacuacauaaugguaggaaacgaaaccggccuagaauuaacauuaacuaauacaucaaucauaaaccacaaauucugcaacuuauccgacgcucacaagaaaaaccuauaugaucaugcauuaaugagcauuauaucaacauuccaccuaucuauaccuaacuucaaucaguaugaagcaaugaguugcgacuucaacggaggcaaaauauccguccaauauaacuuaucccaugcauacgcagucgaugcagcaaaccacugcggaaccauagcaaacggaguauuacaaaccuucaugagaauggccuggggaggaucauacauagcacuagacucuggaugcggcuccugggauuguauaaugacauccuaccaauaccucauaauccaaaacauaacaugggaagaucauugccaauucucacgaccaucaccaauaggauaccucggacuauuaucccaaagaacuagagacauauacaucucccgcagaagacgagguacauuuacauggacccucucagacucagaaggaaacgaaacaccaggcggauacugcuuaacacgauggauguuaauagaagcagagcuaaaaugcuucggaaauacugcaguagccaaaugcaacgaaaaacacgacgaagaauuuugcgacauguuaagacuauucgauuucaacaaacaagcaauaagaagacucaaaacaccagcccaaaugucaauacaacuaauaaauaaagcaguaaaugccuuaauuaaugaccaacuaauaaugaaaaaccaucuaagagauauaaugugcauaccuuauugcaacuacaguaaauacugguaccuaaaccauacagucaccggaaaaacuucacuaccaagaugcuggcuaguauccaauggaucauaucuaaacgaaacacacuuuucagacgauaucgaacaacaagcagacaacaugaucacagaacucuuacaaaaagaauacauagauagacaaggcaaaacaccacuaggucuaguagaccuauuuguauucucaacaucauucuaccucauaucaauauuccuccaucuaguaaaaauaccaacucaucgacacguaguaggaaaaccaugucccaaaccccacagauuaaaucauaugggaauaugcucaugcggauuauacaaacauccaggcgucccaguaaaauggaaaagauaaggacuagugcaucacauuuaaaagcaucucagccuaccaugagaauaagagaaagaaaaugaagaucaauagcuuauucaucucuuuuucuuuuucguugguguaaagccaacacccugucuaaaaaacauaaauuucuuuaaucauuuugccucuuuucucugugcuucaauuaauaaaaaauggaaagaaccuagaucuaaaaaaaaaaaaaaaaaaaaaaaaaaaaaaaaaaaaaaaaaaaaaaaaaaaaaaaaaaaaaaaaugcaucccccccccccccccccccccccccccccccaaaggcucuuuucagagccaccagaauu

SEQ ID NO: 7205 - RNA, 1855 nt, Artificial Sequence
  mRNA product Design i-2 comprising derived and/or modified sequence from LASV(Lassa virus/H.sapiens-wt/NGA/2015/ISTH_0543;Clade II)__AVO03639__GPCstabilized (opt6)
ggggcgcugccuacggagguggcagccaucuccuucucggcaucaagcuuaccaugggacaaauaauaacauucuuccaagaagucccccaugucauagaagaaguaaugaacauaguauuaauugcauuaucauuacuagcuauacuaaaaggaauauacaacguagccaccugcggacuauucggcuuaguaucauuucuauuacuaugcggaagaucuugcucaacaaccuacaaaggcguauacgaacuucaaacauuagaacucgauauggcaaacuuaaacaugacaaugccauuaucauguacaaaaaacaauucucaccacuacauaaugguaggaaaugaaacagguuuagaacuaacauuaacaaauacaucaaucaucaaucauaaauuuuguaaccuaagcgaugcacacaaaaaaaaccuauaugaucacgcauuaaugucaauaauauccacuuuucacuuaucaauaccaaacuucaaccaauaugaagcaauguccugcgacuuuaauggaggcaaaauaucaguacaauacaacuuaucacacacauacgcaguagacgccgcaaaccacuguggaacaauagcaaacggaguacuacaaacguucaugcgcauggcuuggggaggaucauacauagcauuagacucaggaugcggaucuugggacuguauaaugacaucauaccaauauuuagucauucaaaauacaacaugggaagaccacugccaauucucaagaccuucaccaauaggcuacuuaggacucuuaucccaaagaaccagagacauauauauaucucgacggcgaagaggaacuuucacauggacacucagcgacucagaaggaaaugaaacaccaggaggcuauugccucacaagauggauguuaauagaagcagaacuaaaaugcuucggaaacacagcaguugccaaaugcaacgaaaaacacgaugaagaauucugcgacaugcuaagacuuuucgauuuuaacaaacaagcaauacgaagacucaaaacaccagcccaaaugucaauacaacuaauaaacaaagccguaaaugcccuaaucaaugaccaacuuaucaugaaaaaccaucuaagagacaucaugugcauucccuacugcaauuacucaaaauacugguaucucaaucacacagucacuggaaaaacaucacuaccaagaugcuggcuaguaucaaacgguucuuaucuaaacgaaacacacuucucagacgacauugaacaacaagccgacaacaugauaacugaacuucuacaaaaagaauauauagacagacaaggcaaaacaccacuugguuuaguagacuuauucguauucucaaccucauucuaccuaaucucaaucuuccuucacuuaguuaaaauaccaacacaccgacacauaacuggcaaaccauguccaaaaccacacagacucaaccauaugggaauaugcucuugcggauuauacaaacacccaggugucccaguaaaauggaaaagauaaggacuagugcaucacauuuaaaagcaucucagccuaccaugagaauaagagaaagaaaaugaagaucaauagcuuauucaucucuuuuucuuuuucguugguguaaagccaacacccugucuaaaaaacauaaauuucuuuaaucauuuugccucuuuucucugugcuucaauuaauaaaaaauggaaagaaccuagaucuaaaaaaaaaaaaaaaaaaaaaaaaaaaaaaaaaaaaaaaaaaaaaaaaaaaaaaaaaaaaaaaaugcaucccccccccccccccccccccccccccccccaaaggcucuuuucagagccaccagaauu

SEQ ID NO: 7206 - RNA, 1855 nt, Artificial Sequence
  mRNA product Design i-2 comprising derived and/or modified sequence from LASV(Lassa virus/H.sapiens-wt/NGA/2016/ISTH_0009;Clade II)__AVO03571__GPCstabilized (opt6)
ggggcgcugccuacggagguggcagccaucuccuucucggcaucaagcuuaccaugggccaaauaauaacauucuuccaagaaguaccucacguaauagaagaaguaaugaacaucgucuugauagcauuaucauuauuagccauauuaaaagguauauacaauguagcaacauguggacuacuuggauuaguaucuuucuuacuccuaugcggaagaucuugcucuaccacuuacaaagguguauacgaacuacaaacauuagaauuagacauggcaucacuaaacaugacaaugccauuaucaugcacuaaaaauaacagccaccacuacauaaugguaggaaacgaaacaggacuagaacuaacccuaaccaauacaucaauaauaaaucauaaauucuguaacuuaucugaugcacauaagaaaaaccuauaugaccacgcacuaaugagcauuauaucaaccuuccacuuaucuauaccaaauuucaaccaauaugaagccaugucaugcgauuucaacggaggaagaaucucuguacaauacaaccuaucacacuccuaugcaguagacgccgcaaaccauuguggaacaauagcuaacggaguacuacaaaccuucaugagaauggcuuggggagguucauacauagccuuagacaguggaugcgguucaugggacugcauaaugacaucauaucaauaccuaauaauacaaaauacaacuugggaagaccacugccaauuuucaagaccaucaccaauaggauauuuaggucuauuaucacaaagaacaagagacauauacauuucuagacgaagacgaggaacauucacauggacacuaucagacucagaaggaaacgaaacacccggaggcuacugucuuacacgauggaugcuaauagaagcagaacuaaaaugcuucgguaacacugcaguugcaaaauguaacgaaaaacaugaugaagaauuuugcgacaugcuccgauuauucgauuucaacaaacaagcaauacgucgacuuaaaacaccagcucaaauguccauacaauuaauaaacaaagcaguaaaugcauuaauaaaugaccaacuaauaaugaaaaaccaccuaagagauauaaugugcauaccauacugcaacuacucuaaauacugguacuuaaaccacaccguaaccggaaaaacaucacuaccccgcugcuggcuaguaucaaauggaaguuaccuaaacgaaacacacuuuucagacgacauagaacaacaagcagacaacaugauaacagaacuacuacaaaaagaauacaucgauagacaaggcaaaacaccacuuggccuagucgaucuauucguauucagcacaucauuuuaucucauaucaaucuucuuacacuuagucaaaauaccuacacacagacacauaaccggaaaaccaugucccaaaccacacagacuaaaccacaugggaauaugcuccugcggacuauauaaccacccaggaguaccaguaaaauggaaaagauaaggacuagugcaucacauuuaaaagcaucucagccuaccaugagaauaagagaaagaaaaugaagaucaauagcuuauucaucucuuuuucuuuuucguugguguaaagccaacacccugucuaaaaaacauaaauuucuuuaaucauuuugccucuuuucucugugcuucaauuaauaaaaaauggaaagaaccuagaucuaaaaaaaaaaaaaaaaaaaaaaaaaaaaaaaaaaaaaaaaaaaaaaaaaaaaaaaaaaaaaaaaugcaucccccccccccccccccccccccccccccccaaaggcucuuuucagagccaccagaauu

SEQ ID NO: 7207 - RNA, 1855 nt, Artificial Sequence
  mRNA product Design i-2 comprising derived and/or modified sequence from LASV(Lassa virus/H.sapiens-wt/NGA/2016/ISTH_0017;Clade II)__AVO03567__GPCstabilized (opt6)
ggggcgcugccuacggagguggcagccaucuccuucucggcaucaagcuuaccaugggacaaauaauaacauucuuccaagaaguaccacacgucauagaagaaguuaugaacauuguacuuauagcacuuucacucuuagcaauccuaaaagguauauacaauguagcuaccugcggacuauuuggacuaguaucauucuuauuacuauguggcagaucaugcucaacaacauacaaaggaguauacgaauuacaaacacuagaacuugacauggcaucacuaaacaugacuaugccuuuauccugcaccaaaaacaacucacaccacuacauaaugguaggaaacgaaacaggccuagaacuaacauuaacaaacacaucaaucauaaaccacaaauucuguaacuuaucagaugcacacaaaaaaaaccucuacgaccacgcucuaauguccauaauaucaacauuccacuuaucuauaccaaacuucaaccaauacgaagcaaugucaugcgacuuuaacggcggaaaaauaucaguacaguacaaccuaagccacacauaugccauagacgcagccaaccauuguggaacaauagcaaauggaguacuacaaacuuucaugagaauggcauggggaggaucauauauagcccuagacucaggauguggaucaugggacuguaucaugacaucauaccaauacuuaauaauacaaaauacaaccugggaagaccacugccaauuuucccgacccucaccuauaggauaucuagguuuacuaucccaaagaacacgagacauauacaucucaagaagaagaagagguaccuucaccuggacacucuccgacagcgaaggaaacgaaaccccuggcggauacugucuuacacgauggauguuaauagaagcagaauuaaaauguuuuggaaauacagcaguugcaaaaugcaaugaaaaacacgacgaagaauucugugacaugcuccgacuauuugauuuuaauaaacaagcaauaagacgacuaaaaaccccagcccaaaugucaauacaacuaauaaacaaagcaguuaacgcacuaauaaacgaccaauuaauaaugaaaaaccaccuaagagacauaaugugcauaccauacuguaacuacagcaaauacugguacuuaaaccacaccguaacaggaaaaacaucauuacccagauguuggcuaguauccaaugguucauacuuaaacgaaacacacuuuuccgacgauauagaacaacaagcagacaacaugauaaccgaacuauuacaaaaagaauacauggacagacaaggaaaaaccccacuaggccuaguagaucuauucguauucucaaccucauucuaccucauaaguauauuucuacaccuaguaagaauaccaacccauagacacguaauaggaaaaccaugcccaaaaccacauagacucaaccauaugggaauaugcagcugcggacuguacaaacauccuggaguaccaguuaaauggaaaagauaaggacuagugcaucacauuuaaaagcaucucagccuaccaugagaauaagagaaagaaaaugaagaucaauagcuuauucaucucuuuuucuuuuucguugguguaaagccaacacccugucuaaaaaacauaaauuucuuuaaucauuuugccucuuuucucugugcuucaauuaauaaaaaauggaaagaaccuagaucuaaaaaaaaaaaaaaaaaaaaaaaaaaaaaaaaaaaaaaaaaaaaaaaaaaaaaaaaaaaaaaaaugcaucccccccccccccccccccccccccccccccaaaggcucuuuucagagccaccagaauu

SEQ ID NO: 7208 - RNA, 1855 nt, Artificial Sequence
  mRNA product Design i-2 comprising derived and/or modified sequence from LASV(Lassa virus/H.sapiens-wt/NGA/2018/ISTH_0959;Clade II)__AVV65099__GPCstabilized (opt6)
ggggcgcugccuacggagguggcagccaucuccuucucggcaucaagcuuaccaugggacaaauaaucacauucuuccaagaaguaccacacguaauagaagaaguaaugaauauaguucucauagcauuaucacuccuugcaauauuaaaaggaauauauaacguaguaacuugcggacuauucggccuaguauccuuucuacuacuauguggaagaucaugcuccaccaccuauaaaggaguauacgaacuucaaacacuugaacuagacauggccucauuaaauaugaccaugccauuaaguugcacaaaaaacaacucacaccauuacauaaugguaggaaacgaaacaggacuagaauuaacacuuacaaacacaucuauaaucaaucacaaauucugcaaucuauccgacgcccacaaaaaaaaccuauacgaccaugcacuuaugucaauaauaucaaccuuccaccuuucaauuccaaacuucaaucaauacgaagcaaugucuugcgauuucaacggaggaaaaauaucaguacaauacaaucuaucccaugccuacgcaauagacgcugcaaaucacugcggaacaauagcaaacggcguccuccaaacauucaugagaauggcauggggaggcucauauaucgcauuagacucuggauguggaucaugggauuguaucaugacaaguuaccaauaccuaauuauacaaaauacaaccugggaagaccacugccaauucucaagacccuccccaauaggauaucuaggacuauuaucacaacgaacuagagacauauauauaucacgaagaagaagagguacauucacauggacacuaucagacucagaaggaaacgaaacaccaggcgguuauugcuuaacacgauggaugcuaauagaagcagaacuaaaaugcuuugguaauacagcuguagcaaaaugcaaugaaaaacaugacgaagaauucugugacaugcucagauuauuugauuuuaacaaacaagcaauaagaagguuaaaaacaccugcacaaaugucaauacaauuaauaaacaaagccguuaacgcacuaauaaacgaccaauuaauaaugaaaaaccaucuucgcgacauaaugugcauaccauacugcaacuacucuaaauacugguacuuaaaccacacaguaacaggcaaaacauccuuaccacgaugcuggcuaguaucaaacgguuccuacuuaaacgaaacccacuucucagaugacauagaacaacaagcagacaacaugaucacagaauuauuacaaaaagaauacauagauagacaaggaaaaacaccacuaggccucgucgauuuauucgucuuuucaacaucauuuuauuuaauuucaauauuccuacauuuaguaaaaauaccaacacaccgacacguaauaggaaaaccuuguccaaaaccccacagauuaaaccauaugggaauauguuccugcggccuauauaaacauccaggcguucccgucaaauggaaacguuaaggacuagugcaucacauuuaaaagcaucucagccuaccaugagaauaagagaaagaaaaugaagaucaauagcuuauucaucucuuuuucuuuuucguugguguaaagccaacacccugucuaaaaaacauaaauuucuuuaaucauuuugccucuuuucucugugcuucaauuaauaaaaaauggaaagaaccuagaucuaaaaaaaaaaaaaaaaaaaaaaaaaaaaaaaaaaaaaaaaaaaaaaaaaaaaaaaaaaaaaaaaugcaucccccccccccccccccccccccccccccccaaaggcucuuuucagagccaccagaauu

SEQ ID NO: 7209 - RNA, 1855 nt, Artificial Sequence
  mRNA product Design i-2 comprising derived and/or modified sequence from LASV(LASV003-NIG-2008;Clade II)__AIT17580__GPCstabilized (opt6)
ggggcgcugccuacggagguggcagccaucuccuucucggcaucaagcuuaccaugggacaaauaauaacauuuuuccaagaagucccacacguaauagaagaaguaaugaacaucguccuaauagcauuaucauuacuagcaauucuaaaaggaauauacaauguagcaacuuguggccuauucggccuaguaucauuccuauuauuauguggccgaagcugcucaacaaccuacaaagguguauacgaacuacaaacccuagaauuagacauggcaucacuaaauaugacaaugccacuauccugcaccaaaaacaacucccaucacuacauaaugguaggcaacgaaacaggcuuagaacuaacacuaacaaacacuucaauaauaaaccacaaauucugcaaccuauccgacgcccacaagaaaaauuuauaugaccacgcauuaaugucaauaauaucaacauuccacuuauccauacccaauuucaaccaauacgaagcaaugucaugugauuucaacggagguaaaaucagcguacaauacaauuuaucacauacauaugcaguagacgcagcaaaccauuguggcacaauagcaaacggaguauuacaaacauucaugagaauggcuuggggaggaucauacauugcacucgacucaggaugcggaucaugggauugcauaaugacaucauaccaauaccuaauaauacaaaacacaaccugggaagaucacugccaauucuccagaccaucaccaaucgguuauuuaggacuacuaucacaaagaacaagagacauauauauaucacgaagaagacgaggaacauuuaccuggacccuaucagauucagaaucaaaugaaacaccaggcggauacugccuaacaagauggauguuaauagaagcagaauuaaaaugcuuuggaaauacagcaguagcaaaauguaacgaaaaacacgaugaagaauuuugcgauaugcuacgacuauuugacuucaacaaacaagcaauaagacgacuaaaagccccugcacaaaugucaauacaauuaauuaauaaagcaguuaaugcauuaauaaaugaccaacuaauaaugaaaaaccacuuaagagacaucauguguauaccauauugcaacuauagcaaauacugguacuuaaaccacacaguuacaggaagaacaagccuaccccgauguuggcucguauccaacggaucauaccuuaacgaaacacacuuuucagaugacauagaacaacaagcagauaacaugauaacagaauuauuacaaaaagaauacauggaccgacaaggcaaaacaccacuaggccuaguagaccuauuuguauuuuccaccuccuucuaccuaauaucaauuuucuuacacuuaguaaaaaucccuacacaccgacacguaauaggaaaaccaugcccaaaaccacaccgauuaaaccacaugggaauauguucauguggauuauacaaacacccaggaguaccagucaaauggaaaagauaaggacuagugcaucacauuuaaaagcaucucagccuaccaugagaauaagagaaagaaaaugaagaucaauagcuuauucaucucuuuuucuuuuucguugguguaaagccaacacccugucuaaaaaacauaaauuucuuuaaucauuuugccucuuuucucugugcuucaauuaauaaaaaauggaaagaaccuagaucuaaaaaaaaaaaaaaaaaaaaaaaaaaaaaaaaaaaaaaaaaaaaaaaaaaaaaaaaaaaaaaaaugcaucccccccccccccccccccccccccccccccaaaggcucuuuucagagccaccagaauu

SEQ ID NO: 7210 - RNA, 1855 nt, Artificial Sequence
  mRNA product Design i-2 comprising derived and/or modified sequence from LASV(LASV035-NIG-2009;Clade II)__AIT17588__GPCstabilized (opt6)
ggggcgcugccuacggagguggcagccaucuccuucucggcaucaagcuuaccaugggacaaauaauaaccuuuuuccaagaaguaccacacguaauagaagaaguaaugaacauaguacuuauagcauuaagccuccuugcuauuuuaaaaggaauauacaauguagcaacauguggacuauucggacuaguaucauuucuuuuauuaugcggaagaucauguuccacaacauacaaaggaguuuacgaauuacaaacauuagaacuagacauggcaucauuaaacaugacaaugccacuauccugcacaaaaaacaacucacaucauuacaucaugguaggaaaugaaacaggauuagaacuuacacuaacaaacacaagcauaauaaaccacaaauucugcaaccuaucagacgcacacaaaaaaaaucuauaugaccacgcacuaaugucaauuauauccacauuucacuuaucaaucccaaacuucaaccaauacgaagcaaugucaugcgacuuuaauggaggaaaaauuucuguacaauauaaccuaucacaugccuacgcuguagaugcugcaaaccacugcgguacaaucgcaaauggaguauuacaaacauucaugagaauggcuuggggaggaucauacauagcauuagacucaggaugcggcucaugggacuguauaaugacaucuuaccaguaucuaauaauacaaaacacaaccugggaagaucacugccaauucucacgacccucaccaauuggauacuuagguuuacuaucacaaagaacccgcgauauauacaucuccagaagacgcagaggaacauuuaccuggacauuaagcgacuccgaaggaaaugaaacaccuggaggauacugcuuaacuagauggauguuaauagaagccgaacuuaaaugcuucggaaauacagcuguugcuaaaugcaacgaaaaacacgacgaagaauucugcgacaugcuaagauuauucgacuucaacaaacaagcuauaagaagacuaaaagcaccagcacaaaugucaauacaauuaauaaauaaagcaguuaacgcauuaauaaacgaucaacuuauuaugaaaaaccaccuaagagacauaaugugcauaccauacuguaacuacucaaaauauugguacuuaaaccacacaguaacaggaaaaacaucacucccaagauguugguuaguaagcaacggcuccuaccuaaacgaaacacauuucagugacgauaucgaacaacaagccgauaauaugaucacagaacuacuacaaaaagaauauaucgauagacaaggaaaaacacccuuaggacuaguagaccucuucguauucucaacauccuucuacuuaauauccauauucuuacaccuaguaaaaauaccaacacauagacacguaauaggaaaaccauguccaaaaccucacagacuaaaccacaugggaauuuguuccuguggacuauauaaacaccccggcguaccaguaaaauggaaacgauaaggacuagugcaucacauuuaaaagcaucucagccuaccaugagaauaagagaaagaaaaugaagaucaauagcuuauucaucucuuuuucuuuuucguugguguaaagccaacacccugucuaaaaaacauaaauuucuuuaaucauuuugccucuuuucucugugcuucaauuaauaaaaaauggaaagaaccuagaucuaaaaaaaaaaaaaaaaaaaaaaaaaaaaaaaaaaaaaaaaaaaaaaaaaaaaaaaaaaaaaaaaugcaucccccccccccccccccccccccccccccccaaaggcucuuuucagagccaccagaauu

SEQ ID NO: 7211 - RNA, 1855 nt, Artificial Sequence
  mRNA product Design i-2 comprising derived and/or modified sequence from LASV(LASV1000-NIG-2009;Clade II)__AIT17782__GPCstabilized (opt6)
ggggcgcugccuacggagguggcagccaucuccuucucggcaucaagcuuaccaugggacaaauaauaaccuucuuccaagaaguaccacacguaauugaagaaguaaugaauauaguucuaauagcacucucacuauuagccauacuuaaaggcauauauaauguagcaacaugcggauuauucggauuaguaucauuucuauuacuaugcggacgauccuguagcacaacauacaaaggaguauacgaacuacaaacauuagaauuagauauggcaucacuaaauaugacaaugcccuuaucuuguaccaaaaacaacucacaccacuacauaaugguuggaaacgaaacaggacuagaauuaacacuaacaaacacaucaauaauaaaucacaaauucugcaaccuaucagacgcucauaagaaaaaccuauacgaccacgcccuaauguccauaauaucaaccuuucaccuaucaauacccaauuuuaaccaauacgaagcuaugucaugcgauuucaacggcggaaaaauauccguacaauacaauuuaucacauacauaugcaguugaugccgcaaaucacugcggaacaauagcaaauggcguucuacaaacauuuaugagaauggcuuggggcggaucauacauagcacuugauucuggcugcggaucaugggauugcauaaugacauccuaccaauacuuaauaauacaaaacaccaccugggaagaccacugccaauucucaagaccaucaccuauaggcuacuuaggacuauuaucacaaagaacccgagacauauacauauccagaagacgaagaggcaccuucacauggacacuaucagauucagaaggaaacgaaacaccagguggcuauugcuuaaccagauggaugcuaauagaagccgaauuaaaaugcuuuggaaacacagcaguagcaaaaugcaacgaaaaacaugacgaagaauuuugcgauaugcuuagauuauucgauuuuaauaaacaagcaauaaaacgucuaaaaacaccagcacaaaugagcauucaauuaauaaacaaagccgucaacgcucuaauaaaugaccaacuaauaaugaaaaaccacuuaagagacauaaugugcauaccuuauuguaacuacucaaaauauugguaccuaaaccauacugucacaggaaaaacaucauuacccagaugcuggcuaguaucaaauggaucuuaucuaaaugaaacacacuucucagacgacauagaacaacaagcagacaacaugauaaccgaacuacuucaaaaagaauacauagacagacaaggaaaaacaccauuaggccuaguagaccuauucguauucucuacauccuuuuauuuaauaagcauauuucuacaucuaguaaaaauaccuacacauagacauguaguaggcaaaccaugcccaaaaccacacagacucaaccacaugggaauauguagcuguggauuauacaaacaucccggcguucccguuaaauggaaaagauaaggacuagugcaucacauuuaaaagcaucucagccuaccaugagaauaagagaaagaaaaugaagaucaauagcuuauucaucucuuuuucuuuuucguugguguaaagccaacacccugucuaaaaaacauaaauuucuuuaaucauuuugccucuuuucucugugcuucaauuaauaaaaaauggaaagaaccuagaucuaaaaaaaaaaaaaaaaaaaaaaaaaaaaaaaaaaaaaaaaaaaaaaaaaaaaaaaaaaaaaaaaugcaucccccccccccccccccccccccccccccccaaaggcucuuuucagagccaccagaauu

SEQ ID NO: 7212 - RNA, 1855 nt, Artificial Sequence
  mRNA product Design i-2 comprising derived and/or modified sequence from LASV(LASV221-NIG-2010;Clade II)__AIT17624__GPCstabilized (opt6)
ggggcgcugccuacggagguggcagccaucuccuucucggcaucaagcuuaccaugggccaaaucauaaccuuuuuccaagaaguaccucauguaauagaagaaguaaugaacauaguucucaucgcacuaucacuccuagcaauacuaaaaggaauauacaacguugcaaccuguggauuauuuggauuaguaucauuuuuauuacucugcggcagaucuuguucaacaacauauaaaggaguauacgaauuacaaacauuagaauuagacauggcaucacuuaacaugaccaugccacuaucuugcacuaaaaacaauucacaccacuauaucaugguaggaaaugaaacaggauuagaauuaacauuaacaaacacaucaauaauaaaccacaaauucugcaaucuauccgacgcacacaagaaaaacuuauaugaccaugcacuuaugagcauaauaucuacauuucaccuaucaauaccaaauuuuaaccaauacgaggcaaugucuugcgacuuuaacggaggcaaaauaucaguccaauacaaccuaucacacaccuacgcaauagacgcagcaaaccacugcggaacaaucgcuaauggaguauuacaaacauucaugagaauggccuggggcggaagcuacaucgcauuagacucaggaugcggaucaugggacuguaucaugacaucauaccaauaccuuauaauacaaaacacaacaugggaagaccacugccaauucucacgaccaucccccauaggauaccuaggacuacuaucucaaagaacaagagacauauacauaucacgaagacgucgcgguacuuuuacauggacacucucagauuccgaaggcaacgaaacaccaggagguuacugccuaacaagauggaugcuuauagaagcagaauuaaaaugcuuuggaaauacagcuguagcaaaaugcaacgaaaaacacgaugaagaauuuugcgacaugcuaagauuauucgacuuuaauaaacaagcaauaagaagacuaaaaacaccagcccaaaugucaauacaacuaauaaacaaagcuguaaacgcccucauaaacgaccaauuaauaaugaaaaaucacuuaagagacauaaugugcaucccauauuguaacuauucaaaauacugguaucuaaaccauacaguaacaggaaaaaccagcuuaccaagaugcuggcuaguauccaacggaucauacuuaaacgaaacacacuuuucagacgacauagaacaacaagcugacaauaugauaacagaaaugcuucaaaaagaauauauggaccgacaaggaaaaacaccauuaggauuaguagaucucuucguauucucaacaucauucuacuuaauaucaauauuccuacaccucgucaaaauacccacacauagacauguaauaggcaaaccauguccaaaaccacacagacucaaccauaugggaauauguucaugcggucuauauaaacacccaggagucccaguaaaauggaaaagauaaggacuagugcaucacauuuaaaagcaucucagccuaccaugagaauaagagaaagaaaaugaagaucaauagcuuauucaucucuuuuucuuuuucguugguguaaagccaacacccugucuaaaaaacauaaauuucuuuaaucauuuugccucuuuucucugugcuucaauuaauaaaaaauggaaagaaccuagaucuaaaaaaaaaaaaaaaaaaaaaaaaaaaaaaaaaaaaaaaaaaaaaaaaaaaaaaaaaaaaaaaaugcaucccccccccccccccccccccccccccccccaaaggcucuuuucagagccaccagaauu

SEQ ID NO: 7213 - RNA, 1855 nt, Artificial Sequence
  mRNA product Design i-2 comprising derived and/or modified sequence from LASV(LASV237-NIG-2010;Clade II)__AIT17638__GPCstabilized (opt6)
ggggcgcugccuacggagguggcagccaucuccuucucggcaucaagcuuaccaugggacaaauaauaacuuucuuccaagaaguaccacacguaauagaagaagucaugaauauaguccuaauagcacucucauuacuagcaauacuaaaaggaauauacaacguagccaccugcggacuauucggauuaguaucauuccuucuuuuaugcgguagaucuugcucaacaacauacaaaggaguuuacgaauuacaaacacuagaacuagauauggcuucacuaaauaugacuaugccacuauccugcacaaaaaacaacucacaucacuacauaauggucggaaacgaaaccggucuagaauuaacauuaacaaacacaucaauuaucaaccauaaauuuugcaaucucuccgacgcacauaaaaaagaccuauacgaucacgcacuaaugucaauuaucucaacuuuccaccuaucaauaccaaauuuuaaucaauacgaagcaaugucaugcgauuuuaauggaggaaaaauaucuguacaauauaacuuaucacacaccuacgcaguagacgcagcaaaccauugcggaacaauagcaaacggaguuuuacaaacuuucaugagaauggcauggggaggauccuacauagcauuagacucaggaugcggaaguugggauuguauaaugacuucauaccaauaccucauaauacaaaauaccacuugggaagaccacugccaauucucacgaccuucaccaaucggauacuuaggucuccuaucacaaagaaccagagacauauacauaucaagacgaagacgcggaacuuucacauggacacuaucagauucugaaggaaacgaaacuccaggaggauacugcuuaacaagauggauguuaauagaagccgaacuaaaaugcuucggaaacacagcaguagcaaaauguaacgaaaaacacgacgaagaauuuugcgacauguuaagacucuucgacuucaauaaacaagcaauaagaagacuaaaaacaccagcacaaaugucuauacaacuaauuaauaaagcaguaaacgcauuaauaaaugaccaacuaauuaugaaaaaccaucuacgcgacauaaugugcauaccauacugcaacuauucuaaauauugguauuuaaaccacacaguaacaggaaaaacaucccuacccagguguugguuaguaagcaauggaucauacuuaaaugaaacacauuucucugaugacaucgaacaacaagcagacaauaugauaacagaacuacuucaaaaagaauacauggacagacaaggaaaaacaccauuaggucuaguagauuuauucgucuucucuacaucauuuuaucuaauaucaaucuucuuacaucuaauaaaaauaccaacccacagacauauaacaggcaaaccaugcccaaaaccucauagacuaaaccacaugggaauaugcucauguggccuauacaaacacccaggcgucccagucaaauggaaaagauaaggacuagugcaucacauuuaaaagcaucucagccuaccaugagaauaagagaaagaaaaugaagaucaauagcuuauucaucucuuuuucuuuuucguugguguaaagccaacacccugucuaaaaaacauaaauuucuuuaaucauuuugccucuuuucucugugcuucaauuaauaaaaaauggaaagaaccuagaucuaaaaaaaaaaaaaaaaaaaaaaaaaaaaaaaaaaaaaaaaaaaaaaaaaaaaaaaaaaaaaaaaugcaucccccccccccccccccccccccccccccccaaaggcucuuuucagagccaccagaauu

SEQ ID NO: 7214 - RNA, 1855 nt, Artificial Sequence
  mRNA product Design i-2 comprising derived and/or modified sequence from LASV(LASV253-NIG-2011;Clade II)__AIT17670__GPCstabilized (opt6)
ggggcgcugccuacggagguggcagccaucuccuucucggcaucaagcuuaccaugggccaaauaauaacauucuuucaagaaguaccacacguaauagaagaaguaaugaauaucguacuaauagcucucucacuccuagcaauacuaaaaggaauauacaacguagcuaccugcggccuauuuggccuugucuccuuccuacuccuaugcggacgaucaugcucaacaacauauaaaggagucuacgaacuucaaacauuagaacuagacauggcaucacuaaacaugacaaugccccuaucauguacaaaaaauaauucucaccacuauaucaugguagguaacgaaacaggccuagaacuaacccucacaaacaccucaauaauuaaccacaaauucugcaauuuauccgacgcacauaaaaaaaaccucuaugaccacgcacuaauguccauaauauccacauuccaucucucaauacccaacuucaaccaauacgaagcaaugucaugugacuucaauggaggaaaaauuucaguacaauacaaccucucacauacauacgccguugacgcagcaaaccacugcggcacaauagcuaacggcguccuacaaacauucaugagaauggccuggggaggaucauauauugcuuuagauucaggauguggauccugggauugcauaaugacaucauaccaauaccuuauaauacaaaacacaacaugggaagaccauugccaauucucaagaccaucacccauaggauaccuaggacuauuaucacaacgcacacgagacaucuauauaucaagaagaagacgaggaacauucacauggacacucuccgacuccgaaggaaaugaaacaccaggaggauacugucuaaccagauggauguuaaucgaagcagaacuaaaaugcuucggaaacacagcaguagcaaaaugcaacgaaaaacaugaugaagaauucugcgacaugcuacgauuauucgauuucaauaaacaagccauaagacgacucaaagcaccagcacaaaugucaauacaacuaauaaauaaagcaguuaacgcacuaauuaacgaucaacuaauaaugaaaaaucacuuaagagauauaaugugcauaccauacuguaacuacuccaaauacugguacuuaaaccauacaguaaccggaagaacaagccuaccaagaugcuggcuagugucaaacggaucauaucucaacgaaacacauuucucagacgauaucgaacaacaagcagacaauaugauaacagaauuauuacaaaaagaauacaucgacagacaaggaaaaacuccauuaggauuaguagaucuauuuguauucucaacuucauucuauuuaauaucaauauucuuacacuuaguaaaaaucccaacacacagacacauaauaggcaaaccuugcccuaaaccacacagauuaaaccauaugggaaucugcucaugcggauuauauaaacacccaggagucccagucaaauggaaacgauaaggacuagugcaucacauuuaaaagcaucucagccuaccaugagaauaagagaaagaaaaugaagaucaauagcuuauucaucucuuuuucuuuuucguugguguaaagccaacacccugucuaaaaaacauaaauuucuuuaaucauuuugccucuuuucucugugcuucaauuaauaaaaaauggaaagaaccuagaucuaaaaaaaaaaaaaaaaaaaaaaaaaaaaaaaaaaaaaaaaaaaaaaaaaaaaaaaaaaaaaaaaugcaucccccccccccccccccccccccccccccccaaaggcucuuuucagagccaccagaauu

SEQ ID NO: 7215 - RNA, 1855 nt, Artificial Sequence
  mRNA product Design i-2 comprising derived and/or modified sequence from LASV(LASV254-NIG-2011;Clade II)__AIT17674__GPCstabilized (opt6)
ggggcgcugccuacggagguggcagccaucuccuucucggcaucaagcuuaccaugggacaaauaaucacauucuuucaagaaguaccacacguaauagaagaaguaaugaacauaguccuaauagccuuaagucuccuagcaauauuaaaaggaaucuauaauguugcaacaugcggcuuauucggucuaguaucauuucuauuacuaugcggaagaucauguuccacaaccuauaaaggaguauacgaauuacaaacccuggaacuagacaugacaaacuuaaauaugacaaugccacuuaguugcaccaaaaauaauucacaccacuacauaauggucggaaacgaaacaggauuagaauuaacacuaacaaacacaucuauaauaaaccacaaauucugcaauuuaucagaugcucacaagaaaaaccuauacaaucacgcauuaauguccauaauauccaccuuccaucuaucaaucccaaacuuuaaccaauacgaagcaauguccugcgacuuuaacggaggaaaaauaucaguacaauauaacuuaucccacucauaugcaguagaugccgccaaucacugcggaacaauagcaaacggaguacuacaaacauucaugagaauggcuuggggaggaagcuacauugcccuagacucaggauguggaaauugggauuguaucaugacauccuaucaauaccuaauaauacaaaauaccacaugggaagaucacugccaauucucacgaccaucaccaauaggauauuuaggacuccucucccaacgaacucgagacauuuauauuucacgaagacgaagaggaacuuucacauggacucuaucagauagcgaaggaaaugaaacacccggaggauauugccuaacaagauggaugcugauagaagcagaacuaaaauguuucggaaauacagcaguagcaaaaugcaaugaaaaacaugacgaagaauuuugcgauauguuaagauuauucgacuucaacaaacaagcaauacgcagacuuaaaacaccagcacaagcaaacauacaacuaauaaacaaagcaguaaaugcauuaauuaacgaccaacuaauaaugaaaaaccaucuaagagacaucaugugcauaccauauuguaacuauucaaaauauugguaccuaaaucacacaguaacaggaaaaaccucacuaccuagguguugguuaguaucaaacggaagcuaccuaaacgaaacacauuucuccgacgacauagaacaacaagcagacaacaugauaacugaacuauuacaaaaagaauauauggacagacaaggaaaaacgcccuuaggacuuguagacuuauucguauucucaaccucauuuuaccuaauaucaauauuccuacaccucguaaaaauaccaacacacagacaugucauaggaaaaccuugcccaaaaccucacagacuaaaccacaugggaauaugcuccugcggccuauacaaacauccaggaguaccuguaaaauggaaaagauaaggacuagugcaucacauuuaaaagcaucucagccuaccaugagaauaagagaaagaaaaugaagaucaauagcuuauucaucucuuuuucuuuuucguugguguaaagccaacacccugucuaaaaaacauaaauuucuuuaaucauuuugccucuuuucucugugcuucaauuaauaaaaaauggaaagaaccuagaucuaaaaaaaaaaaaaaaaaaaaaaaaaaaaaaaaaaaaaaaaaaaaaaaaaaaaaaaaaaaaaaaaugcaucccccccccccccccccccccccccccccccaaaggcucuuuucagagccaccagaauu

SEQ ID NO: 7216 - RNA, 1855 nt, Artificial Sequence
  mRNA product Design i-2 comprising derived and/or modified sequence from LASV(Nig08-A19;Clade III)__ADU56618__GPCstabilized (opt6)
ggggcgcugccuacggagguggcagccaucuccuucucggcaucaagcuuaccaugggucaaauaguaacauucuuccaagaagucccccacguuauagaagaaguaaugaacauagucuuaauagcauuaucaauacuagccauccuuaaaggacuauacaauauagcaaccugcggacuuauuggccuaguaacauuucuacucuuaucaggaagaucaugcuccaugacuuauaaaggaguauacgaacuucaaacacuagaacuuaacaugaauacuuuaaauaugacaaugccauuaucaugcaccaaaaacaacucacaccauuacaucaugguuggcaacgaaacaggauuagaacuaacuuuaacaaacacaucauuacuacaucacaaauucugcaaucuaagcgacgcacauaagaaaaaucuauacgaccacacacuaaugucaauaauaucaacauuucaucuaucaauaccaaacuucaaucaauacgaagcaaugagcugugauuucaacggaggaaaaauaacaguccaauacaaccuaucacacucuuacgcaauagacgcagcaaaccacugcggaacagucgcuaaugggguacuacaaaccuucaugagaauggcauggggcggcucauacaucgcacuugauagcggauguggcaaaugggauugcauuaugacaucauaccaauaccuaauaauccaaaauacaacgugggaagaccacugccaauucaguagaccuucaccaauaggauacuuaggauuacuaucacaacgaaccagagauaucuacauauccagaagaagacgcggcacauucacauggacccucucagacucagaagguaaugaaacaccaggaggauacugcuuaacaagauggaugcuuauagaagcagaauuaaaaugcuucggaaacaccgcuguagcaaaaugcaacgaaaaacacgacgaagaauuuugcgacaugcuaagacuauucgacuucaacaaacaagcaaucagacgauuaaaagcucccgcacaaauguccauacaacuaauaaauaaagcaguaaaugcuuuaauaaacgaccaacuaauaaugaaaaaccaccuaagagacauuaugugcauacccuauugcaacuacucaaaauacugguaucuaaaccauacaucaacugguagaacaucacuaccaagaugcugguuaguaucaaacggauccuacuuaaaugaaacacacuucucugaugacauagaacaacaagcagacaacaugauaacagaaaugcuucaaaaagaauacuuagacagacaagguaaaacaccucucgggcuaguagaccuauucguauucucaacaucauucuaccuuauaucaauauuccuacauuuaguaaaaaucccaacacaccgacauaucguaggaaaaccaugcccaaaaccacacagauuaaaucacaugggaauauguaguugcggauuauacaaacaacccggaguaccuguacgcuggaaaagauaaggacuagugcaucacauuuaaaagcaucucagccuaccaugagaauaagagaaagaaaaugaagaucaauagcuuauucaucucuuuuucuuuuucguugguguaaagccaacacccugucuaaaaaacauaaauuucuuuaaucauuuugccucuuuucucugugcuucaauuaauaaaaaauggaaagaaccuagaucuaaaaaaaaaaaaaaaaaaaaaaaaaaaaaaaaaaaaaaaaaaaaaaaaaaaaaaaaaaaaaaaaugcaucccccccccccccccccccccccccccccccaaaggcucuuuucagagccaccagaauu

SEQ ID NO: 7217 - RNA, 1858 nt, Artificial Sequence
  mRNA product Design i-2 comprising derived and/or modified sequence from LASV(G1180-SLE-2010;Clade IV)__AIT17168__GPCstabilized (opt6)
ggggcgcugccuacggagguggcagccaucuccuucucggcaucaagcuuaccaugggacaaauagucacuuuuuuccaagaaguaccacauguaaucgaagaaguaaugaacauaguacuaauagcacuuuccauacuagcuguccuaaaaggacucuacaacuucgccacaugcggacuaguaggccuauuaacauuccuauuauuaugcggccguuccugcacagcaucaagauacaaagguguauacgaacuccaaacacuagaauuaaauauggaaacauuaaacaugacaaugccucuaucaugcacaaaaaacaacucacaucauuacauaaugguaggaaacgaaacaggacuagaacuaacauuaacaaacacaucaauaaucaaucacaaauucugcaauuuaagcgacgcucacaaaaaaaacuuauacgaccacgcauuaaugucaauaauaucaacuuuccaccuuucaaucccaaacuucaaccaauacgaagcaaugucaugugacuucaacggcggaaaaauaucaguucaauacaacuuaucucacucauacgcuggagacgcagcaaaucacuguggaacaguagcaaacggaguucuacaaacauucaugagaauggcauggggaggaucauauauagcauuagacucaggaugcggaucaugggacugcauuaugaccucauaccaauaccuaauaauacaaaacacaacaugggaagaccacugccaauucucuagaccaaguccaauaggauacuuaggacuucuaucacaaagaacacgcgacauauacauaucccgcagacgaagagguacauuuacauggacacuaagcgauuccgaaggaaaagacacaccaggaggauauugccuaacacgcuggaugcucauagaagcugaacuaaaaugcuucggaaauacagcuguagcaaaauguaacgaaaaacacgacgaagaauuuugugacaugcuaaggcuauucgacuucaacaaacaagcaauccaaagauuaaaagcacccgcucaaaugucaauacaacuaauaaacaaagcaguaaacgcacuaauaaacgaccaacuaauaaugaaaaaccaucucagagauauaaugugcauuccauacugcaacuauucaaaauacugguaucuaaaucacacaacaaccgguaaaacaucacuaccaaaaugcugguuaguaagcaacggaucauauuuaaacgaaacacacuucucugacgauauagaacaacaagcagacaauaugauaacagaaauguuacaaaaagaauacauggaaaggcaaggaaaaaccccacuaggauuaguagaccuauuuguauucucaacaaguuuuuacuuaauaucaaucuuucuacaucuaguaaaaauaccaacccacagacacauaguaggaaaauccugccccaaaccucacagacuaaaccacaugggcauaugcuccugcggacuauacaaacaacccggaguaccagucaaauggaaaagauaaggacuagugcaucacauuuaaaagcaucucagccuaccaugagaauaagagaaagaaaaugaagaucaauagcuuauucaucucuuuuucuuuuucguugguguaaagccaacacccugucuaaaaaacauaaauuucuuuaaucauuuugccucuuuucucugugcuucaauuaauaaaaaauggaaagaaccuagaucuaaaaaaaaaaaaaaaaaaaaaaaaaaaaaaaaaaaaaaaaaaaaaaaaaaaaaaaaaaaaaaaaugcaucccccccccccccccccccccccccccccccaaaggcucuuuucagagccaccagaauu

SEQ ID NO: 7218 - RNA, 1858 nt, Artificial Sequence
  mRNA product Design i-2 comprising derived and/or modified sequence from LASV(G1442-SLE-2011;Clade IV)__AIT17180__GPCstabilized (opt6)
ggggcgcugccuacggagguggcagccaucuccuucucggcaucaagcuuaccaugggacaaauaguuaccuuuuuccaagaaguaccucauguaauagaagaagucaugaauauaguccuaauagcauuaucaauauuagcaguauuaaaaggacuuuacaacguagcaaccuguggacuaauaggucuaguaacauuucuacucuuaugcggaagaucauguacuacaacacuauacaaaggaguauacgaauuacaaacucuagaacuaaauauggaaacacuaaacaugacaaugccacucucauguaccaaaaacaacucacaucacuacauucgaguaggaaaugaaacaggucuagaauuaacauuaacaaacacaucaauaauaaaccauaaauucugcaaccucucagacgcacacaagaaaaacuuauacgaccaugcauuaaugucaauaauuuccacauuccauuuauccauaccaaauuuuaaucaauacgaagcaauguccugcgacuucaacggaggaaaaauauccguucaauauaauuuaagucacucuuaugcaggagacgcagcaaaucacuguggaacaguagccaacggagucuuacaaacauucaugagaauggcauggggagguucauacaucgcccuagacucaggcugcggaaauugggauugcauaaugacauccuaucaauaccuaauaauacaaaacacaaccugggaugaccacugucaauucucaagaccaucuccaauaggauauuuaggauuacuaucacaaagaacaagagacguauacauaagcagaagaagaagaggaacauuuacauggacuuuaucagauucagaaggaaaagacacacccggcggcuacugccugaccagauggaugcuaauagaagcagaauuaaaauguuucggcaacacagcaguagcaaaaugcaaugaaaaacacgacgaagaguucugcgauaugcuaagacuuuucgacuucaauaaacaagcaauucaacgauuaaaagcuccagcacaaauguccauacaacuuauaaacaaagccguaaacgcccuaauuaaugaucaauuaauaaugaaaaaccaccuaagagacauaauguguauaccuuacuguaauuacaguaaauacugguacuuaaauaauacugccacaggaaaaacaucauuaccaaaaugcugguuaauaucaaacggaucauacuuaaacgaaacacacuucucagaugacaucgaacaagaagcugacaacaugauuacagaaauguuacaaaaagaauacauggaaagacaaggaaaaacaccuuuaggucuaguagaucuauucgucuucuccacaucauucuaucucauaucuaucuuucuacaccuaguaaaaauaccaacacacagacacauagucggaaaauccugcccaaaaccacacagauuaaaccacaugggaauuugcucaugcggacuauacaaacaaccaggaguaccaguaagauggaaaagauaaggacuagugcaucacauuuaaaagcaucucagccuaccaugagaauaagagaaagaaaaugaagaucaauagcuuauucaucucuuuuucuuuuucguugguguaaagccaacacccugucuaaaaaacauaaauuucuuuaaucauuuugccucuuuucucugugcuucaauuaauaaaaaauggaaagaaccuagaucuaaaaaaaaaaaaaaaaaaaaaaaaaaaaaaaaaaaaaaaaaaaaaaaaaaaaaaaaaaaaaaaaugcaucccccccccccccccccccccccccccccccaaaggcucuuuucagagccaccagaauu

SEQ ID NO: 7219 - RNA, 1858 nt, Artificial Sequence
  mRNA product Design i-2 comprising derived and/or modified sequence from LASV(G3010-SLE-2013;Clade IV)__AIT17344__GPCstabilized (opt6)
ggggcgcugccuacggagguggcagccaucuccuucucggcaucaagcuuaccaugggucaaaucguaacauuuuuccaagaaguaccacacgugaucgaagaaguaaugaauauaguacucauagcauuaaguauauuagcuguacuaaaaggccuauauaacuucgccacaugcggucuaguaggucuaguaacauuucuacuauuaugcggaagauccugcacaacaucccuauacaaaggagucuacgaauuacaaacauuagaauuaaacauggaaacacugaacaugacaaugccauuaucaugcaccaaaaacaacucacaccacuacaucauggucggaaaugaaacaggacuagaacuaacacuaacaaacacauccauaauaaaccacaaguuuugcaacuuaucagacgcacauaagaaaaaccucuauaaucacgcacuuauguccauaauauccacauuccaccuauccauaccaaacuucaaccaauacgaagcaaugucaugcgacuucaacggaggaaaaauuucaguacaauacaacuuaucacacucauacgcgggagacgcagcaucucauugcggaacaguagcaaacggaguauuacaaacauuuaugcgaauggcuuggggaggcucauauauagcacuagacucaggaugcggaaaaugggacugcauaaugacauccuaccaauaccuaauaauccaaaauacaacaugggaagaucauugucaauucuccagacccucaccaauaggauaccuuggacuacuaucacaaagaacaagagacauauacauaucaagaagaagacgaggaacauuuaccuggacacuaucagacucugaaggaaaagacacaccaggaggcuauugccuaacaagauggauguuaauagaagcagaacuaaaauguuucggaaauacagccguagcaaaauguaacgaaaaacaugacgaagaauuuugugauauguuacgacuauucgacuucaauaaacaagcaauacaaagacuaaaaacaccagcacaaaugucaauacaauuaauaaacaaagcaguuaacgcacuaauuaaugaucaacuaauaaugaaaaaccauuuaagagacauaauguguauaccuuauugcaauuacucaaaauacugguauuuaaaccacacaacaaccggcaaaacuucuuuaccaaaaugcuggcuaguaucuaacggaucauaucuuaacgaaacacacuucucagaugacauagaacaacaagcagacaacaugauuacagaaauguuacaaaaagaauauauggaaagacaaggaaaaacaccauugggcuuaguugauuuauuuguauucucaaccagcuucuacuuaauaucaauauuccuacaccuaguaaaaauaccuacacaccgacacauaguaggaaaaucaugccccaaaccacacagacuaaaucacaugggaauauguuccuguggacuauauaaacaaccaggaguaccaguaagguggaaaagauaaggacuagugcaucacauuuaaaagcaucucagccuaccaugagaauaagagaaagaaaaugaagaucaauagcuuauucaucucuuuuucuuuuucguugguguaaagccaacacccugucuaaaaaacauaaauuucuuuaaucauuuugccucuuuucucugugcuucaauuaauaaaaaauggaaagaaccuagaucuaaaaaaaaaaaaaaaaaaaaaaaaaaaaaaaaaaaaaaaaaaaaaaaaaaaaaaaaaaaaaaaaugcaucccccccccccccccccccccccccccccccaaaggcucuuuucagagccaccagaauu

SEQ ID NO: 7220 - RNA, 1858 nt, Artificial Sequence
  mRNA product Design i-2 comprising derived and/or modified sequence from LASV(G502-SLE-2009;Clade IV)__AIT17126__GPCstabilized (opt6)
ggggcgcugccuacggagguggcagccaucuccuucucggcaucaagcuuaccaugggacaaauaguaaccuucuuccaagaaguaccacacguaaucgaagaagucaugaauauaguucuaauagcacucagcaucuuagcaguccuaaaaggacuauacaauuuugcaacaugcggucuaguaggacuacuuacauuccuucuauuauguggaagauccugcacaacaggacuauauaaaggaguauaugaauuacaaacacucgaauuaaacauggaaacacuaaacaugacaaugccacuaucaugcacuaaaaauaacucacaucauuauaucaugguuggaaaugaaacagguuuagaacuaacacuaacaaauacaagcauaaucaaucacaaauucugcaacuuaucugaugcucacaagaaaaacuuauaugaccacgcacuaaugagcaucauaucaacauuucacuuaucaaucccaaauuucaaccaauaugaagcaaugucaugcgauuucaacggaggaaaaauaucaguacaauacaaccucucacauucuuaugcuggagaugcagcagaucacugcggaacaguagcaaacggaguauuacaaacauucaugcgaauggcauggggaggaucauacauagcucucgacuccggaugcggaagaugggauugcauaaugacauccuaucaauaccuuauaauacaaaacacaacaugggaagaccacugccaauucucaagaccaaguccaauaggauaccuaggacuauuaucacaacgaacaagagacauuuacauaucucgacgcagaagaggaaccuucaccuggacauuauccgacucagaaggaaaagauacaccaggaggauacugcuuaacaagauggaugcuaauagaagccgaacucaaaugcuucggaaauacagcaguagccaaaugcaacgaaaaacacgaugaagaauuuugugacaugcuaagacuauucgacuucaacaaacaagcuauacaaagauuaaaagcacccgcccaaauguccauccaacuaauaaauaaagcuguaaacgcacuaaucaaugaccaacucguaaugaaaaaucaucuaagagacauaauguguauacccuacuguaacuacucacgauacugguaccuaaaccauacaacaacaggaagaacaucacuuccaaaaugcugguuagucucuaauggaucauaccuaaacgaaacacacuuuuccgacgauauagaacaacaagcagauaauaugauaacugaaauguuacaaaaagaauacauggaaagacaaggaaaaacuccccuaggucuaguagaccucuucguauuuucaacaucuuuuuaucuaaucucaauauucuuacaccuaguaaaaauaccaacacacaggcauauagucggaaaauccuguccaaaaccacacaggcuaaaccacaugggaauaugcucuuguggacuauacaaacaaccaggagucccaguaaaauggaaaagauaaggacuagugcaucacauuuaaaagcaucucagccuaccaugagaauaagagaaagaaaaugaagaucaauagcuuauucaucucuuuuucuuuuucguugguguaaagccaacacccugucuaaaaaacauaaauuucuuuaaucauuuugccucuuuucucugugcuucaauuaauaaaaaauggaaagaaccuagaucuaaaaaaaaaaaaaaaaaaaaaaaaaaaaaaaaaaaaaaaaaaaaaaaaaaaaaaaaaaaaaaaaugcaucccccccccccccccccccccccccccccccaaaggcucuuuucagagccaccagaauu

SEQ ID NO: 7221 - RNA, 1858 nt, Artificial Sequence
  mRNA product Design i-2 comprising derived and/or modified sequence from LASV(G733-SLE-2010;Clade IV)__AIT17154__GPCstabilized (opt6)
ggggcgcugccuacggagguggcagccaucuccuucucggcaucaagcuuaccaugggacaaauaguaaccuucuuccaagaaguaccucacguaauagaagaaguaaugaauauaguauuaauagcauuauccauccucgcaguacuuaaagguuuauacaacuuugcaaccugcggcauagucggucuaguauccuuucucuuauuaugcggaagaucauguacaacauccuuauacaaaggaguauacgaacuacaaacauuagaauuaaacauggaaacucucaacaugacaaugccauuaucauguaccaaaaacaauagccaucauuauauaaugguaggaaacgaaacaggacucgaacuaacacuaacaaacacaucaauaauaaaccacaaauucugcaaccuuucagacgcacacaagaaaaaccuauacgaucacgcacuaaugucuauaauaucaacauuccaccuaagcauaccaaauuucaaucaauacgaagccauguccugugacuucaauggaggaaaaauaucaguacaauacaaccuaucacauuccuacgcaggagacgcagcaaaccauugcggaacaauagcaaacggaguucuacaaacauucaugagaauggcauggggaggaagcuacauagcacuagacucaggcugcgaccgaugggauugcauaaugacauccuaccaauaccuaauaauacaaaacacaacaugggaagaccauugccaauucucccgcccaucaccaauaggauacuuaggacuacuaucacaaagaacaagagacauuuauauaucuagacgaagaagaggaacauuuacauggacacuaucagauuccgaaggaaaagacacaccuggcggcuauugucuaaccagauggauguuaauagaagcagaacucaaaugcuuuggaaacacagcaguagccaaaugcaacgaaaaacacgacgaagaauuuugcgacauguuaagacucuucgauuuuaacaaacaagcaauacaaagauuaaaagcacccgcacaaaugucaauacaauuaauaaauaaagcuguaaacgcacuaauaaacgaccaauuaaucaugaaaaaccaucucagagauauaauguguauaccauacuguaauuauucuaaauacugguauuuaaaccacacaaccaccggaaaaacaucauuaccuaaaugcuggcuaguaagcaacgguucuuaucuaaacgaaacacacuuuucagacgacauagaacaacaggcagauaauaugauaaccgaaauguuacaaaaagaauacauggaaagacaaggaaaaacaccauuaggucuaguagaucuauucguauucucaacuagcuucuaccuuauaucaauuuuccuacauuuaguaaaaauacccacacauagacauguaguaggaaaaucauguccaaaaccacacagauuaaaccauaugggaaucuguucuugcggacuauacggacaaccagguguuccaguaaaauggaaaagauaaggacuagugcaucacauuuaaaagcaucucagccuaccaugagaauaagagaaagaaaaugaagaucaauagcuuauucaucucuuuuucuuuuucguugguguaaagccaacacccugucuaaaaaacauaaauuucuuuaaucauuuugccucuuuucucugugcuucaauuaauaaaaaauggaaagaaccuagaucuaaaaaaaaaaaaaaaaaaaaaaaaaaaaaaaaaaaaaaaaaaaaaaaaaaaaaaaaaaaaaaaaugcaucccccccccccccccccccccccccccccccaaaggcucuuuucagagccaccagaauu

SEQ ID NO: 7222 - RNA, 1858 nt, Artificial Sequence
  mRNA product Design i-2 comprising derived and/or modified sequence from MOPV/LASV reassortant(IGS-1;Clade IV)__AFY05576__GPCstabilized (opt6)
ggggcgcugccuacggagguggcagccaucuccuucucggcaucaagcuuaccaugggccaaaucguaaccuucuuucaagaaguaccucauguaauugaagaaguaaugaauauaguucuuauagcacuaucaguauuagcaguucuaaaaggauuauauaacuucgccacauguggucuaguaggccuaguaaccuuuuuacuacuauguggaagaucaugcaccacaucauuauauaaaggaguauacgaacuucaaacccuagaacuaaauauggaaacacuaaacaugacaaugccauuaucaugcacgaaaaauaacucccaccacuacauuaugguaggaaacgaaacaggucuagaauuaacacucacaaauacaucaauuauaaaccacaaauuuugcaaucucuccgaugcgcacaagaaaaauuuauaugaccacgcacuaaugucaauaauaucaacauuucaccuaagcauaccaaacuucaaccaauaugaagccaugucaugcgauuucaacggaggaaaaaucucaguacaauacaaccuaucccauucauacgcaggagaugcagcaaaucacugcggcacaguagcaaacggcguacuacaaacauuuaugcgcauggccugggguggcucauacauagcucuagauucugguugugguaauugggauuguauaaugacaucuuaccaauaucuaauaauccaaaauacaacaugggaagaccacugccaauucucaagaccaucaccaauaggauauuuagguuuauuaucacaaagaacaagagacaucuauaucucacgaagaagacgaggaacauucacauggacacucucagacucugaaggugaagacacaccaggaggauacugccuaacacgauggauguuaauagaagcagaacuaaaaugcuucggaaauacagcaguugcaaaaugcaacgaaaaacacgaugaagaauuuugcgauauguuacgauuauuugacuuuaacaaacaagcaauacaacgacuaaaagcccccgcacaaaugucaauacaacuaauaaacaaagcaguaaaugcacugauaaaugaucaacuaauaaugaaaaaucacuuaagagacaucauguguaucccauauugcaacuacucaaaauauugguaucuaaaucacacuaccacaggaagaacaucccuaccaaaaugcuggcucguaucuaacggaaguuaccuaaacgaaacacacuuuucagaugauaucgaacaacaagcagacaacaugauaacagaaaugcuacaaaaagaauauauggaaagacaaggaaaaacaccacucggcuuagucgaccucuucgucuuuucaacaucauucuaccuaauaucaaucuuccuacaccucguaaaaauaccaacacacagacauauaguaggaaaaucgugcccaaaaccacauagacuuaaccauaugggaauauguucauguggucuuuacaaacaaccaggcgugccaguaaaauggaaacguuaaggacuagugcaucacauuuaaaagcaucucagccuaccaugagaauaagagaaagaaaaugaagaucaauagcuuauucaucucuuuuucuuuuucguugguguaaagccaacacccugucuaaaaaacauaaauuucuuuaaucauuuugccucuuuucucugugcuucaauuaauaaaaaauggaaagaaccuagaucuaaaaaaaaaaaaaaaaaaaaaaaaaaaaaaaaaaaaaaaaaaaaaaaaaaaaaaaaaaaaaaaaugcaucccccccccccccccccccccccccccccccaaaggcucuuuucagagccaccagaauu

SEQ ID NO: 7223 - RNA, 1858 nt, Artificial Sequence
  mRNA product Design i-2 comprising derived and/or modified sequence from LASV(LM765-SLE-2012;Clade IV)__AIT17814__GPCstabilized (opt6)
ggggcgcugccuacggagguggcagccaucuccuucucggcaucaagcuuaccaugggacaaauaguaacauucuuucaagaaguaccacauguaauagaagaaguaaugaacaucguauuaauagcauuaaguauacuagccguacuaaaaggacuauauaauuucgccacaugcggacucguaggccuagucaccuuccuacuucuaugcggaagaucuuguacaacaucauuauacaaaggagucuacgaacugcaaacauuagaauuaaacauggaaacacuaaacaugacaaugccacuaucaugcaccaaaaacaauucacaucacuacaucauggugggaaacgaaacaggauuagaacuaacacuuacaaauacaagcauaauagaccacaaauucugcaaccuaucagaugcacacagaaagaacuuauaugaucacgcacuaauguccauaauaucaacauuucaccuauccauaccaaacuucaaccaauaugaagcaaugucaugcgacuucaacggaggaaaaauaucaguacaauacaacuuaucacacaguuacgcaaaagacgcagcagaucauuguggaacaguagcaaacggaguacuacaaacauucaugcgaauggccuggggaggaagcuacauagcgcuagacucaggauguggacgaugggauugcauaaugacuucauaucaauacuuaaucauccaaaacacuacaugggaagaucacugucaauucuccagacccucccccauaggauaccuaggacuauuaucacagagaaccagagauauauauauaucaagaagaagaagaggaacauucacauggacccuaucagacucagaaggaaaagacaccccaggaggauacugcuuaacacgauggaugcucaucgaagcugaauuaaaaugcuucggaaauacagcagucgcaaaaugcaaugaaaaacacgacgaagaauuuugugacaugcuaagauuauucgacuucaacaaacaagccauacaacgacuaaaagcaccagcccaaaugucaauacaauuaauaaacaaagcaguaaacgcauuaauaaaugaccaacuaauaaugaaaaaucaccuuagagauauaauguguauuccauacugcaacuauagcaaauacugguacuuaaaucacaccacaacaggaaaaacaagccucccuaaauguuggcuaguauccaauggaucauaucuuaaugaaacacauuucucagaugauauagaacaacaagcagacaacaugauaaccgaaauguuacaaaaagaauauauggaaagacaaggaaaaacaccauuaggucuaguagauuuauucguauuuucaacaucauucuaucuaauaucaauuuuccuacaucuaguaaaaauacccacccacagacauauaguaggaaaaccaugcccaaaaccacacagacuaaaccacaugggaaucugcucauguggacucuauaaacaaccaggaguaccaguuaaauggaaaagauaaggacuagugcaucacauuuaaaagcaucucagccuaccaugagaauaagagaaagaaaaugaagaucaauagcuuauucaucucuuuuucuuuuucguugguguaaagccaacacccugucuaaaaaacauaaauuucuuuaaucauuuugccucuuuucucugugcuucaauuaauaaaaaauggaaagaaccuagaucuaaaaaaaaaaaaaaaaaaaaaaaaaaaaaaaaaaaaaaaaaaaaaaaaaaaaaaaaaaaaaaaaugcaucccccccccccccccccccccccccccccccaaaggcucuuuucagagccaccagaauu

SEQ ID NO: 7224 - RNA, 1858 nt, Artificial Sequence
  mRNA product Design i-2 comprising derived and/or modified sequence from LASV(LM776-SLE-2012;Clade IV)__AIT17824__GPCstabilized (opt6)
ggggcgcugccuacggagguggcagccaucuccuucucggcaucaagcuuaccaugggacaaauaguaacauucuuccaagaaguaccucacgucauagaagaagucaugaacauaguccuaauagcccuaucaauacucgcaguacuaaaaggauuauacaauuuugcuacuuguggauuaguaggauuaguaacauucuuacuacucugcggccgaucaugcacuacaucaguauacaaaggaguauacgaacuacaaaccuuagaauuaaauauggaaacauuaaacaugacaaugccacuaucaugcaccaaaaacaacucacaucauuacauaaugguuggaaaugaaacaggccuagaauuaacacuaacaaacacaucaaucauaaaccacaaauucugcaaucugucagacgcacacaagaaaaaccuauaugaccacgcauuaaugucuauaaucucuacauuccauuuaagcauaccaaacuuuaaccaauacgaagcaaugucaugcgacuucaacggaggaaaaauaucaguccaguacaaucuaucacacucauacgcaggagaugcagcaaaccauuguggaacugucgccaacggcguauuacaaacauucaugcgaauggcauggggcggaucauacauagcacuagacucuggaugcggaaaaugggacugcauaaugacaucauaccaauaccuaauaauucaaaacacaacaugggaagaucacugucaauuuucacgaccaucuccaaucggauaucuaggacuacuuucacaaagaaccagagacauauauauaucucgucgccgcagaggaacauuuaccuggacauuaagugacuccgaaggaaaagauaccccaggaggcuauugucuaaccagauggaugcuaauagaagcagaacuaaaaugcuucggaaauacagcuguagcaaaauguaacgaaaaacaugacgaagaauuuugcgauauguuaagacuauucgacuucaauaaacaagcaauacaacgauuaaaagcaccagcacaaaugucaauacaauuaauaaauaaagccgucaaugcucuaauaaacgaccaacuaauaaugaaaaaccauuuacgcgacauaaugugcauacccuacugcaauuacucaaaauauugguaccuaaaucacacaacaaccggaaaaacaucauuaccuaaauguuggcucguaucaaacggauccuaucuaaaugaaacacacuuuucagacgauauagaacaacaagcagauaacaugauuacagaaaugcuucaaaaagaauauauggaaagacaaggcaaaacaccacuaggucuaguagaccucuucguauuuucaaccucauucuacuuaauaucaauauuccuacaucuaguuaaaauaccaacacaccgucacauagucggaaaaucuugcccaaaaccacacagacuaaaccauaugggaauaugcucaugcgguuuauacaaacaaccaggaguaccaguaagauggaaacgauaaggacuagugcaucacauuuaaaagcaucucagccuaccaugagaauaagagaaagaaaaugaagaucaauagcuuauucaucucuuuuucuuuuucguugguguaaagccaacacccugucuaaaaaacauaaauuucuuuaaucauuuugccucuuuucucugugcuucaauuaauaaaaaauggaaagaaccuagaucuaaaaaaaaaaaaaaaaaaaaaaaaaaaaaaaaaaaaaaaaaaaaaaaaaaaaaaaaaaaaaaaaugcaucccccccccccccccccccccccccccccccaaaggcucuuuucagagccaccagaauu

SEQ ID NO: 7225 - RNA, 1858 nt, Artificial Sequence
  mRNA product Design i-2 comprising derived and/or modified sequence from LASV(Mad39;Clade IV)__ANH09722__GPCstabilized (opt6)
ggggcgcugccuacggagguggcagccaucuccuucucggcaucaagcuuaccaugggacaaauaguaaccuuuuuccaagaaguuccacauguaauagaagaaguaaugaacauaguccuaauagcacuauccauauuagccguacuaaaagguuuauacaauguagccacaugcggacucauaggccuuguaacauuucuacuccuaugcggacgcucaugcacaacaacacuauacaaaggaguauaugaacuacaagcacuagaacucaacauggaaacacuaaacaugacaaugccauuauccugcacaaaaaauaacucucaccacuauaucagaguuggaaacgaaacaggacuagaacuuacauuaacuaacacaucacuaauaaaccacaaauucugcaaucuaucugaugcacacaaaaaaaaccuuuacgaccacgcacuaaugucaauuauaucaacauuccaccuaucaauaccaaacuucaaucaauacgaagcaaugucuugcgacuucaacgauggaaaaauaucaguucaauacaaucuaucacacacauacgccggagacacagccaaccacuguggaacagucgcaaauggcguuuuacaaacauuuaugcgaauggcauggggaggaucuuacauagcacuagacucagguuguggaggaugggauugcauaaugacaucauaucaauaccuaauaauucaaaacacaacaugggaagaucacugccaauuuucaagaccauccccaauaggauaucuaggacuuuuaucacaaagaacgagagacauauacauaucacgaagaagaagaggaacuuucacauggacgcucuccgacuccgaagguaaagacacaccaggaggauacugcuuaacuagauggauguuaauagaagcagaauuaaaaugcuuuggaaauacagcaguagcaaaaugcaacgaaaaacaugaugaagaauucugugacaugcuucgacuauuugacuucaauaaacaagcaauacaaagacuaaaagcaccagcacaaaugucaauccaauuaauaaacaaagcaguaaaugcauugauaaaugaccaauuaauaaugaaaaaucaucuaagagacauaaugugcauaccauauugcaauuacucuaaauauugguaccuaaaccacacugucacuggaaaaaccucacuaccaaaauguugguuaguauccaacggcucauaccuaaacgaaacccauuucuccgaugacauagaacaacaagccgacaacaugauaacagaaaugcuccaaaaagaguacauggaaagacaagguaaaaccccuuuaggauuagucgaccuauucguauucucaacauccuucuaccuaauaucaaucuucuuacaucuuguaaaaauaccaacucaucgccacgucguuggaaaaccaugccccaaaccacaucgacucaaccauauggguauauguuccuguggcuucuacaaacaaccaggagucccaguacgauggaaaagauaaggacuagugcaucacauuuaaaagcaucucagccuaccaugagaauaagagaaagaaaaugaagaucaauagcuuauucaucucuuuuucuuuuucguugguguaaagccaacacccugucuaaaaaacauaaauuucuuuaaucauuuugccucuuuucucugugcuucaauuaauaaaaaauggaaagaaccuagaucuaaaaaaaaaaaaaaaaaaaaaaaaaaaaaaaaaaaaaaaaaaaaaaaaaaaaaaaaaaaaaaaaugcaucccccccccccccccccccccccccccccccaaaggcucuuuucagagccaccagaauu

SEQ ID NO: 7226 - RNA, 1858 nt, Artificial Sequence
  mRNA product Design i-2 comprising derived and/or modified sequence from LASV(Z0947-SLE-2011;Clade IV)__AIT17840__GPCstabilized (opt6)
ggggcgcugccuacggagguggcagccaucuccuucucggcaucaagcuuaccaugggacaaauaguaacauucuuccaagaaguaccacacguaauagaagaaguaaugaauaucguucucauagcucuuuccauccuagcuguacuaaaaggauuauauaauuucgccacaugcggccuaguaggcuuaguaacauucuuauuacucugcgguagauccugcacaauaucacuauacaaaggaguauacgaauuacaaacccuagaacuuaacauggaaacacuaaacaugacaaugccauuauccuguacaaaaaacaauucucaccacuacauaaugguaggaaacgaaacaggucucgaacuaacucucacaaauaccuccauaauaaaccacaaauucugcaaccucucugaugcucacaaaaaaaaccuauacgaccaugcucuaauguccauaauaucaacuuuucauuuaucaaucccaaacuucaaccaauacgaagcaauguccugugacuuuaacggaggcaaaauuucagugcaauacaacuuaucacacucauacgccggagacgcugcuaaucacugcgguacaguagcaaacggaguauuacaaacauuuaugcgaauggcauggggaggaagcuacaucgcacucgacuccggaugugacagaugggacuguauaaugacaucauaccaauaccuaauaauacaaaacacuacaugggaagaccacugccaauuuucacgcccaucaccaaucggauacuuaggacuacuaucacaaagaaccagagacauauacauuuccagaagaagaagaggaacauucaccuggacccuaucagauucagaaggcaaagauacucccgguggauacugccuaacaagauggaugcuaauagaagcugaauuaaaaugcuucggaaacacagcaguagcaaaaugcaaugaaaaacacgaugaagaauucugcgauaugcuccgccuuuuugacuucaauaaacaggcaauacaacgauuaaaagcacccgcacaaaugaguauacaacuaauaaacaaagcaguaaacgcacuaauaaacgaucaauuaauaaugaaaaaucaucucagagacaucaugugcauaccauauugcaacuauagcaaauacugguacuuaaaccacacaaccacaggcaaaacaucacuaccaaaaugcuggcuaguaucuaacggaucauacuuaaaugaaacacauuucagcgaugauauagaacaacaagcagacaacaugauaacagaaaugcuacaaaaagaauacauggaacgacaaggaaaaaccccauuaggacuaguagacuuauucguauucaguacaucauuuuaccucauaaguaucuuccuacaccuugucaaaauaccaacacaucgacacauaguaggaaaaccaugccccaaaccacauagacuaaaccacaugggaauuugcuccuguggacuauauaaacaacccggcguaccaguaaaauggaaacgauaaggacuagugcaucacauuuaaaagcaucucagccuaccaugagaauaagagaaagaaaaugaagaucaauagcuuauucaucucuuuuucuuuuucguugguguaaagccaacacccugucuaaaaaacauaaauuucuuuaaucauuuugccucuuuucucugugcuucaauuaauaaaaaauggaaagaaccuagaucuaaaaaaaaaaaaaaaaaaaaaaaaaaaaaaaaaaaaaaaaaaaaaaaaaaaaaaaaaaaaaaaaugcaucccccccccccccccccccccccccccccccaaaggcucuuuucagagccaccagaauu

SEQ ID NO: 7227 - RNA, 1858 nt, Artificial Sequence
  mRNA product Design i-2 comprising derived and/or modified sequence from LASV(Josiah;Clade IV)__NP_694870__GPCstabilized (opt11)
ggggcgcugccuacggagguggcagccaucuccuucucggcaucaagcuuaccaugggccaaaucguaaccuucuuccaagaagucccccacgucaucgaggaagucaugaacauaguccucauagcgcucucaguacucgccguccuaaaaggccucuacaacuucgcaaccugcggacucguaggacugguaacauuccuucuacuaugcggaagaucaugcacuaccucacuauacaaaggagucuacgaacuacaaacccuagaacugaacauggaaacccucaacaugaccaugccccuauccugcaccaaaaacaacagccaucacuacauaaugguaggcaacgaaaccggccuugaacuaacccuaacaaacacauccaucauaaaccacaaauucugcaaccucuccgacgcccacaagaaaaaccucuacgaccacgcucucaugaguaucauauccaccuuucaccuguccaucccaaauuuuaaccaguaugaagccauguccugcgacuucaacggcggaaaaaucuccguacaauacaaccucucccacuccuacgccggcgacgcagccaaccacugcggcaccgucgccaacggcguccuccagaccuucaugcgaauggccuggggaggcuccuacaucgcacucgacuccggaugcggcaauugggacugcaucaugaccuccuaccaauaccucaucauccaaaauaccaccugggaagaccacugccaauucucccgcccaucccccaucggauaccucggacuacuaucccaacggacccgcgacaucuacaucagccgacguaggcgcggaacauucaccuggacgcuaagcgacuccgaaggcaaagacacccccggaggcuacugccugacccgcuggaugcuaaucgaagcagaacuaaaaugcuucggcaacaccgccgucgccaaaugcaacgaaaaacacgacgaggaguucugugacaugcuacgccucuucgacuucaacaaacaagccauacagcgacucaaagcaccggcccaaaugagcauccagcuaaucaacaaagccgucaacgcacucauaaacgaccagcucauaaugaaaaaccaccuacgcgacaucaugugcauccccuacugcaacuacucaaaauacugguaccugaaccacacaacuaccggccgcacaucccucccaaaaugcugguuagucuccaacggcucauaccucaaugaaacccacuucagcgacgacaucgaacaacaagccgacaacaugaucacagaaaugcuccaaaaagaauacauggaacgacaaggaaaaacaccccucggccucgucgaccuauuugucuucuccacaucguucuaccuaauauccaucuuccuccaccucguaaaaauccccacccaucgccacaucgucggcaaauccugccccaaaccacaccgccucaaccauaugggcaucugcuccugcggucucuacaaacaacccggcguucccgucaaauggaaacgcuaaggacuagugcaucacauuuaaaagcaucucagccuaccaugagaauaagagaaagaaaaugaagaucaauagcuuauucaucucuuuuucuuuuucguugguguaaagccaacacccugucuaaaaaacauaaauuucuuuaaucauuuugccucuuuucucugugcuucaauuaauaaaaaauggaaagaaccuagaucuaaaaaaaaaaaaaaaaaaaaaaaaaaaaaaaaaaaaaaaaaaaaaaaaaaaaaaaaaaaaaaaaugcaucccccccccccccccccccccccccccccccaaaggcucuuuucagagccaccagaauu

SEQ ID NO: 7228 - RNA, 1855 nt, Artificial Sequence
  mRNA product Design i-2 comprising derived and/or modified sequence from LASV(LP;Clade I)__AAF86701__GPCstabilized (opt11)
ggggcgcugccuacggagguggcagccaucuccuucucggcaucaagcuuaccaugggccaaauaauaacauucuuccaagaagucccccacgucaucgaagaagucaugaauaucguacucaucgcccucucgcuccucgcuauccugaaaggccucuacaacaucgccacaugcggcaucauaggccucgucgccuuccuauuucucugcggcaaaucuugcucccucacccuaaaaggaggcuacgaacuccaaacacuagaacucaacauggaaacccucaauaugaccaugccccuuuccugcaccaaaaacuccucccaccacuacauccgcguaggcaacgaaaccggccucgaacucacacucaccaacacaagcaucaucaaccacaaauucugcaaccugucugacgcucacaagaaaaaucuuuacgaucacgcacucaugucgaucauaucaacauuccaccucucgauccccaacuucaaccaauacgaagccauguccugcgacuucaacggcggcaaaaucagcguccaauacaaccucucccacuccuacgccggcgacgcagcagaacacugcggcaccguggcgaacggaguacuccaaaccuucaugcgcauggccuggggcggacgcuacauagcccucgacuccggcuguggcaacugggacugcaucaugaccuccuaccaauaccucaucauccagaauaccaccugggaagaccacugccaauucucccgccccucaccaauaggcuaccucggccuccuaucccaacgaacacgcgacaucuacaucucaagacgcagacgcggcaccuucaccuggacccucucagacucugaaggcaacgaaacccccggaggcuacugccucacacgauggaugcucaucgaagccgaacucaaaugcuucggaaacaccgccguggccaaaugcaacgaaaaacacgacgaggaguucugcgacaugcuccgacucuucgacuucaacaaacaagccauacgccgacuaaaagcccccgcgcaaaugagcauccaacucaucaacaaagccgucaacgcccucaucaaugaucaacucaucaugaaaaaccaccuccgcgacauaaugugcaucccauacugcaacuacucaaaauacugguaccuaaaccacacuuccucaggacgcaccucacuccccaaaugcuggcucaucuccaacggcuccuaccuuaacgaaacacaguucucggacgacaucgaacaacaagcagacaacaugaucaccgaaaugcuacaaaaagaauacaucgaacgccaaggcaaaacaccccuaggccuagucgacauuuucauauucuccaccuccuucuaccucaucucaauuuuccuccaccuaaucaaaauccccacacaucgccacaucguaggaaaaccuugccccaaaccacacagacuaaaccacaugggcgucugcuccugcggccucuacaagcacccaggcguucccacaaaauggaagcgcuaaggacuagugcaucacauuuaaaagcaucucagccuaccaugagaauaagagaaagaaaaugaagaucaauagcuuauucaucucuuuuucuuuuucguugguguaaagccaacacccugucuaaaaaacauaaauuucuuuaaucauuuugccucuuuucucugugcuucaauuaauaaaaaauggaaagaaccuagaucuaaaaaaaaaaaaaaaaaaaaaaaaaaaaaaaaaaaaaaaaaaaaaaaaaaaaaaaaaaaaaaaaugcaucccccccccccccccccccccccccccccccaaaggcucuuuucagagccaccagaauu

SEQ ID NO: 7229 - RNA, 1855 nt, Artificial Sequence
  mRNA product Design i-2 comprising derived and/or modified sequence from LASV(803213;Clade II)__AAF86703__GPCstabilized (opt11)
ggggcgcugccuacggagguggcagccaucuccuucucggcaucaagcuuaccaugggccaaaucaucaccuucuuccaggaggucccacacgucaucgaggaagucaugaacaucguccucaucgcccucucccuccuagccauccucaaaggcaucuacaacgucgcaaccugcggacucuucggacuaauauccuuccuccuccuuugcggccgcuccuguucgguaaccuacaaaggcguauacgaacugcaaacacuagaacucaacauggccaaccucaacaugaccaugccccuuuccugcaccaagaauaacucccaccacuacaucauggucggcaacgaaaccggucuagaacucacccuaaccaacacuagcauaaucaaccacaaauucugcaaccuaagcgaugcccacaagaaaaaccucuacgaccacgcccuaaugucgaucaucuccacauuucaccuauccauccccaacuucaaccaauacgaagccauguccugcgacuucaacgguggcaaaaucuccguccaauacaaccucucccacagcuucgccgucgacgcagcgaaccauugcggcaccaucgccaacggcguacuacaaacuuucaugcgcauggccuggggcgggagcuacaucgcccucgacuccggcugcggaaacugggacugcauaaugaccucauaccaauaccucauaauccaaaacacaaccugggaagaccacugccaguucucucgaccaucaccaauaggcuaccuaggccuccuaucucaacgcacccgcgacaucuacaucucccgccgccgccgcggcacauucacauggacccucuccgacagcgaaggcaacgaagccccuggcggauacugccucacccguuggaugcucauagaagcagaacucaaaugcuucggcaacacggccgucgcuaaaugcaacgaaaaacacgacgaagaguucugcgacaugcuccgacucuucgacuucaacaaacaagccaucaaacgucucaaaacgcccgcccaaauguccauccagcucaucaacaaagcagucaacgcccucaucaaugaccaacucaucaugaaaaaccaccuacgcgacaucauguguauccccuacugcaacuacagccguuacugguaccuaaaccacacaguaaccggcaaaacaucacucccacgcugcuggcuagucuccaacggcuccuaccucaacgaaacccacuucuccgacgacaucgaacaacaggccgacaacaugaucaccgagaugcuccaaaaggaguacauggaccgccaaggcaaaacaccccucggccucguagaccuauuuguauucuccaccuccuucuaccuaaucuccauauuccuccaucucguaaaaauucccacccaccgacacaucgucggaaagccaugccccaaaccacaccgacucaaccacaugggcaucugcucgugcggccuauacaagcacccaggcguaccuguaaaauggaaacgcuaaggacuagugcaucacauuuaaaagcaucucagccuaccaugagaauaagagaaagaaaaugaagaucaauagcuuauucaucucuuuuucuuuuucguugguguaaagccaacacccugucuaaaaaacauaaauuucuuuaaucauuuugccucuuuucucugugcuucaauuaauaaaaaauggaaagaaccuagaucuaaaaaaaaaaaaaaaaaaaaaaaaaaaaaaaaaaaaaaaaaaaaaaaaaaaaaaaaaaaaaaaaugcaucccccccccccccccccccccccccccccccaaaggcucuuuucagagccaccagaauu

SEQ ID NO: 7230 - RNA, 1855 nt, Artificial Sequence
  mRNA product Design i-2 comprising derived and/or modified sequence from LASV(GA391;Clade III)__CAA36645__GPCstabilized (opt11)
ggggcgcugccuacggagguggcagccaucuccuucucggcaucaagcuuaccaugggccaaaucguuaccuucuuccaagaaguaccacacguaaucgaagaagucaugaacaucguauuaaucgcccucucaauccucgcuauccucaaaggccuuuacaacguagcuaccugcggccucaucggccuaguaaccuuccuccuccucuccggccgcuccugcucccuuaucuacaaaggcacauacgaacuucaaacccucgaacuaaauauggaaacccuaaacaugacuaugccccuauccugcaccaaaaacaacucgcaccacuacauccgagucggcaaugaaacaggccucgaacucacccuuaccaacacaucgauccuaaaccacaaguuuuguaaccucuccgacgcgcacaaacgcaaccucuacgaccacucccucaugucaaucaucuccaccuuccaccuaucuauacccaacuucaaccaauacgaagcaaugucuugcgacuucaacggcggaaaaaucaccguccaguacaaucuaucacacucauucgcagucgacgccgccggucacugcggaacccucgccaacggaguacuucaaacauucaugcgcauggcauggggcggcuccuacaucgcccuagacucaggcugcggcaacugggacugcauaaugaccuccuaccaauaccucauuauccaaaacaccaccugggacgaccacugccaauucucccgaccuucacccaucggcuaccucgggcuacuaucccaacgaacccgagacaucuacaucucccgcaggcgccgcggcacauucaccuggacccuauccgacagcgaaggcaacgaaacccccgguggcuacugccucacccgcuggaugcucauagaagccgaguuaaaaugcuucgguaacacagccgucgcaaaaugcaacgaaaaacacgacgaagaguucugcgacaugcuccgacuuuucgacuucaauaaacaagccauccgccgccuuaagaccccagcccaaaugucaauccaacucaucaacaaagccguaaacgcccucaucaacgaucaacucaucaugaaaaaccaccuccgugacaucaugugcauacccuacugcaacuacucccgcuauugguaccucaaccacaccuccacaggcaagaccucacucccccgcugcuggcucauauccaauggcucuuaucuaaacgaaaccaaauucucagacgacaucgaacaacaagcugacaacaugaucaccgaaaugcuccaaaaagaauacauagaccgccaaggaaaaacaccccucggccucguagaccucuucgucuucuccaccuccuucuaucucaucucgaucuuccuccaccucgucaaaauacccacccaccgacacauagucggaaaacccugccccaaaccacaccgccucaaccacaugggcaucugcuccugcggccuauacaaacaacccggcguccccgugcgcuggaaacgauaaggacuagugcaucacauuuaaaagcaucucagccuaccaugagaauaagagaaagaaaaugaagaucaauagcuuauucaucucuuuuucuuuuucguugguguaaagccaacacccugucuaaaaaacauaaauuucuuuaaucauuuugccucuuuucucugugcuucaauuaauaaaaaauggaaagaaccuagaucuaaaaaaaaaaaaaaaaaaaaaaaaaaaaaaaaaaaaaaaaaaaaaaaaaaaaaaaaaaaaaaaaugcaucccccccccccccccccccccccccccccccaaaggcucuuuucagagccaccagaauu

SEQ ID NO: 7231 - RNA, 1858 nt, Artificial Sequence
  mRNA product Design i-2 comprising derived and/or modified sequence from LASV(AV;Clade V)__CCA30314__GPCstabilized (opt11)
ggggcgcugccuacggagguggcagccaucuccuucucggcaucaagcuuaccaugggccaaauaguaaccuucuuccaagaaguuccccacgucaucgaagaagucaugaacaucguccuaauagcccucucaauccuagccguacuaaagggccucuacaacaucgcaaccugcggccucaucggccuaaucaccuuccuacuccugugcggacgcucaugcagcuccaaccuauacaaaggcgucuacgaacuccaaucccuugaccucaacauggaaacucucaacaugaccaugcccuuguccugcaccaaaaacaacucacaccacuacauacgcguaggcaacgacaccggucucgaacuaacccuaaccaacaccucuauccucaaccacaaauucugcaaccuaucagacgcacacaagaaagaccucuacgaccacgcacucaugucgaucauauccaccuuccaccucucaauacccaacuucaaccaauacgaagccaugucaugcgacuuuaacggaggcaaaaucuccguacaauauaaccucucacacuccuacgccaucgacgccgcaaaccacugcggaaccgucgccaacggcauccuccaaacuuucaugcgcauggccuggggaggaucuuacaucgcccuugacagcggaugcgguaacugggauugcaucaugaccuccuaccaauaccucauuauccaaaauacuaccugggaaaaccacugccaguucucccgccccagccccaucggauaccuaggucuacucucccaacgaacccgcgauaucuacaucucccgaagacgccgcggcaccuuuaccuggacacuauccgacucagaagguaacgccaccccagggggauacugccucacgagauggaugcucaucgaagcagaacuuaaaugcuucggcaacaccgccguagcaaaaugcaacgaaaaacacgacgaagaguucugcgacaugcuccgacucuucgacuucaacaaacaagccauaucacgucucaaauccccagcccaaauguccauacaacucauaaacaaagccguuaacgcacucaucaacgaccaacucaucaugaaaaaccaccuccgcgacauaaugugcauacccuacugcaacuacuccaaauacugguaccugaaccacaccauaaccggcaaaacuucacucccuaaaugcuggcucgucucgaacggaucauaccucaacgaaacucacuucuccgacgacaucgaacaacaagccgacaacaugaucaccgaaaugcuccaaaaagaauacauggaacgccaaggcaaaaccccacugggccucgucgaccucuucguauuuuccaccucauucuaccucaucuccaucuuccuccgccucguaaaaauccccacccaccggcacaucgucggaaaacccugccccaaaccccaucgacucaaccacaugggaauuugcucuugugggcuuuacaaacaaccaggcguacccguccgauggaaacgcuaaggacuagugcaucacauuuaaaagcaucucagccuaccaugagaauaagagaaagaaaaugaagaucaauagcuuauucaucucuuuuucuuuuucguugguguaaagccaacacccugucuaaaaaacauaaauuucuuuaaucauuuugccucuuuucucugugcuucaauuaauaaaaaauggaaagaaccuagaucuaaaaaaaaaaaaaaaaaaaaaaaaaaaaaaaaaaaaaaaaaaaaaaaaaaaaaaaaaaaaaaaaugcaucccccccccccccccccccccccccccccccaaaggcucuuuucagagccaccagaauu

SEQ ID NO: 7232 - RNA, 1855 nt, Artificial Sequence
  mRNA product Design i-2 comprising derived and/or modified sequence from LASV(Togo/2016/7082;Clade VI)__AMR44577__GPCstabilized (opt11)
ggggcgcugccuacggagguggcagccaucuccuucucggcaucaagcuuaccaugggacaaaucaucaccuucuuccaagaagucccccacguaaucgaagaagucaugaacaucguacucauagcccucucccuacuagccauccucaaaggcgucuacaacgucgccacaugcggcaucauaggccucgucaccuuccuauuccucugcggccgcuccuguucccucaucuacaaaggcucguaugaauuacagacccucgaacucaacauggaaacccucaacaugaccaugccccucucaugcaccaaaaacagcucacaccacuacauccguguuggcaacgaaaccggacucgaauuaacccuuaccaacacauccaucaucaaccacaaguucugcaaccucucagacgcucacaaacgcaaccucuacgaccacgcccucauguccauccucuccaccuuccaccuuuccauccccaacuuuaaccaauacgaagccauguccugcgacuucaacggcggcaaaaucuccguccaauacaaccugucccacgccuacgccgucgacgccgccgaacacugcggcacagucgcaaacgguguccuacaaaccuucaugcguauggccuggggcggcuccuacauagcccuagacucuggauguggaaacugggacugcauaaugaccuccuaucaauaccuaaucauccaaaacacuacaugggaagaccacugccaauuuucccgacccucacccauaggcuaccucggccuccucucccaacgcacccgcgacauauacaucucucgucgccgccgcggcacauucaccuggaccuuaagugacucagaaggaaacgaaacccccggaggauacugccucacacgauggaugcucaucgaagcugaacuuaagugcuucggcaacacugccgucgccaaaugcaacgaaaaacacgacgaagaguucugcgacaugcuccgauuauucgacuucaacaagcaagccauccagcgacucaaaucccccgcccaaaugucgauccagcucauaaacaaagccgucaacgcccuuaucaacgaccaacucauaaugaaaaaccaccucagagacaugaugugcauaccguacugcaacuacuccaaguacugguaucucaaccacacauccuccggaagaaccucacuccccaaaugcuggcucguaucgaacggcucuuaccuaaacgaaacacacuuuagugacgacauugaacaacaagccgacaacaugaucaccgaaaugcuccaaaaagaauacaucgacagacaaggcaaaacaccccucggacucgucgaccuauucguauucucaaccucauucuaccucauauccaucuuucuccaccuaauaaaaauacccacccaccgacacaucgucggcaaacccugccccaaaccucaccgccuaaaccacaugggcaucugcuccugcggccucuacaagcaacccggaguccccacccgcuggaaacgauagggacuagugcaucacauuuaaaagcaucucagccuaccaugagaauaagagaaagaaaaugaagaucaauagcuuauucaucucuuuuucuuuuucguugguguaaagccaacacccugucuaaaaaacauaaauuucuuuaaucauuuugccucuuuucucugugcuucaauuaauaaaaaauggaaagaaccuagaucuaaaaaaaaaaaaaaaaaaaaaaaaaaaaaaaaaaaaaaaaaaaaaaaaaaaaaaaaaaaaaaaaugcaucccccccccccccccccccccccccccccccaaaggcucuuuucagagccaccagaauu

SEQ ID NO: 7233 - RNA, 1855 nt, Artificial Sequence
  mRNA product Design i-2 comprising derived and/or modified sequence from LASV(KAK-428;Clade n.d. (VII))__ANH09740__GPCstabilized (opt11)
ggggcgcugccuacggagguggcagccaucuccuucucggcaucaagcuuaccaugggccaaaucguaaccuucuuccaggaaguaccccacgucaucgaagaaguuaugaacaucguacucaucgcccucucccuccuagcgauccuuaaaggacucuacaacuucgcaaccugcggcgucaucggacucauaacguuccuacuacucugcggacgcuccuguuccgccacguacaaaggccaauacgaacuccagacacuagaacucaacauggaaagccuaaacaugacgaugccccuauccugcaccaaaaacaacucacaccacuacauccgcgccgggaauaacaccggccuagaacuaacacucacaaacaccucgaucaucucccacaaauucugcaaccuaucagacgcccacaagaaaaaccucuacgaccacacgcucaugucaauuauuaccaccuuccaccucucgauaccaaacuucaaucaauacgaagccaugucaugcgacuucaacgguggcaaaaucucuauccaguacaacuugucccacuccuacgccggcgacgcggcccagcacugcggcaccguugcaaacggcguacugcagaccuucaugcgaauggccuggggaggcuccuaccucgcccuagacuccggcugccgcggaugggacugcaucaucuccaguuaccaauaccucaucauccaaaacaccacaugggacgaccacugccaauucucacgccccuccccgaucggcuaccucgguuucgucucccagaaaacgcgcgacauauacaucagccgccgacgucgcggcaccuucacauggacccucagcgacagcgaaggccacgacaugcccggcggcuacugccuaacccgauggaugcuaaucgaagccgaucucaagugcuucggcaacaccgccgucgcaaaaugcaacgaaaaacacgacgaagaguucugcgauauguggcgacucuucgacuucaacaaacaggccauccaaaggcuaaaggccccagcccaaaugaacauucaacuuauaaacaaagcagucaacgcccuuaucaacgaccaacucaugaugaagaaccaccuacgcgacaucaugugcauccccuacuguaacuacuccaaauucugguaccucaacaacaccaccaccggccgcaccucucucccacgcugcuggcucaucagcaacggcuccuaccuaaacgaaacccacuucuccgacgacaucgaacaacaagccgacaacaugauaacugaaaugcugcaaaaagaauacauggaccgucaaggcaaaacaccccucggccucgucgaccucuucguuuucuccaccagcuucuaccucaucaccaucuuccuacaccuugucaagauacccacccaccgccacaucgucggcaaacccugucccaaaccccaccgacucaaccacaugggaaucugcuccugcggccuauacaaacaaccaggcguccccguacgcuggaaacgcuaaggacuagugcaucacauuuaaaagcaucucagccuaccaugagaauaagagaaagaaaaugaagaucaauagcuuauucaucucuuuuucuuuuucguugguguaaagccaacacccugucuaaaaaacauaaauuucuuuaaucauuuugccucuuuucucugugcuucaauuaauaaaaaauggaaagaaccuagaucuaaaaaaaaaaaaaaaaaaaaaaaaaaaaaaaaaaaaaaaaaaaaaaaaaaaaaaaaaaaaaaaaugcaucccccccccccccccccccccccccccccccaaaggcucuuuucagagccaccagaauu

SEQ ID NO: 7234 - RNA, 1855 nt, Artificial Sequence
  mRNA product Design i-2 comprising derived and/or modified sequence from LASV(Pinneo-NIG-1969;Clade I)__AIT17836__GPCstabilized (opt11)
ggggcgcugccuacggagguggcagccaucuccuucucggcaucaagcuuaccaugggacaaauaaucaccuucuuccaagaagugccccacgucauagaagaagucaugaauaucguccucaucgcacucucccuacucgccauacucaaagggcuguacaacauagcaaccugcggcaucauagggcucguugccuuccucuuccuuugcggcaaaucgugcucccucacccucaaaggcggcuacgaacuacaaacccucgaacucaauauggaaacccuaaacaugaccaugccacuauccuguacaaagaacucaucccaucacuacauccgcguaggcaaugaaacaggccucgaacucacacuaacuaacacguccauaauaaaccacaaauucugcaaccucucagacgcccacaagaaaaaccucuacgaccacgcccucauguccaucaucuccaccuuucaccuauccauucccaacuucaaccaauacgaagccauguccugcgacuucaacggcgguaaaaucucaguacaauacaaccucucacacuccuacgccggcgacgcagccgaacacugcggcaccguagccaacggcguacuacaaacauucaugcgcauggccuggggcggccgcuacauagcacuggacuccggcugcggaaacugggacugcaucaugacauccuaccaauaccucauaauccaaaacaccacaugggaagaccacugccaauucucccgcccaucacccaucggcuaccugggacuccuaucacaacgcacccgagacaucuacaucucccgacgccggcgcggcaccuucacauggacauuaucagacucugaaggcaaugagaccccaggaggcuacugccucacccgcuggaugcucaucgaagccgaacuaaaaugcuucggcaauaccgccguagccaaaugcaacgaaaaacacgaugaagaguucugcgacaugcuccgccuauucgacuucaacaaacaagcaaucagacgccucaaagccccagcccaaauguccauacagcuaauaaacaaagcagucaacgcucucaucaacgaccaacucaucaugaaaaaccaucuccgcgacaucauguguauccccuacugcaacuacagcaaauacugguaucuuaaucacaccuccuccggccgaaccucucuccccaaaugcuggcucauauccaacggauccuaccucaacgaaacccaguucagcgacgacaucgaacaacaagcggacaauaugaucaccgaaaugcuacagaaagaauacaucgaacgccaaggcaaaacaccacucggccuagucgacaucuucaucuucuccaccuccuucuaccucauuagcaucuuccuacaccucauaaaaauccccacacaccgccacaucgucggaaaaccgugccccaaaccucaccgucuuaaccacaugggcgucugcuccugcggccucuacaaacaccccggcguccccaccaaauggaaacgcuaaggacuagugcaucacauuuaaaagcaucucagccuaccaugagaauaagagaaagaaaaugaagaucaauagcuuauucaucucuuuuucuuuuucguugguguaaagccaacacccugucuaaaaaacauaaauuucuuuaaucauuuugccucuuuucucugugcuucaauuaauaaaaaauggaaagaaccuagaucuaaaaaaaaaaaaaaaaaaaaaaaaaaaaaaaaaaaaaaaaaaaaaaaaaaaaaaaaaaaaaaaaugcaucccccccccccccccccccccccccccccccaaaggcucuuuucagagccaccagaauu

SEQ ID NO: 7235 - RNA, 1855 nt, Artificial Sequence
  mRNA product Design i-2 comprising derived and/or modified sequence from LASV(ISTH0009-NIG-2011;Clade II)__AIT17404__GPCstabilized (opt11)
ggggcgcugccuacggagguggcagccaucuccuucucggcaucaagcuuaccaugggucagaucauuaccuucuuccaggaagucccacacgucaucgaagaagucaugaacaucguacucaucgcccucagucuacucgcgauccuaaaaggcaucuacaacgucgcaaccugcggacucuuuggccuagucucuuuccuccuucucugcggacggucaugcuccaccaccuacaaaggcgucuacgaacuccaaacccucgaacuugacauggcaucccuaaauaugaccaugccgcucuccugcaccaaaaauaacucucaccacuacaucauggucggaaacgaaaccggccucgaacucacccuaacaaacacauccauuaucaaccacaaauuuugcaaccucuccgacgcucauaagaaaaaccucuacgaccacgcccucauguccaucauaucaaccuuccaccuaucaauaccaaacuucaaccaauacgaagccaugagcugcgacuucaacggaggaaagauaucaguccaauacaaccucucccacgccuacgcagucgacgcagccaaccacugcggcacaaucgccaacggcguacuacaaaccuucaugcgcauggccuggggcgguuccuacaucgcccucgacagcggaugcggaagcugggacugcauaaugacauccuaccaauacuuaaucauccaaaacaccacuugggaagaccacugccaauucucacgccccuccccaauaggauaccucggccuacucucgcaacgcacccgugacauauacauaucccgacgccgccgcggcaccuucacauggacccuauccgacagcgaaggcaacgaaacgccuggcggcuacugccucacccgcuggauguuaaucgaagccgagcuaaaaugcuucggcaacacagccguagccaaaugcaacgaaaaacacgacgaagaguucugcgacaugcucagacucuucgacuucaacaaacaagccauacgacgccucaaaaccccagcacaaauguccauccaacuaaucaacaaagccgucaacgcccuuauaaacgaccagcuuauaaugaaaaaccaccuccgcgacaucaugugcauccccuacugcaacuacagcaaauacugguaccuaaaccacacggucaccggcaaaacgucccucccccgcugcuggcuagucuccaacgguuccuaccucaacgaaacccacuucagcgacgacaucgaacaacaggccgacaacaugaucaccgaacuccuccaaaaagaauacauggaccgccaaggcaaaacaccccuaggccucgucgaccucuuugucuucagcaccucauucuaccucauaucuaucuuccuacaccuuaucaaaauccccacccacagacacaucaccggcaagcccugccccaaaccccaccgccucaaccacauggguaucugcagcugcggccucuacaaacacccuggcguacccguaaaguggaaacgcuaaggacuagugcaucacauuuaaaagcaucucagccuaccaugagaauaagagaaagaaaaugaagaucaauagcuuauucaucucuuuuucuuuuucguugguguaaagccaacacccugucuaaaaaacauaaauuucuuuaaucauuuugccucuuuucucugugcuucaauuaauaaaaaauggaaagaaccuagaucuaaaaaaaaaaaaaaaaaaaaaaaaaaaaaaaaaaaaaaaaaaaaaaaaaaaaaaaaaaaaaaaaugcaucccccccccccccccccccccccccccccccaaaggcucuuuucagagccaccagaauu

SEQ ID NO: 7236 - RNA, 1855 nt, Artificial Sequence
  mRNA product Design i-2 comprising derived and/or modified sequence from LASV(ISTH2010-NIG-2012;Clade II)__AIT17482__GPCstabilized (opt11)
ggggcgcugccuacggagguggcagccaucuccuucucggcaucaagcuuaccaugggccaaaucauaacauucuuccaggaagucccgcacgucaucgaagaggucaugaacaucguacuaaucgcccugucccuccuagccauacuaaaaggcauauacaacguagccacaugcggccuauucggccuugucuccuuccuccuccucuguggccgcuccugcucaaccaccuacaaaggcguauacgaacuccaaacacuagaacucgacauggccucccucaacaugaccaugccccucucauguaccaagaacaacucacaccauuacaucauggucggcaacgaaaccggccuggaacucacccucacuaauaccagcaucaucaaccauaaauucugcaaccuauccgacgcccacaagaaaaaccucuacgaccacgcacuaaugucgaucaucucaaccuuccaccuaucuauccccaacuucaaccaauaugaggccauguccugcgacuucaacggcggcaaaauaagcguacaauacaaccucucccacgccuacgcugucgaugccgcuaaccacugcggaaccaucgcuaacggaguccuacaaaccuucaugcgaauggccuggggcggcagcuacaucgcccuagacuccggaugcggcagcugggacugcaucaugaccuccuaccaauaccuaaucauccaaaacaucaccugggaagaccacugccaauucagccgcccaucaccaaucggcuaccucggccuucucucucaacgaacccgagacaucuacaucucccgccgccgccgcggaaccuucaccuggacucucucugacucagaaggcaacgaaaccccaggaggauauugccucacccguuggaugcucaucgaagcagaacucaaauguuucggcaacaccgccgucgccaaaugcaacgaaaaacacgacgaagaguucugcgacaugcuccgacucuucgacuucaacaaacaagccauccggcgacucaaaacccccgcgcaaauguccauacagcucaucaacaaagccguaaacgcccucaucaacgaccagcuuaucaugaaaaaccaccuucgcgacaucaugugcauccccuacugcaacuacuccaaauauugguaccucaaccacaccguaaccgguaaaacgagccucccccgcugcuggcucgucuccaacggcuccuaccucaaugaaacccacuuuuccgacgacaucgaacaacaagccgacaacaugaucaccgaacuccuucaaaaagaauacauagaccgccaagguaaaaccccgcucggccuaguagaccuuuucguauucucaaccucuuucuaccuaaucuccaucuuccuccaccucgucaaaauccccacccaccgacacgucguagguaaaccaugccccaaaccccaccgacucaaucacauggguaucugcuccugcggacucuacaaacaucccggcguacccgucaaauggaaacgcuaaggacuagugcaucacauuuaaaagcaucucagccuaccaugagaauaagagaaagaaaaugaagaucaauagcuuauucaucucuuuuucuuuuucguugguguaaagccaacacccugucuaaaaaacauaaauuucuuuaaucauuuugccucuuuucucugugcuucaauuaauaaaaaauggaaagaaccuagaucuaaaaaaaaaaaaaaaaaaaaaaaaaaaaaaaaaaaaaaaaaaaaaaaaaaaaaaaaaaaaaaaaugcaucccccccccccccccccccccccccccccccaaaggcucuuuucagagccaccagaauu

SEQ ID NO: 7237 - RNA, 1855 nt, Artificial Sequence
  mRNA product Design i-2 comprising derived and/or modified sequence from LASV(Lassa virus/H.sapiens-wt/NGA/2015/ISTH_0543;Clade II)__AVO03639__GPCstabilized (opt11)
ggggcgcugccuacggagguggcagccaucuccuucucggcaucaagcuuaccaugggccaaaucaucaccuucuuccaggaaguaccacacgucaucgaagagguaaugaacauaguccucaucgcacucucccuacucgccauauuaaaaggcaucuacaacguagcaaccugcggccuauucggccuagucucauuccuccuccucugcggccgcuccugcuccaccaccuacaaaggaguuuacgaacuccaaacccucgaacucgacauggcaaaccuaaacaugacaaugccucucuccugcaccaaaaacaacucacaccacuacaucauggucggcaacgagaccggccucgaacucacuuuaaccaacaccucaaucaucaaccacaaauucugcaaccuaucggacgcccacaagaaaaaccucuacgaccacgcccugaugucaaucaucucaacauuccaccucuccauacccaacuucaaccaauacgaagcaauguccugcgacuucaacggcggcaaaaucucuguacaauacaaccugucacacaccuacgccgucgacgccgccaaccacugcggaaccaucgccaacggcguccuacaaacauucaugcgcauggcguggggcggauccuacauagcucucgacuccgguugcggcuccugggacuguaucaugacauccuaccaauaccucgucauacaaaacacaaccugggaagaccacugccaauucucccgccccucuccaaucggcuaccugggccuccucagccaacgcacccgugacaucuacaucuccagacgcagacgcggaaccuucacauggacccucucagacuccgaaggcaacgagacccccggcggcuacugccuaaccagauggaugcugaucgaagcagaacugaaauguuucgguaacacugcaguagccaaaugcaacgaaaaacacgacgaagaguucugcgacaugcucagacuuuucgacuucaacaaacaagccauccgccgacuaaaaacccccgcccagaugucuauccaacucaucaacaaagccgucaacgcacucaucaacgaucaacucaucaugaaaaaccaccuccgcgacauuaugugcauaccuuacugcaacuacuccaaauauugguaccucaaccacacagucaccggcaaaaccagccucccccgcugcuggcucgucucaaacggcagcuaccuaaacgaaacccacuucucugaugacauugaacaacaggccgacaacaugauuacagaacuccuacaaaaggaauacaucgacagacaaggaaaaaccccucucggccuaguagaccucuucgucuucucaacauccuucuaccuaaucagcaucuuccuccaccucgucaaaauccccacccaccgccacauaaccggcaaacccugccccaaaccucaccgacucaaccacaugggaaucugcucauguggccucuacaaacaccccggcguacccgucaaauggaaacgcuaaggacuagugcaucacauuuaaaagcaucucagccuaccaugagaauaagagaaagaaaaugaagaucaauagcuuauucaucucuuuuucuuuuucguugguguaaagccaacacccugucuaaaaaacauaaauuucuuuaaucauuuugccucuuuucucugugcuucaauuaauaaaaaauggaaagaaccuagaucuaaaaaaaaaaaaaaaaaaaaaaaaaaaaaaaaaaaaaaaaaaaaaaaaaaaaaaaaaaaaaaaaugcaucccccccccccccccccccccccccccccccaaaggcucuuuucagagccaccagaauu

SEQ ID NO: 7238 - RNA, 1855 nt, Artificial Sequence
  mRNA product Design i-2 comprising derived and/or modified sequence from LASV(Lassa virus/H.sapiens-wt/NGA/2016/ISTH_0009;Clade II)__AVO03571__GPCstabilized (opt11)
ggggcgcugccuacggagguggcagccaucuccuucucggcaucaagcuuaccaugggacaaaucaucaccuucuuccaagaagucccccacgucaucgaagaagucaugaauaucguccucauagcccuaucucuccuugcuauccucaaaggcaucuacaacgucgcaaccugcggccuacuagggcucgucuccuuccuacuacucugcggccgcuccugcucaaccaccuacaaaggcgucuacgaacuucaaacucucgaacucgauauggccucucuuaacaugacaaugccccucuccugcaccaaaaacaacucccaccacuacaucaugguuggcaaugaaacaggccucgaacucacccuaacaaacaccuccaucaucaaccacaaauucuguaaucucuccgacgcccacaagaaaaaccuauacgaccacgcccuuaugucuauaaucagcaccuuccaccucuccauacccaacuuuaaccaguacgaagccauguccugcgacuuuaacggcggacgcauauccguccaauacaaccugucacacuccuacgccguggacgcugccaaccacugcggcacaauugccaacggcguccugcaaaccuucaugcgcauggccuggggcggcuccuacauagccuuagacuccggaugcggcuccugggacugcaucaugacgucauaccaauaccucaucauacaaaacaccaccugggaagaccacugccaauuuucccgccccagcccaaucggcuaccucggccuucuaucccaacgaacccgcgacaucuacaucucacgccgccgccgcggcaccuucaccuggacccucuccgacuccgaaggcaacgaaacaccaggcggcuacugucucacacgcuggaugcucaucgaagccgaacuaaaaugcuucggcaacaccgccgucgccaaaugcaacgaaaaacacgacgaagaauuuugcgacaugcuacgacuuuucgacuucaacaaacaagcuauccgccgccuaaaaacccccgcucaaauguccauacaacucaucaacaaagccgucaacgcccucaucaacgaccaacuaaucaugaaaaaccaucuccgagacaucaugugcauccccuauuguaacuacuccaaauacugguaccuaaaccacaccguuaccgguaagacaucccuaccacgcugcuggcuagucucaaacggcuccuaccuaaacgaaacccacuucuccgacgacauagaacagcaagcagacaacaugaucacugaacuccuucaaaaagaauacaucgaccgccaagguaaaacaccccucggccucgucgaccuauucgucuucuccaccuccuucuaucuaauauccaucuuccuccaccucgucaaaauccccacccaucgccauaucacuggaaaacccugccccaaaccacaucgacuaaaccacauggguaucugcuccugcggccuauacaaccaccccggcgucccagucaaguggaaacgcuagggacuagugcaucacauuuaaaagcaucucagccuaccaugagaauaagagaaagaaaaugaagaucaauagcuuauucaucucuuuuucuuuuucguugguguaaagccaacacccugucuaaaaaacauaaauuucuuuaaucauuuugccucuuuucucugugcuucaauuaauaaaaaauggaaagaaccuagaucuaaaaaaaaaaaaaaaaaaaaaaaaaaaaaaaaaaaaaaaaaaaaaaaaaaaaaaaaaaaaaaaaugcaucccccccccccccccccccccccccccccccaaaggcucuuuucagagccaccagaauu

SEQ ID NO: 7239 - RNA, 1855 nt, Artificial Sequence
  mRNA product Design i-2 comprising derived and/or modified sequence from LASV(Lassa virus/H.sapiens-wt/NGA/2016/ISTH_0017;Clade II)__AVO03567__GPCstabilized (opt11)
ggggcgcugccuacggagguggcagccaucuccuucucggcaucaagcuuaccaugggccagauuaucaccuucuuccaggaaguaccacacgucaucgaagaaguaaugaacaucguacucaucgcccuaucccuacucgcaauccucaaaggcaucuacaacguagcaaccugcggccucuucggacucguuuccuuccuccuccuuugcggccgcucaugcuccacaaccuacaaaggcgucuacgaacuacaaacacucgaacucgacauggccucccucaacaugaccaugccccucagcugcaccaaaaacaacagccaccacuacaucauggucggcaacgaaacaggacuugaacucacccucacaaacaccucaaucaucaaccacaaguucugcaaccuaagcgacgcgcacaagaaaaaccuauacgaccacgcccuaaugucaaucaucagcaccuuccaccucucgauucccaacuucaaccaauaugaagcaauguccugcgacuucaacggaggcaaaaucagcguccaguacaaccuaagccacacauacgccauagacgccgcaaaccacugcggcaccaucgccaauggcguccuccaaaccuucaugcgcauggccuggggaggcuccuacauagcacucgacuccggcugcggcucaugggacugcaucaugacauccuaccaauaccucaucauccaaaacacgacaugggaagaccacugccaauucucacgccccucccccauaggcuaccuaggccuccuaucacaacgcacccgcgacaucuacaucuccagacgacgucgagguaccuucaccuggacacucagcgacucagaaggcaacgaaacccccggcggauacugccucacccgcuggaugcuaauagaagcagaacucaaaugcuuuggcaacaccgcugucgcaaaaugcaacgaaaagcacgacgaagaguuuugcgacaugcuccgccucuucgacuucaacaaacaagccauccgucgccucaaaacacccgcccaaauguccauccagcuaaucaauaaagccguuaacgcacuuaucaacgaccaacucaucaugaaaaaccaccucagagacauuaugugcaucccauacugcaacuacuccaaauacugguaccuuaaccacacagucaccggcaaaaccucacuuccccgcugcuggcuagucuccaacggcucauaccucaacgaaacacacuuuagcgacgacauugaacagcaggcagacaacaugaucacagaacuacuccaaaaagaauacauggaccgccaaggaaaaacaccccuaggccuuguagaccuuuucgucuucuccaccuccuucuaccuaaucucaaucuuccuccaccucguucgaauccccacccaccgacaugucauaggaaaacccugccccaaaccccaccgacucaaccacaugggcaucuguuccugcggccucuauaaacaucccggaguccccguuaaauggaaacgcuaaggacuagugcaucacauuuaaaagcaucucagccuaccaugagaauaagagaaagaaaaugaagaucaauagcuuauucaucucuuuuucuuuuucguugguguaaagccaacacccugucuaaaaaacauaaauuucuuuaaucauuuugccucuuuucucugugcuucaauuaauaaaaaauggaaagaaccuagaucuaaaaaaaaaaaaaaaaaaaaaaaaaaaaaaaaaaaaaaaaaaaaaaaaaaaaaaaaaaaaaaaaugcaucccccccccccccccccccccccccccccccaaaggcucuuuucagagccaccagaauu

SEQ ID NO: 7240 - RNA, 1855 nt, Artificial Sequence
  mRNA product Design i-2 comprising derived and/or modified sequence from LASV(Lassa virus/H.sapiens-wt/NGA/2018/ISTH_0959;Clade II)__AVV65099__GPCstabilized (opt11)
ggggcgcugccuacggagguggcagccaucuccuucucggcaucaagcuuaccaugggccaaaucaucacauucuuccaagaaguaccccacgucaucgaagaagucaugaacaucguucuaauagcccucucccuacuagccauccucaaaggcaucuauaacguagugaccugcggccuauuuggccucgucagcuuccuccuccuaugcggacgauccugcuccaccacauacaaaggagucuacgaacuacaaacacucgaacuugacauggccucccucaacaugaccaugccccucuccugcaccaaaaacaacucccaccauuacaucauggucggcaacgaaaccggccuagaacugacccucacaaauaccuccaucaucaaccacaaauucugcaaccuaagcgacgcccacaagaaaaaucucuacgaucacgcacucaugagcaucauauccaccuuccaccucuccauaccuaacuucaaccaauaugaagccaugucaugcgacuucaacggcggaaaaaucuccguccaauacaaccucagccacgccuacgccaucgacgccgccaaccacugcggaaccauagcgaacggagucuuacaaaccuucaugcgaauggcauggggcggcagcuacaucgcacucgacuccggaugcggcucaugggacugcaucaugaccuccuaccaauaccugauaauccaaaauaccaccugggaagaccauugccaauucagccgccccucccccauaggcuaccugggacuccuuucccaaagaacccgcgacaucuacaucucacgacggcgccgcggcacauucaccuggacccucuccgacagcgaaggcaaugaaaccccaggcggauacugccucacucgcuggaugcuaauagaagccgagcuaaaaugcuucggcaacaccgccgucgcaaaaugcaaugaaaaacacgaugaagaguucugcgacaugcuccgccuauucgacuucaacaaacaagccaucagacggcucaaaacaccagcccaaauguccauccaacucauuaacaaagccgucaacgcccuaaucaaugaccaacucauaaugaaaaaccaccuccgggacaucaugugcauaccauacugcaacuacuccaaauacugguaccucaaucacaccgucaccggcaaaaccucacuaccccgaugcuggcucgucuccaauggcucauaccuaaacgaaacucacuucucagacgacaucgaacaacaagccgacaacaugaucacagaacuccuacaaaaagaauacaucgaccgccaaggcaaaacaccccucggacucguagaucuauucguauucuccaccucauucuaccucaucuccaucuuccuccaccucgucaaaauaccaacccaccgccacgucauaggcaagcccugccccaaaccccaccgccucaaucacaugggcaucugcuccugcggccucuacaaacacccuggggucccaguaaaauggaaacguuagggacuagugcaucacauuuaaaagcaucucagccuaccaugagaauaagagaaagaaaaugaagaucaauagcuuauucaucucuuuuucuuuuucguugguguaaagccaacacccugucuaaaaaacauaaauuucuuuaaucauuuugccucuuuucucugugcuucaauuaauaaaaaauggaaagaaccuagaucuaaaaaaaaaaaaaaaaaaaaaaaaaaaaaaaaaaaaaaaaaaaaaaaaaaaaaaaaaaaaaaaaugcaucccccccccccccccccccccccccccccccaaaggcucuuuucagagccaccagaauu

SEQ ID NO: 7241 - RNA, 1855 nt, Artificial Sequence
  mRNA product Design i-2 comprising derived and/or modified sequence from LASV(LASV003-NIG-2008;Clade II)__AIT17580__GPCstabilized (opt11)
ggggcgcugccuacggagguggcagccaucuccuucucggcaucaagcuuaccaugggucaaaucauaacauucuuccaagaaguuccacacgucaucgaagaagucaugaacaucguccucauagcccucucccuccucgcaauucucaaaggcaucuacaauguagccaccuguggccuauucggacucgucagcuuccuacuccuaugcggccgcuccugcuccaccaccuacaaagguguauacgagcuacaaacacucgaacucgacauggccucacucaacaugaccaugccacucuccugcaccaaaaacaacucccaccacuauaucauggucgguaacgaaacuggccucgaacuaacgcucacaaacacauccauaauaaaucacaaauucugcaaucucucagacgcccacaagaaaaaccuuuacgaccacgcccucaugucaaucaucuccaccuuccaccucuccauccccaacuucaaccaguacgaagcaaugucaugcgacuucaacggcggaaaaaucuccguccaauacaaccucucacacaccuacgccgucgacgcagccaaccacugcgguaccauagcaaacggaguacuccaaacauucaugcgcauggccuggggcggcuccuacauugcccuggacucaggcugcggcuccugggauugcaucaugacaagcuaccaauaucucaucauccaaaacaccacaugggaagaucacugucaauucucccgccccucaccaaucggauaccucggucuucucucccaacgaacccgcgacaucuacaucucccgccgucgacgcggcaccuucaccuggacccucuccgacuccgaauccaaugaaacucccggaggcuacugccucacucgcuggaugcuaaucgaagccgaacucaaaugcuuuggcaacaccgccguugcaaaaugcaacgaaaaacacgacgaggaguucugcgacaugcuacgccuuuucgacuuuaacaaacaagccauacgacgccucaaagcccccgcacaaauguccauccaacucaucaacaaagcagucaacgcccucaucaacgaucaacucauaaugaaaaaccaccuucgcgauaucaugugcauucccuacuguaacuacucgaaauacugguaccucaaccacaccgucaccggccgcaccucacucccccgcuguuggcucgucuccaacggcucuuaccucaacgaaacccacuucucagacgacaucgaacaacaagccgacaacaugaucaccgaacuccuccagaaagaauacauggaccgacaaggcaaaacuccacucggacucguagaccucuucgucuucucuaccuccuucuaccucauauccaucuuccuccacuuggucaaaauccccacacaccgccaugucaucggaaaaccaugccccaaaccacaccgccucaaucacaugggaauaugcagcugcggccucuacaaacaccccggcguacccgucaaauggaaacgcuaaggacuagugcaucacauuuaaaagcaucucagccuaccaugagaauaagagaaagaaaaugaagaucaauagcuuauucaucucuuuuucuuuuucguugguguaaagccaacacccugucuaaaaaacauaaauuucuuuaaucauuuugccucuuuucucugugcuucaauuaauaaaaaauggaaagaaccuagaucuaaaaaaaaaaaaaaaaaaaaaaaaaaaaaaaaaaaaaaaaaaaaaaaaaaaaaaaaaaaaaaaaugcaucccccccccccccccccccccccccccccccaaaggcucuuuucagagccaccagaauu

SEQ ID NO: 7242 - RNA, 1855 nt, Artificial Sequence
  mRNA product Design i-2 comprising derived and/or modified sequence from LASV(LASV035-NIG-2009;Clade II)__AIT17588__GPCstabilized (opt11)
ggggcgcugccuacggagguggcagccaucuccuucucggcaucaagcuuaccaugggccaaaucaucaccuucuuccaagaagucccucacgucaucgaagaagucaugaacaucguccucauagcccucucucuacucgccauccucaaaggcaucuacaacgucgcaaccugcggccucuucgggcucguaucguuccuccuccucugcggaagauccugcucaaccaccuacaaaggcgucuacgaacuccaaacccucgaacucgacauggccucacuuaacaugaccaugccccucuccugcaccaaaaacaacucccaccauuacaucauggucgguaacgagaccggccuagaacuaacacucaccaacaccucuauaaucaaccacaaauucugcaaccuaucagacgcccacaagaaaaaccuuuacgaccacgcccuuauguccaucaucuccaccuuccaccuauccauacccaacuucaaccaauacgaagccauguccugcgacuucaauggcggcaaaaucuccguccaauacaaccucucccacgcauacgccgucgacgccgccaaccacuguggcaccaucgccaacgggguacuacaaaccuucaugcgcauggccuggggagguucguacaucgcccucgacucaggaugcggcucaugggacugcaucaugaccuccuaucaauaccucaucauccaaaacaccaccugggaagaccacugccaauuuucaagacccucccccauaggcuaccuaggccugcucucacaacgcacccgagacaucuacaucucccgccgacgacgcggaacauucacauggacucucuccgacucagagggcaacgaaacccccggcggcuacugccuaaccagauggaugcuaaucgaggccgaacucaaaugcuucggcaacaccgccgucgcaaaaugcaacgaaaaacacgacgaagaguucugcgacaugcuccgacucuucgacuucaacaaacaagccauucgacgccuaaaagcccccgcacagaugucaauccaacucaucaacaaagccguaaacgcccuaaucaacgaccaacuaaucaugaaaaaccaccuccgcgacaucaugugcaucccuuauugcaauuacuccaaauacugguaccucaaccacaccgucaccggaaaaacaucccuaccccgaugcuggcuaguauccaacggcuccuaccucaaugaaacgcacuucucagacgacaucgaacaacaagccgauaacaugauaaccgaacuucuccaaaaagaauacaucgacagacagggcaaaacaccccucggacucgucgaccuauucguauucucuaccucauucuaccuaauuucgaucuuccuccaccucgucaaaauacccacccaccgacacguuaucggcaaacccugccccaagccccaccgccucaaccacaugggcauaugcuccugcggccucuacaaacacccaggcguccccgucaaguggaaacgcuaaggacuagugcaucacauuuaaaagcaucucagccuaccaugagaauaagagaaagaaaaugaagaucaauagcuuauucaucucuuuuucuuuuucguugguguaaagccaacacccugucuaaaaaacauaaauuucuuuaaucauuuugccucuuuucucugugcuucaauuaauaaaaaauggaaagaaccuagaucuaaaaaaaaaaaaaaaaaaaaaaaaaaaaaaaaaaaaaaaaaaaaaaaaaaaaaaaaaaaaaaaaugcaucccccccccccccccccccccccccccccccaaaggcucuuuucagagccaccagaauu

SEQ ID NO: 7243 - RNA, 1855 nt, Artificial Sequence
  mRNA product Design i-2 comprising derived and/or modified sequence from LASV(LASV1000-NIG-2009;Clade II)__AIT17782__GPCstabilized (opt11)
ggggcgcugccuacggagguggcagccaucuccuucucggcaucaagcuuaccaugggccaaauaaucaccuucuuccaagaaguaccucacgucauagaagaagucaugaacaucguccucaucgcccucucccuccucgccauacucaaaggcaucuacaacgucgcaaccuguggccucuucggccucgucucauuccuccuacucugcggcagaucaugcucaaccacauacaaaggcguauacgaacuucagacccucgaacucgacauggccucccucaacaugaccaugccccucuccugcaccaagaacaacucccaucacuacaucauggucggcaacgaaaccggacuagaacucacacuuacgaacaccuccaucaucaaccacaaauucugcaaccuaagcgacgcccacaagaaaaaccuguacgaccacgcucucauguccauaaucuccaccuuccaccucuccauccccaacuucaaccaauacgaagcaaugagcugcgacuucaacggcggcaaaauaucaguccaauacaaccuaucccacaccuacgccgucgacgccgcaaaccacugcggcacaaucgccaacggcguccuccaaaccuucaugcgcauggccuggggcgguagcuacaucgcccucgacuccggcugcggaucaugggacuguaucaugacauccuaucaguaccuaaucauccaaaacaccaccugggaagaccacugccaauuuucccgacccucccccauagguuaccucgggcuccucucccaacgcacacgcgacaucuacaucucucgcagacgccgcggaaccuucaccuggacacucucagacucagaaggcaacgaaacucccggaggauacugccucacacgcuggaugcucaucgaagccgaacucaaaugcuucggaaacaccgcaguagcaaaaugcaacgaaaaacacgacgaagaauuuugcgacaugcucagacuauucgacuucaacaaacaagcuauaaaacgccucaaaacccccgcccaaauguccauccaacucaucaacaaagccgucaacgcacuaaucaacgaccaacuaaucaugaagaaccaccuacgcgacaucaugugcaucccuuacugcaacuacuccaaauacugguaccucaaccacacagucaccggaaaaacuucauuaccccgaugcuggcuggucuccaacggcuccuaccucaacgaaacgcacuucuccgacgacaucgaacaacaagccgacaacaugauaaccgaacuccuccaaaaagaauauaucgaccgccaaggcaaaacuccccucggccucgucgaccucuucguguucucuacauccuucuaccucaucucaaucuuccuacaucucguaaaaauuccaacccaccgccauguaguaggcaaacccugccccaaaccccaccgccucaaccacauggggaucugcucuugcggccuguacaaacaccccggcgucccaguuaaauggaaaagguagggacuagugcaucacauuuaaaagcaucucagccuaccaugagaauaagagaaagaaaaugaagaucaauagcuuauucaucucuuuuucuuuuucguugguguaaagccaacacccugucuaaaaaacauaaauuucuuuaaucauuuugccucuuuucucugugcuucaauuaauaaaaaauggaaagaaccuagaucuaaaaaaaaaaaaaaaaaaaaaaaaaaaaaaaaaaaaaaaaaaaaaaaaaaaaaaaaaaaaaaaaugcaucccccccccccccccccccccccccccccccaaaggcucuuuucagagccaccagaauu

SEQ ID NO: 7244 - RNA, 1855 nt, Artificial Sequence
  mRNA product Design i-2 comprising derived and/or modified sequence from LASV(LASV221-NIG-2010;Clade II)__AIT17624__GPCstabilized (opt11)
ggggcgcugccuacggagguggcagccaucuccuucucggcaucaagcuuaccaugggccaaauaaucaccuucuuccaagaaguuccccacguaaucgaggaagucaugaacaucguccucaucgcccuaucccuacuugcuauacucaaaggcauauacaaugucgcaaccugcggccucuucgggcuaguaucuuuccuccuacucugcggccguuccugcuccaccaccuacaaaggcgucuacgaacuccaaacacucgagcucgacauggccucccucaacaugacaaugccccuauccuguaccaagaacaacucccaccacuacaucaugguugguaacgaaacaggccuagagcucacacucaccaacaccuccauuaucaaccacaaauucuguaaccucuccgacgcccauaagaaaaaccucuacgaccacgcccucaugagcaucaucuccaccuuccaccucuccauccccaacuucaaccaauacgaagccauguccugcgacuucaacggaggcaaaaucuccguccaauacaaccucucccacacuuacgccaucgacgccgcgaaccacugcggaaccaucgccaacggcguucuccaaaccuucaugcgcauggccuggggaggcucauacaucgcacuagacuccggaugcggcuccugggacuguaucaugaccuccuaccaauaccucauuauacaaaauacaaccugggaagaccacugccaauucucccgaccauccccaaucggauaccucggccuccucucacaacgaacccgagacaucuacaucucucgccgccgccgaggcacauucacguggacacucuccgacuccgagggcaacgaaacccccggaggcuauugccuaacucgcuggaugcucaucgaagccgaacuaaaaugcuucggcaacaccgccgucgcaaaaugcaacgaaaaacacgacgaagaguucugcgacaugcuccgacucuucgacuucaacaaacaggccauccgccgccuuaaaaccccagcacaaauguccauccaacugaucaacaaagccguaaaugcucuaaucaacgaccaacucauaaugaaaaaccaccuccgagacaucaugugcauccccuacuguaacuacuccaaauacugguaccucaaccacaccguaacaggaaaaaccucccuaccacgcugcuggcucgucagcaacggcuccuaccuaaacgaaacccacuuuucugacgacauagaacaacaagccgacaacaugauaacggaaaugcuacaaaaagaauacauggaccggcaaggcaaaaccccgcucggccucguagaccucuucgucuucuccaccuccuucuaccucaucuccaucuuccuccaccucgucaagauccccacccacagacacguaaucggcaaaccuugccccaaaccccacagguugaaccacaugggcaucugcuccugcggccuauacaaacacccaggcguaccagucaaguggaaacgcuaaggacuagugcaucacauuuaaaagcaucucagccuaccaugagaauaagagaaagaaaaugaagaucaauagcuuauucaucucuuuuucuuuuucguugguguaaagccaacacccugucuaaaaaacauaaauuucuuuaaucauuuugccucuuuucucugugcuucaauuaauaaaaaauggaaagaaccuagaucuaaaaaaaaaaaaaaaaaaaaaaaaaaaaaaaaaaaaaaaaaaaaaaaaaaaaaaaaaaaaaaaaugcaucccccccccccccccccccccccccccccccaaaggcucuuuucagagccaccagaauu

SEQ ID NO: 7245 - RNA, 1855 nt, Artificial Sequence
  mRNA product Design i-2 comprising derived and/or modified sequence from LASV(LASV237-NIG-2010;Clade II)__AIT17638__GPCstabilized (opt11)
ggggcgcugccuacggagguggcagccaucuccuucucggcaucaagcuuaccaugggccaaauaaucaccuucuuucaagaagucccccacgucaucgaagaggucaugaacauuguccucauagcccuaucccuacucgcaauccucaaaggcauuuacaacgucgcuaccugcggccuauucggccuagucagcuuccuccucuuaugcggccgcuccugcucaacaacauacaaaggcguuuacgaguuacaaacccucgaacuagacauggccucucuaaacaugaccaugccccuuuccugcacuaaaaacaacucucaccacuauauuaugguaggcaacgagacaggccuugaacucacccucaccaacaccuccaucauaaaccacaaauucugcaaccuauccgacgcccacaaaaaggaccuuuacgaccacgcccucaugucaaucauaagcaccuuccaccucagcauucccaacuucaaucaauacgaagccauguccugcgauuucaacggcggcaaaaucuccguccaauacaaccuuagccacaccuacgccgucgacgccgccaaccacugcggaaccaucgcaaacggcguacuccagacauucaugcgcauggccuggggcgguuccuacaucgcccucgacucuggcugcggcuccugggacugcaucaugaccuccuaccaauaccucauaauccaaaacacaacaugggaagaccacugccaauucucccguccaucucccaucgguuaccucggccuacuuucccaacgaacccgagacaucuacaucagccgacgucgucgcggcacauucaccuggacacuauccgacucugaaggcaacgaaacccccggcggauauugccuaacccgauggaugcucauagaagccgaacucaaaugcuucggcaacaccgccgucgccaaaugcaacgaaaaacacgacgaagaguucugcgacaugcuacgccucuucgacuucaacaaacaagccauccgucgccuaaaaaccccagcccaaaugucaauacagcucaucaacaaggccgucaacgcccucaucaacgaccaacucaucaugaagaaccaccuccgugacaucaugugcauccccuacugcaacuacucaaaauauugguaccuuaaccacacagucacgggcaaaaccucccucccccgcugcuggcucgucuccaacggauccuaccucaacgaaacucacuucuccgacgacaucgaacaacaagccgacaacaugaucaccgaacuacuccaaaaagaauacauggaccgccaaggcaagacuccccucggccucgucgaccucuucguuuucuccaccuccuucuaccucaucagcaucuuccuacaccucaucaaaaucccgacccaccgccacaucaccggcaaacccugcccgaaaccccaccggcuaaaccacaugggcaucugcuccugcggccucuauaaacaccccgguguccccgucaaauggaaacgauaaggacuagugcaucacauuuaaaagcaucucagccuaccaugagaauaagagaaagaaaaugaagaucaauagcuuauucaucucuuuuucuuuuucguugguguaaagccaacacccugucuaaaaaacauaaauuucuuuaaucauuuugccucuuuucucugugcuucaauuaauaaaaaauggaaagaaccuagaucuaaaaaaaaaaaaaaaaaaaaaaaaaaaaaaaaaaaaaaaaaaaaaaaaaaaaaaaaaaaaaaaaugcaucccccccccccccccccccccccccccccccaaaggcucuuuucagagccaccagaauu

SEQ ID NO: 7246 - RNA, 1855 nt, Artificial Sequence
  mRNA product Design i-2 comprising derived and/or modified sequence from LASV(LASV253-NIG-2011;Clade II)__AIT17670__GPCstabilized (opt11)
ggggcgcugccuacggagguggcagccaucuccuucucggcaucaagcuuaccaugggccaaaucaucaccuucuuccaagaaguaccacacguaaucgaagaagucaugaacauaguccucauagcacucucccuacucgccauacuuaaaggaauuuacaacguagcaaccugcggucucuucggccuugucuccuuccucuuacugugcggccgaagcugcuccacaacauacaaaggagucuacgaacuacagacccucgaacucgacauggcaucccucaacaugaccaugccccuauccuguaccaaaaacaacucacaccacuacaucaugguagguaacgaaacaggacuugaacuaacccucaccaacacuucaaucauaaaccacaaauucugcaaccucuccgacgcccacaaaaaaaaccucuacgaccacgccuugauguccaucauauccaccuuccaccucuccaucccaaacuuuaaccaauacgaagccauguccugcgacuucaacggaggcaaaauaucaguacaauauaaccuaucccacaccuacgcagucgacgccgccaaccacugcggcaccauagccaacggaguccugcagacauucaugcgaauggcaugggguggaucuuacaucgcucuagacuccgggugcggcuccugggacugcaucaugaccucauaucaauaccucaucauacaaaacaccaccugggaggaccacugucaauucucccgcccuucccccauaggcuaccuggggcuccuaucccaaagaacccgcgacauauacauaucccgccgucgucgaggcaccuucacauggacccucagcgacucagaaggcaacgaaacccccggcggcuacugccucacccguuggaugcuaauagaagcagaacucaaaugcuucggcaacaccgcggucgccaaaugcaacgagaaacacgacgaagaauucugcgacaugcuccgccuauucgacuucaacaaacaagcaauccgccgccuuaaagcccccgcccaaaugucaauccaacucaucaacaaagccguaaacgcacucaucaacgaccaacucaucaugaaaaaccaccuccgcgacauaaugugcauccccuacugcaacuacuccaaauacugguaccucaaccacaccgucaccggccgcaccucucucccccggugcuggcuugucucaaacggcuccuaccucaaugaaacccacuucuccgacgacauagaacaacaagccgacaacaugaucacagaacuccuccaaaaagaauacaucgaccgccaaggcaaaaccccccucggacuagucgaccucuucguuuucuccaccuccuucuaccucaucuccaucuuccuccaccucgucaaaauacccacccaccgucacaucaucggcaaaccaugccccaaaccccaccgccucaaccacaugggcauaugcuccugcggacuguacaaacaccccggaguaccaguaaaauggaaacgcuaaggacuagugcaucacauuuaaaagcaucucagccuaccaugagaauaagagaaagaaaaugaagaucaauagcuuauucaucucuuuuucuuuuucguugguguaaagccaacacccugucuaaaaaacauaaauuucuuuaaucauuuugccucuuuucucugugcuucaauuaauaaaaaauggaaagaaccuagaucuaaaaaaaaaaaaaaaaaaaaaaaaaaaaaaaaaaaaaaaaaaaaaaaaaaaaaaaaaaaaaaaaugcaucccccccccccccccccccccccccccccccaaaggcucuuuucagagccaccagaauu

SEQ ID NO: 7247 - RNA, 1855 nt, Artificial Sequence
  mRNA product Design i-2 comprising derived and/or modified sequence from LASV(LASV254-NIG-2011;Clade II)__AIT17674__GPCstabilized (opt11)
ggggcgcugccuacggagguggcagccaucuccuucucggcaucaagcuuaccaugggccaaaucaucaccuucuuccaagaagucccccacgucauugaagaagucaugaacaucguccucauugcccugucccuacucgccauccucaaaggcaucuacaacgucgcaaccugcggucuauuuggccucgucagcuuccuccugcuaugcggccguuccugcuccaccaccuacaaaggcgucuacgaacuucaaacccucgaacucgacaugacaaaucuaaacaugaccaugccccugucuugcaccaaaaacaacagccaccacuacaucauggucggcaacgaaaccggccuagaacucacccuaaccaacacauccaucaucaaccacaaauucugcaaccucuccgacgcccauaagaaaaaccucuauaaccacgcccucauguccauaaucucaacauuccaccucucaauaccaaauuuuaaccaauaugaagccauguccugcgacuucaacggcggcaaaaucucaguacaauacaaucucucccacucuuacgccguagacgcagccaaccacugcggaaccauagccaacgguguccuccagaccuucaugcgcauggccuggggaggaucauacaucgcccucgacagcggcugcggaaacugggacugcaucaugaccuccuaccaauaccucaucauucaaaacaccaccugggaagaccacugccaguucucccgccccagcccaaucggauaccuaggccuccucucccaaagaacccgcgacaucuacaucucccguagacgacguggcacauucaccuggacacuaucugacuccgaaggcaacgaaacccccgguggauacugccucacccgcuggaugcucauugaagccgaacucaaaugcuucggaaacacagcagucgccaaaugcaacgaaaaacaugacgaagaguucugcgacaugcuccgccucuucgacuucaacaaacaagccaucagacgccucaaaacccccgcacaagccaacauacaacucaucaauaaagccgucaaugcacucauaaacgaccaacucaucaugaaaaaccaccuccgagacauaauguguauccccuacugcaacuauuccaaauacugguaccuuaaccacaccgucaccgguaaaaccucccucccccgcugcuggcucguauccaacggcuccuaccucaacgaaacccacuucuccgacgacaucgaacaacaagcagacaacaugaucaccgaacuucuacaaaaagaauacauggacagacagggcaaaacgccgcucggacucgucgaccuauucgucuucagcaccuccuucuaccuaauauccaucuuccuacaccuggucaaaauucccacgcaccgacacguaaucggaaaacccugucccaaaccccaccgacucaaccauaugggcaucugcagcugcggccuuuacaaacaccccggcguccccgucaaauggaaacgcuaaggacuagugcaucacauuuaaaagcaucucagccuaccaugagaauaagagaaagaaaaugaagaucaauagcuuauucaucucuuuuucuuuuucguugguguaaagccaacacccugucuaaaaaacauaaauuucuuuaaucauuuugccucuuuucucugugcuucaauuaauaaaaaauggaaagaaccuagaucuaaaaaaaaaaaaaaaaaaaaaaaaaaaaaaaaaaaaaaaaaaaaaaaaaaaaaaaaaaaaaaaaugcaucccccccccccccccccccccccccccccccaaaggcucuuuucagagccaccagaauu

SEQ ID NO: 7248 - RNA, 1855 nt, Artificial Sequence
  mRNA product Design i-2 comprising derived and/or modified sequence from LASV(Nig08-A19;Clade III)__ADU56618__GPCstabilized (opt11)
ggggcgcugccuacggagguggcagccaucuccuucucggcaucaagcuuaccaugggccaaaucgucacauucuuccaagaaguuccccacgucauagaagaagucaugaauaucguccuaaucgcccucuccauccucgccauucucaaaggacuauacaacaucgcaaccugcggccucaucggccuugucacauuccuucuacucuccggccgauccugcucaaugaccuacaagggagucuacgaacuacaaacacucgaacuaaacaugaacacccuaaacaugacuaugccccucuccugcaccaaaaacaacagccaccacuacaucauggucgggaacgaaaccggacuagagcuaacccucaccaacaccucccuccuccaccacaaguucugcaaccuauccgacgcccacaagaaaaaccucuacgaccacacccucaugucaauaaucuccaccuuccaccucuccauccccaacuucaaccaauacgaagccaugucgugcgacuuuaacggcggcaaaauaacaguccaauacaaccucucccacucguacgccauagacgccgccaaccacugcggcaccgucgcaaacggaguccuacaaaccuucaugcgcauggcauggggcggaucauacaucgcccucgacuccggcugcggcaaaugggacugcaucaugaccagcuaccaauaccucaucauccaaaacacaaccugggaggaccacugccaauucucgcgucccucacccaucggcuaccucggacuccucucccaacgcacccgcgacaucuacauaagccgacgccgccgcggcaccuucaccuggacacuuuccgacuccgaagguaacgaaacccccggaggauacugccucacgcgcuggaugcugauagaagcagaacucaaaugcuucggcaacaccgccgucgccaaaugcaacgaaaaacacgaugaagaguucugcgacaugcuucgccuuuucgauuucaacaaacaagcuauacgccgccucaaagccccagcccaaaugucaauccaacuaauuaacaaagcagucaacgcucucaucaacgaccaacucauaaugaaaaaccaccuaagagacaucaugugcauccccuacugcaacuacuccaaauacugguaucucaaccacacuuccaccggacgaaccagccucccacgcugcuggcuaguauccaacggcucauaccucaacgaaacucacuucucggacgacaucgaacaacaagcagacaacaugaucaccgaaaugcuccaaaaagaauaccucgaccgacaaggcaaaaccccucuagggcucguugaucucuucgucuucucaacaucuuucuaccucaucuccauauuccuucaccucgucaagauccccacacaccgccacaucguaggaaaacccugcccaaaaccacaccgacucaaucacaugggcaucugcagcugcggccucuacaagcaacccggcguacccguccgcuggaagcgcuagggacuagugcaucacauuuaaaagcaucucagccuaccaugagaauaagagaaagaaaaugaagaucaauagcuuauucaucucuuuuucuuuuucguugguguaaagccaacacccugucuaaaaaacauaaauuucuuuaaucauuuugccucuuuucucugugcuucaauuaauaaaaaauggaaagaaccuagaucuaaaaaaaaaaaaaaaaaaaaaaaaaaaaaaaaaaaaaaaaaaaaaaaaaaaaaaaaaaaaaaaaugcaucccccccccccccccccccccccccccccccaaaggcucuuuucagagccaccagaauu

SEQ ID NO: 7249 - RNA, 1858 nt, Artificial Sequence
  mRNA product Design i-2 comprising derived and/or modified sequence from LASV(G1180-SLE-2010;Clade IV)__AIT17168__GPCstabilized (opt11)
ggggcgcugccuacggagguggcagccaucuccuucucggcaucaagcuuaccaugggccaaauagucaccuucuuccaagaaguaccccacgucaucgaagaagucaugaacauaguccucauagcccucuccauacucgccguccucaaaggccuuuacaacuucgcaaccugcggccuagucggccugcuaaccuuccuacuacucugcggcagauccuguaccgccucacgcuacaaaggagucuacgaguuacaaacacucgaacucaacauggaaacccucaacaugacaaugccccucuccugcacgaaaaauaauucacaccacuacaucauggucggcaacgaaaccggccucgaacucacccucaccaacacaagcaucaucaaccacaaauucugcaaccuaucagacgcacacaagaaaaaccuguacgaccacgcccuaauguccaucaucucuacauuccaccuguccaucccaaacuucaaccaauacgaagcaaugagcugcgacuucaacggcgggaaaaucuccguccaauacaacuuaagccacagcuacgccggagacgccgcaaaccacugcggaacagucgcaaacggcguccuucaaaccuucaugcgcauggccuggggcggcuccuacauugcacuggacuccggcugcggcuccugggacugcaucaugaccuccuaucaauaccuaauaauacaaaacacaaccugggaagaccauugccaauucucccgcccaucacccaucggauaccuaggccuacucucccaacgaacucgagacaucuacaucucccgacgccgccgaggcaccuucaccuggacccucuccgacucagaaggcaaagacacucccggcggauacugccucacccgcuggaugcuuaucgaagccgaacucaaaugcuucggcaacacagccgucgccaaaugcaacgaaaaacacgacgaagaguucugugacaugcuccgacucuucgacuucaacaaacaagccauccaacgccuaaaagcaccagcacaaauguccauccaacucaucaacaaagccgucaaugcccucauuaacgaccaacucaucaugaaaaaccaccuccgagacaucaugugcaucccuuacugcaacuacuccaaauacugguaccuaaaccacaccacaaccggaaaaacaucccuccccaaaugcuggcuuguauccaacggcucauaucucaacgaaacccacuucuccgacgacaucgaacaacaagcagacaacaugauaacagaaaugcuacaaaaagaauacauggaacgacaaggaaaaacaccccuaggcuuggucgaucuauucgucuuuagcacaucauucuaccucauaucaauauuccuccaccucguaaaaauccccacccaccgccacauagucggcaaauccugcccaaaaccacaccgacucaaccacaugggcauauguucaugcggccucuacaaacaacccggcguacccgugaaauggaaacgcuagggacuagugcaucacauuuaaaagcaucucagccuaccaugagaauaagagaaagaaaaugaagaucaauagcuuauucaucucuuuuucuuuuucguugguguaaagccaacacccugucuaaaaaacauaaauuucuuuaaucauuuugccucuuuucucugugcuucaauuaauaaaaaauggaaagaaccuagaucuaaaaaaaaaaaaaaaaaaaaaaaaaaaaaaaaaaaaaaaaaaaaaaaaaaaaaaaaaaaaaaaaugcaucccccccccccccccccccccccccccccccaaaggcucuuuucagagccaccagaauu

SEQ ID NO: 7250 - RNA, 1858 nt, Artificial Sequence
  mRNA product Design i-2 comprising derived and/or modified sequence from LASV(G1442-SLE-2011;Clade IV)__AIT17180__GPCstabilized (opt11)
ggggcgcugccuacggagguggcagccaucuccuucucggcaucaagcuuaccaugggccaaaucgucaccuucuuccaagaaguaccccacguaaucgaagaagucaugaacaucguccucaucgcacucuccauccuagccguccuaaaaggacuuuacaacguugccacaugcggucuaaucggacucgucaccuuccuccuccugugcggccgcucauguaccaccacacucuacaaaggcgucuacgaacuccaaacacuagaacucaauauggagacccuuaacaugacaaugccccuaagcugcaccaaaaacaauucucaccacuacauccggguagggaaugaaacagggcuagaacucacccucaccaacaccuccaucaucaaccacaaauucugcaaccuauccgacgcccacaagaaaaaccuauacgaccacgcccucauguccaucaucagcaccuuucaccuauccauacccaacuucaaccaauacgaagccauguccugcgacuucaacggcggcaaaauauccguacaauacaaccuaucccacucuuacgccggcgacgcagccaaccacugcggcacagucgcaaacgguguccuacaaacauucaugcgcauggcauggggcggauccuacaucgcccuugacuccggcugcgguaacugggacugcaucaugaccuccuaccaauaccucaucauccaaaacaccacaugggacgaccacugccaauucagcagacccagcccuauaggcuaccuaggccuacucucacaacgcacccgcgacguuuacaucagccgacgacgccgcggaaccuucaccuggacccucuccgacagcgagggcaaagacaccccaggcggcuacugccucacccgcuggaugcucauagaagccgaauuaaaaugcuucggcaacaccgccguagccaaaugcaacgaaaaacacgacgaagaguucugcgacaugcuccgccucuucgacuucaacaaacaagccauucaacgucucaaagcccccgcccaaauguccauccaacucauaaacaaagccguaaacgcccucaucaacgaccaacucaucaugaaaaaccaucugcgagacaucaugugcaucccguacugcaauuacucaaaauacugguaccuaaacaacaccgcuacaggcaaaacaucccuccccaaaugcuggcucaucuccaacggauccuaucuaaacgaaacccacuucuccgacgacaucgaacaagaagccgauaacaugaucaccgaaaugcuccaaaaagaauacauggaacgccaagguaaaacuccccucggccuugucgaccuauucguuuucucaaccucauuuuaccucauauccauauuccuccaccuaguuaaaauacccacccaccgccacaucgucggaaaauccugccccaaaccccaccgccucaaccacaugggcaucugcucaugcggucuauacaaacaacccggaguaccaguccgcuggaaacgcuaaggacuagugcaucacauuuaaaagcaucucagccuaccaugagaauaagagaaagaaaaugaagaucaauagcuuauucaucucuuuuucuuuuucguugguguaaagccaacacccugucuaaaaaacauaaauuucuuuaaucauuuugccucuuuucucugugcuucaauuaauaaaaaauggaaagaaccuagaucuaaaaaaaaaaaaaaaaaaaaaaaaaaaaaaaaaaaaaaaaaaaaaaaaaaaaaaaaaaaaaaaaugcaucccccccccccccccccccccccccccccccaaaggcucuuuucagagccaccagaauu

SEQ ID NO: 7251 - RNA, 1858 nt, Artificial Sequence
  mRNA product Design i-2 comprising derived and/or modified sequence from LASV(G3010-SLE-2013;Clade IV)__AIT17344__GPCstabilized (opt11)
ggggcgcugccuacggagguggcagccaucuccuucucggcaucaagcuuaccaugggccagauagucaccuucuuucaagaagucccccacguaauagaagaggucaugaacaucguccuaauagcccucucaauccuagccguccuaaaaggccuauacaacuucgccacaugcggccuagucggccuaguaaccuuccuccuacugugcggccgcucuugcacgaccagccucuacaaaggagucuacgaacuacaaacccucgaacucaacauggaaacccuaaacaugaccaugccccucuccugcaccaaaaacaacucccaccacuacaucauggucggaaacgaaacaggccuagaacucacccuaaccaacaccucaauaaucaaccacaaguucugcaaccucucagacgcccauaagaaaaaccuauacaaccacgcacuaauguccaucauuuccaccuuucaccuaucuauccccaacuucaaccaauacgaagccaugucuugcgacuucaauggcggcaaaaucucaguccaauauaaccucagucacuccuacgccggagacgcagccucccacugcggcaccgucgccaacggcguacuccaaaccuucaugaggauggcauggggcggaagcuacaucgcccucgacuccggcugcggcaaaugggauugcaucaugacauccuaccaauaucucaucauacaaaacaccaccugggaggaccacugccaauucucccgccccagccccaucgguuaccucggccuacucucccagcgcacccgcgacaucuacaucucccgcagacgccgcggaaccuucaccuggacccuuuccgacuccgaaggcaaagacacacccggcggcuacugccucacucgauggaugcucaucgaagccgaacugaaaugcuuuggcaacacugccgucgccaaaugcaacgagaaacacgacgaagaauuuugcgacaugcuccgccucuucgacuucaacaaacaagccauucaacgccuuaaaacccccgcgcaaauguccauacaacucaucaacaaggccguaaacgcacucaucaaugaccaacuaaucaugaagaaccaccuccgagacauaaugugcauccccuacugcaacuacuccaaauacugguaucucaaccacacaacaaccggcaagaccucccuccccaaauguuggcucguaucaaacggauccuaccucaacgaaacccacuucuccgacgacaucgaacaacaagcagacaacaugaucaccgagaugcuacaaaaggaauacauggaacgccaaggaaaaacgccccuaggacucgucgaccucuucguauucagcaccuccuucuaccugaucuccaucuuccuccaucuugucaaaaucccaacccaccgccacaucgucggcaagucaugccccaaaccacaccgacuaaaccacaugggaauauguucaugcggccucuacaaacagccgggcguccccgugcgcuggaaaagaugaggacuagugcaucacauuuaaaagcaucucagccuaccaugagaauaagagaaagaaaaugaagaucaauagcuuauucaucucuuuuucuuuuucguugguguaaagccaacacccugucuaaaaaacauaaauuucuuuaaucauuuugccucuuuucucugugcuucaauuaauaaaaaauggaaagaaccuagaucuaaaaaaaaaaaaaaaaaaaaaaaaaaaaaaaaaaaaaaaaaaaaaaaaaaaaaaaaaaaaaaaaugcaucccccccccccccccccccccccccccccccaaaggcucuuuucagagccaccagaauu

SEQ ID NO: 7252 - RNA, 1858 nt, Artificial Sequence
  mRNA product Design i-2 comprising derived and/or modified sequence from LASV(G502-SLE-2009;Clade IV)__AIT17126__GPCstabilized (opt11)
ggggcgcugccuacggagguggcagccaucuccuucucggcaucaagcuuaccaugggccaaaucgucaccuucuuucaagaagucccccacguuaucgaagaaguuaugaacaucguacucaucgcccucuccauccuagccgucuuaaaagggcucuacaacuucgcaaccugcggccucguaggccuacucaccuuccugcuccucugcggccgaucaugcacaaccggacuuuacaagggcguauacgaacugcaaacccucgaacuaaacauggaaacccucaacaugacuaugccccucuccugcaccaaaaacaacagccaccacuacauaauggucggcaacgaaacaggacuagagcucacccuaaccaacaccucgaucaucaaccacaaguucugcaaccuauccgacgcccacaagaaaaaccucuacgaccacgcgcucauguccauaaucuccaccuuccaccugucaauacccaacuucaaucaauacgaagcaauguccugcgacuucaacggaggcaaaaucuccguacaauacaaucugucccacuccuacgccggagacgccgccgaccacugcggcacaguagccaacggcguacuccaaacuuucaugcgaauggcauggggcggcuccuacaucgcucucgacucaggcugcggacgaugggacugcaucaugaccucauaccaauaccuaaucauccaaaacaccaccugggaagaccacugccaauucucccgacccucgccaaucggauaccugggccugcucucccaacgcacccgcgacaucuacauuucccgccgcagacgcggaaccuucaccuggacccucagcgacuccgagggcaaagacacacccgguggcuacugccuaacacgcuggaugcugaucgaagccgaacucaaaugcuucggaaacaccgccguugcaaaaugcaacgaaaaacacgacgaagaguucugcgacaugcuccgacucuucgacuucaacaaacaagccauacaacgccucaaagcccccgcccaaauguccauacaacucauaaauaaagccgucaacgcccucaucaacgaccagcuaguaaugaaaaaucaccuccgagacaucaugugcauaccauacugcaacuacuccagauacugguaccuaaaccacaccaccaccggccgcaccucccucccuaagugcuggcuaguauccaacggcucauaccucaacgaaacacacuucucagacgacaucgagcaacaagccgacaacaugaucacggaaaugcuacaaaaagaauacauggaacgccaaggaaaaaccccacucggccucgucgaccucuucgucuucuccacuucauucuaccuaaucucaaucuuccuacaccucguaaaaaucccuacccacagacacaucguaggcaaauccugccccaaaccccaccgacuaaaccacaugggaauaugcucuugcggacucuacaaacaacccggcguacccguaaaauggaaaagauaaggacuagugcaucacauuuaaaagcaucucagccuaccaugagaauaagagaaagaaaaugaagaucaauagcuuauucaucucuuuuucuuuuucguugguguaaagccaacacccugucuaaaaaacauaaauuucuuuaaucauuuugccucuuuucucugugcuucaauuaauaaaaaauggaaagaaccuagaucuaaaaaaaaaaaaaaaaaaaaaaaaaaaaaaaaaaaaaaaaaaaaaaaaaaaaaaaaaaaaaaaaugcaucccccccccccccccccccccccccccccccaaaggcucuuuucagagccaccagaauu

SEQ ID NO: 7253 - RNA, 1858 nt, Artificial Sequence
  mRNA product Design i-2 comprising derived and/or modified sequence from LASV(G733-SLE-2010;Clade IV)__AIT17154__GPCstabilized (opt11)
ggggcgcugccuacggagguggcagccaucuccuucucggcaucaagcuuaccaugggccaaaucguaaccuucuuucaagaagucccccacgucaucgaagaaguuaugaacauaguucuaaucgcccuaucaauccucgccguccucaaaggccucuacaacuucgcaaccugcggaaucguuggucuuguaucauuccuccuacuuugcggacgguccugcaccacuucccuuuacaaaggagucuacgaacuccaaacccucgaacucaacauggaaacccuaaacaugaccaugccccucucaugcaccaagaacaacucccaccacuacaucauggucggcaacgaaaccggccucgagcucacccugacaaacacaucaaucauuaaccacaaguucugcaaccuuuccgacgcccacaagaaaaaccucuacgaccacgcccucauguccauaauauccaccuuccaccucuccauccccaacuucaaccaauacgaagccauguccugcgacuucaacggcggaaaaaucucaguccaauacaaccucucccacuccuaugccggagacgccgccaaccacugcggcaccauagcaaacggcguccuccaaaccuucaugcgcauggccuggggcggcagcuacauagcccucgacagcggcugcgaccgaugggacugcauuaugacuucauaccaauaccuaaucauccaaaacacaaccugggaagaccacugccaauucucacgccccucccccauaggauaccucggccuacuaucccaacgcacccgcgacaucuacaucucccgacgccgccgaggcacguuuaccuggacauuguccgacuccgagggcaaagacacacccggcggcuacugccuaacccgauggaugcucaucgaagccgaacucaaaugcuucggcaacaccgccgucgccaaaugcaaugagaaacacgacgaagaguucugcgauaugcuccgccuauucgacuucaacaaacaagcuauccaacgccucaaagcucccgcccaaaugagcauccaacucaucaacaaagccguuaacgcccucaucaacgaccaacucauaaugaaaaaccaccuccgggacaucaugugcauccccuacugcaacuacaguaaauacugguaccuuaaccacaccacaacaggaaagaccuccuuacccaaaugcuggcucguauccaacggauccuaccuaaacgaaacacauuucuccgacgacaucgaacaacaagccgacaacaugaucacagaaaugcuccaaaaagaauacauggaacgccaaggaaaaaccccacuuggccucgucgaccuauucguauuuagcaccucuuucuaccucaucuccaucuuccuccaccuagucaagauacccacccaccgccacgucgucggcaaaagcugccccaaaccccaccgacuuaaccacaugggcauaugcuccugcggacucuauggccaacccggcguccccguuaaguggaaaagguaaggacuagugcaucacauuuaaaagcaucucagccuaccaugagaauaagagaaagaaaaugaagaucaauagcuuauucaucucuuuuucuuuuucguugguguaaagccaacacccugucuaaaaaacauaaauuucuuuaaucauuuugccucuuuucucugugcuucaauuaauaaaaaauggaaagaaccuagaucuaaaaaaaaaaaaaaaaaaaaaaaaaaaaaaaaaaaaaaaaaaaaaaaaaaaaaaaaaaaaaaaaugcaucccccccccccccccccccccccccccccccaaaggcucuuuucagagccaccagaauu

SEQ ID NO: 7254 - RNA, 1858 nt, Artificial Sequence
  mRNA product Design i-2 comprising derived and/or modified sequence from MOPV/LASV reassortant(IGS-1;Clade IV)__AFY05576__GPCstabilized (opt11)
ggggcgcugccuacggagguggcagccaucuccuucucggcaucaagcuuaccaugggccaaaucgucaccuucuuccaagaagucccacacgucauagaagaagucaugaauaucguccuuaucgcacuauccguacuagcaguccuuaaaggacuuuacaacuucgcaaccugcggccugguaggccuaguaaccuuccuccuccucugcggacgcucaugcaccaccagccucuacaaaggaguauacgaacuacaaacccucgaacucaacauggaaacccuuaacaugaccaugccccucuccugcacaaagaacaacucccaccacuauauaauggucggcaacgaaacaggccuggaacucacccuaacaaacaccuccauaaucaaccacaaauucugcaaccucuccgacgcccacaagaaaaaccuauacgaccacgcccuaaugucgauaaucuccacauuccaccucagcaucccaaacuucaaccaauacgaagccauguccugcgacuucaacggcggcaaaaucucuguccaauacaaccuaucacacuccuacgccggugacgccgccaaccauugcgggaccgucgccaacggcguccuccaaaccuucaugagaauggccuggggcggaucguacaucgcccuagacagcggaugcgguaacugggacugcaucaugaccagcuaccaauaccucaucauacaaaacacuaccugggaggaccacugccaguucucacgccccuccccuauaggcuaccucggccugcucagccaacgcacccgcgacauauacaucucccgacgacgacgaggcaccuucaccuggacacucuccgauuccgaaggcgaagacaccccuggcggauacugccugacacgauggaugcucauagaggccgaacucaaaugcuucggcaacacagcagucgcaaaaugcaacgaaaaacacgacgaagaguucugcgacaugcuccgccuauucgacuucaacaaacaagccauccaacgauuaaaagccccagcccaaauguccauacaacucaucaacaaagccgucaacgcacuaauaaacgaccagcuaaucaugaaaaaccaccuccgagacaucaugugcauaccauacugcaacuacuccaaauacugguaccucaaccacacaaccacuggacgcaccucucuccccaaaugcuggcucgucucaaacggcagcuaccuuaacgaaacccacuucuccgacgacaucgaacaacaagccgacaacaugaucaccgaaaugcuacaaaaagaauacauggaaagacagggcaagacaccccucggccuagucgaccucuucguauucuccaccuccuucuaccuaaucucaaucuuccuacaccuagucaaaauccccacccaccgccacauaguaggcaaauccugccccaaaccccaucgccucaaccacaugggcauaugcucaugcggucucuacaaacaacccggcguccccgucaaguggaaacgaugaggacuagugcaucacauuuaaaagcaucucagccuaccaugagaauaagagaaagaaaaugaagaucaauagcuuauucaucucuuuuucuuuuucguugguguaaagccaacacccugucuaaaaaacauaaauuucuuuaaucauuuugccucuuuucucugugcuucaauuaauaaaaaauggaaagaaccuagaucuaaaaaaaaaaaaaaaaaaaaaaaaaaaaaaaaaaaaaaaaaaaaaaaaaaaaaaaaaaaaaaaaugcaucccccccccccccccccccccccccccccccaaaggcucuuuucagagccaccagaauu

SEQ ID NO: 7255 - RNA, 1858 nt, Artificial Sequence
  mRNA product Design i-2 comprising derived and/or modified sequence from LASV(LM765-SLE-2012;Clade IV)__AIT17814__GPCstabilized (opt11)
ggggcgcugccuacggagguggcagccaucuccuucucggcaucaagcuuaccaugggacaaaucgucaccuucuuccaagaagucccgcacgucaucgaggaagucaugaacauaguccucauagcccucucgauacuagccguccuaaaaggccuauacaacuucgcaaccugcggccucguaggccucgucaccuuccuccuccucugcggccgaucguguaccaccucacuauacaaaggagucuacgaacuccaaacucuggaacuuaacauggagacccucaacaugaccaugccccucuccugcaccaaaaacaauucccaccauuacaucauggucggaaacgaaacaggacucgaacuaacccucacgaacacuuccaucauagaucacaaauucugcaaccucagcgacgcccaccgcaaaaaccucuacgaccacgccuuaaugagcaucaucucaacauuccacuuauccauacccaacuucaaccaauacgaagccaugucaugcgauuucaacggcggcaaaaucucaguccaauacaaccuaucccacucuuacgccaaagacgccgccgaccacugcggcacagucgccaacggcguccuccaaaccuucaugcgcauggccuggggcggaagcuacaucgcacucgacucaggcugcggccgcugggacugcauaaugacauccuaccaguaccuuauaauccaaaacacaacaugggaagaccacugucaauucagcagacccagccccaucggauaccuaggccuacucucccaacgcacacgcgacauauacauaucacgccgccgucgcggcaccuucacauggacccuaucagauuccgagggcaaagacacacccggaggcuacugccucacucguuggaugcuaaucgaagcugaacucaaaugcuucgguaacacugccgucgccaaaugcaaugaaaaacacgacgaagaauuuugcgacaugcuccgccucuucgacuucaacaaacaagccauacagcgacuaaaggcccccgcccaaauguccauucaacugaucaacaaagccgucaacgcccuaaucaacgaccaacucaucaugaaaaaccaccuccgcgacauaaugugcaucccauacugcaacuacuccaaguacugguaccuaaaccacaccaccaccggcaaaaccucccuccccaaaugcuggcucgucucuaacggaucuuaccuuaacgaaacccacuucucagacgauaucgagcaacaagcugacaacaugaucaccgaaaugcuccaaaaagaauacauggaaagacaaggcaaaacaccccuaggacucgucgaccucuucgucuucucuaccuccuucuaccucauaucaaucuuucuccaccucgucaagaucccuacccaccgccacaucgucggcaaaccaugccccaaaccccaccgccucaaccacaugggcauaugcuccugcggccucuacaaacagccaggcgucccggucaaauggaaacgauagggacuagugcaucacauuuaaaagcaucucagccuaccaugagaauaagagaaagaaaaugaagaucaauagcuuauucaucucuuuuucuuuuucguugguguaaagccaacacccugucuaaaaaacauaaauuucuuuaaucauuuugccucuuuucucugugcuucaauuaauaaaaaauggaaagaaccuagaucuaaaaaaaaaaaaaaaaaaaaaaaaaaaaaaaaaaaaaaaaaaaaaaaaaaaaaaaaaaaaaaaaugcaucccccccccccccccccccccccccccccccaaaggcucuuuucagagccaccagaauu

SEQ ID NO: 7256 - RNA, 1858 nt, Artificial Sequence
  mRNA product Design i-2 comprising derived and/or modified sequence from LASV(LM776-SLE-2012;Clade IV)__AIT17824__GPCstabilized (opt11)
ggggcgcugccuacggagguggcagccaucuccuucucggcaucaagcuuaccaugggccaaaucgucacauucuuccaagaagucccccacgucaucgaagaagucaugaacaucguccucaucgcccucucaauccuagccguccucaaaggccuauacaacuucgcuaccugcggccucgucggccucguaaccuuccuccuccuaugcggccgaucuugcaccaccucugucuacaaaggagucuacgaacuccaaacacucgaacuaaacauggaaacccugaacaugacaaugccccucuccuguaccaagaacaacucccaccacuacaucaugguuggcaacgaaaccggccuagaacuuacccucaccaacacuucaaucauaaaccacaaauucugcaaccucuccgacgcccacaagaaaaaccucuacgaccacgcacucauguccaucaucucaaccuuccaccucagcaucccaaacuucaaccaauacgaagccaugucaugcgacuucaacggcggcaaaaucucuguacaauacaaccuaucccacuccuacgccggcgacgcagccaaccacuguggaaccgucgcaaacggcguccuacagacguucaugcgcauggccuggggcggcucauauaucgcccucgacuccggaugcggcaaaugggacugcaucaugaccucauaccaauaccucauaauacaaaacaccacaugggaagaccauugccaguuuucccgcccuuccccgauaggauaccucggccuccuaucccaacgcacccgcgacauuuacaucucacgccgccgccgaggcacauuuacauggacccucucugacuccgaaggcaaagacacccccggaggcuacugccuaacucgcuggaugcucauagaggccgaacucaaaugcuucggcaacacagccguagccaaaugcaacgaaaaacacgaugaagaguucugcgauaugcuccgccucuucgacuucaacaaacaagcaauccaaagacuaaaagcccccgcacaaaugagcauucaacucaucaacaaagcagucaacgcccuuauaaacgaccaacuaaucaugaaaaaccaucuacgcgacaucaugugcauccccuacugcaacuacucaaaauacugguaccuaaaccacacaacaacuggcaaaaccagccuccccaaauguuggcucgucucuaacggcucauaccucaacgaaacccacuucucagacgacaucgaacaacaagccgacaacaugaucaccgaaaugcuccaaaaagaauacauggaacgccagggcaaaacuccacucggccuaguagaccucuucgucuucuccacaaguuucuaccucaucuccauauuccuacaccuagucaaaauccccacccaccgacacaucguaggcaaaucuugccccaaaccucaucgccuaaaccacaugggaaucugcagcugcggucucuacaaacaacccggcgucccaguccgauggaaacgauaaggacuagugcaucacauuuaaaagcaucucagccuaccaugagaauaagagaaagaaaaugaagaucaauagcuuauucaucucuuuuucuuuuucguugguguaaagccaacacccugucuaaaaaacauaaauuucuuuaaucauuuugccucuuuucucugugcuucaauuaauaaaaaauggaaagaaccuagaucuaaaaaaaaaaaaaaaaaaaaaaaaaaaaaaaaaaaaaaaaaaaaaaaaaaaaaaaaaaaaaaaaugcaucccccccccccccccccccccccccccccccaaaggcucuuuucagagccaccagaauu

SEQ ID NO: 7257 - RNA, 1858 nt, Artificial Sequence
  mRNA product Design i-2 comprising derived and/or modified sequence from LASV(Mad39;Clade IV)__ANH09722__GPCstabilized (opt11)
ggggcgcugccuacggagguggcagccaucuccuucucggcaucaagcuuaccaugggccaaaucgucacauucuuccaagaagucccccacgucaucgaagaagucaugaacaucgugcuaauagcacucuccauccuagccguccuaaaaggccucuauaacgucgcaaccugcggccugaucggccuugucaccuuccuacuccucugcggacgauccuguaccaccacccuuuacaaaggcgucuacgaacuccaagcccucgaauuaaauauggaaacccugaacaugaccaugccccucuccugcaccaaaaauaacucccaucacuacauucgagucggcaacgaaaccggacucgaauuaacccucaccaacacaucccuaaucaaccacaaauucugcaaccucucagacgcccacaagaaaaaccucuacgaccacgcccuuauguccaucaucucaacauuccaccucucaauacccaacuucaaccaauacgaagcaauguccugcgacuucaacgacggcaaaaucucuguccaauacaaccucucacacaccuacgccggcgacacagcaaaccacugcggcaccgucgcaaacggcguacuccaaacauucaugcgaauggcuuggggcggauccuacaucgcacuagacucaggaugcggcggcugggacuguaucaugacauccuaccaauacuuaaucauacaaaacacuaccugggaagaccacugucaauucucacgucccucuccgaucggcuaccucggccuccucucccaacgaacccgcgacaucuauaucucccgccgccgccgcggcaccuucacauggacgcuaagcgauucagagggcaaagacacccccggcggcuacugccugacccgcuggaugcuuaucgaagcagaacucaaaugcuucggcaacacagcagucgccaaaugcaacgaaaaacacgacgaggaguucugcgacaugcuccgccuauucgacuucaacaaacaagccauccaacgccucaaagccccagcacaaauguccauucaacuaaucaacaaagccguaaaugcccucaucaacgaccaacucauuaugaaaaaccaccuucgugacaucaugugcauaccauacugcaacuacuccaaauacugguaccucaaccacaccguuaccggcaaaaccucacucccaaaaugcuggcucgucuccaauggcucguaccuaaacgaaacccacuucagcgacgacaucgaacaacaagccgacaacaugaucaccgaaaugcuacaaaaagaauacauggaacgccaaggcaagacaccccugggccuaguggaccuuuucgucuucuccaccuccuucuaccucauauccauauuccuccaccucgucaaaaucccaacacaccgccacguaguaggaaaacccugcccaaaaccccaccgccucaaccacaugggcaucugcagcugcggauucuacaaacaaccuggcgucccaguccguuggaaacgauaaggacuagugcaucacauuuaaaagcaucucagccuaccaugagaauaagagaaagaaaaugaagaucaauagcuuauucaucucuuuuucuuuuucguugguguaaagccaacacccugucuaaaaaacauaaauuucuuuaaucauuuugccucuuuucucugugcuucaauuaauaaaaaauggaaagaaccuagaucuaaaaaaaaaaaaaaaaaaaaaaaaaaaaaaaaaaaaaaaaaaaaaaaaaaaaaaaaaaaaaaaaugcaucccccccccccccccccccccccccccccccaaaggcucuuuucagagccaccagaauu

SEQ ID NO: 7258 - RNA, 1858 nt, Artificial Sequence
  mRNA product Design i-2 comprising derived and/or modified sequence from LASV(Z0947-SLE-2011;Clade IV)__AIT17840__GPCstabilized (opt11)
ggggcgcugccuacggagguggcagccaucuccuucucggcaucaagcuuaccaugggucaaaucgucacauuuuuccaagaagucccacacguaauagaagaagucaugaacaucguacuuauagcacucuccauccuugcaguccuuaaaggccucuauaacuucgccacuugcggacucgucggccuaguaacauuccuacuacuguguggccgcuccugcaccaucucacucuacaagggcguauacgaacuccaaacacuugaacucaacauggaaacccuaaacaugaccaugccccucuccugcaccaaaaacaacucucaccacuacauaauggucggaaacgaaacaggacuagaacucacccucaccaacaccucaauaaucaaccacaaauucugcaaccuuuccgaugcacacaagaaaaaccucuacgaccacgcacucauguccauaaucuccaccuuccaccucucaauccccaacuucaaccaauacgaagcaaugucgugcgacuucaacggcgggaaaaucuccguccaauacaaccucucccacuccuacgcuggagacgccgcaaaccacugcgguaccguggccaacgguguccuccagaccuucaugcgcauggccuggggcggauccuacauagcccucgacucagguugugaccgaugggauugcaucaugacauccuaccaauaccucaucauccaaaacaccaccugggaagaccacugccaauucucccgucccucccccauaggcuaccucggccuccucucccaacgcacccgcgauaucuacaucagccgccgacgccgcggcaccuucaccuggacccuuucugacuccgaaggaaaagacacccccggcggcuacugccuaacucgauggaugcucaucgaagccgaacuaaaaugcuucggcaacaccgccgucgccaaaugcaacgaaaaacacgacgaagaguucugcgacaugcuucgccucuucgacuucaacaaacaagccauccagcgccucaaagcccccgcacaaauguccauacaacuaaucaacaaagccgucaacgcccuaauaaacgaccaacucaucaugaaaaaccaccuccgcgauauaaugugcauuccauacugcaacuacuccaaauacugguaucuaaaccacacaaccaccggcaaaaccucccuacccaaaugcuggcucgucuccaacggaucguaucuaaacgaaacucacuucuccgacgacaucgaacaacaagccgacaacaugaucacugagaugcuccagaaagaauacauggaacgacaaggcaaaacaccacuaggccucgucgaccucuucgucuucuccacauccuucuaccucaucucaaucuuccuccaccucguaaaaaucccaacccaccgccacaucgucggaaaacccugccccaagccacaccgccuaaaccacaugggcaucugcuccugcggacucuacaagcaacccggaguacccgucaaauggaaacgauagggacuagugcaucacauuuaaaagcaucucagccuaccaugagaauaagagaaagaaaaugaagaucaauagcuuauucaucucuuuuucuuuuucguugguguaaagccaacacccugucuaaaaaacauaaauuucuuuaaucauuuugccucuuuucucugugcuucaauuaauaaaaaauggaaagaaccuagaucuaaaaaaaaaaaaaaaaaaaaaaaaaaaaaaaaaaaaaaaaaaaaaaaaaaaaaaaaaaaaaaaaugcaucccccccccccccccccccccccccccccccaaaggcucuuuucagagccaccagaauu

SEQ ID NO: 7259 - RNA, 1693 nt, Artificial Sequence
  mRNA product Design i-3 comprising derived and/or modified sequence from LASV(Josiah;Clade IV)__NP_694870__GPCstabilized (wt)
gggagaaagcuuaccaugggacaaauagugacauucuuccaggaagugccucauguaauagaagaggugaugaacauuguucucauugcacugucuguacuagcagugcugaaaggucuguacaauuuugcaacguguggccuuguugguuuggucacuuuccuccuguugugugguaggucuugcacaaccagucuuuauaaagggguuuaugagcuucagacucuggaacuaaacauggagacacucaauaugaccaugccucucuccugcacaaagaacaacagucaucauuauauaauggugggcaaugagacaggacuagaacugaccuugaccaacacgagcauuauuaaucacaaauuuugcaaucugucugaugcccacaaaaagaaccucuaugaccacgcucuuaugagcauaaucucaacuuuccacuuguccauccccaacuucaaucaguaugaggcaaugagcugcgauuuuaaugggggaaagauuagugugcaguacaaccugagucacagcuaugcuggggaugcagccaaccauugugguacuguugcaaaugguguguuacagacuuuuaugaggauggcuuggggugggagcuacauugcucuugacucaggcugcggcaacugggacuguauuaugacuaguuaucaauaucugauaauccaaaauacaaccugggaagaucacugccaauucucgagaccaucucccaucgguuaucucgggcuccucucacaaaggacuagagauauuuauauuaguagaagacgccggggcacauucacauggacacugucagauucugaagguaaagacacaccagggggauauugucugaccagguggaugcuaauugaggcugaacuaaaaugcuucgggaacacagcuguggcaaaauguaaugagaagcaugaugaggaauuuugugacaugcugaggcuguuugacuucaacaaacaagccauucaaagguugaaagcucccgcacaaaugagcauucaguugaucaacaaagcaguaaaugcuuugauaaaugaccaacuuauaaugaagaaccaucuacgggacaucaugugcauuccauacuguaauuacagcaaguauugguaccucaaccacacaacuacugggagaacaucacugcccaaauguuggcuuguaucaaaugguucauacuugaacgagacccacuuuucugaugauauugaacaacaagcugacaauaugaucacugagauguuacagaaggaguauauggagaggcaggggaagacaccauugggucuaguugaccucuuuguguucaguacaaguuucuaucuuauuagcaucuuccuucaccuagucaaaauaccaacucauaggcauauuguaggcaagucgugucccaaaccucacagauugaaucauaugggcauuuguuccuguggacucuacaaacagccuggugugccugugaaauggaagagaugaggacuaguuauaagacugacuagcccgaugggccucccaacgggcccuccuccccuccuugcaccgagauuaauaaaaaaaaaaaaaaaaaaaaaaaaaaaaaaaaaaaaaaaaaaaaaaaaaaaaaaaaaaaaaaaaugcaucccccccccccccccccccccccccccccccaaaggcucuuuucagagccaccagaauu

SEQ ID NO: 7260 - RNA, 1690 nt, Artificial Sequence
  mRNA product Design i-3 comprising derived and/or modified sequence from LASV(LP;Clade I)__AAF86701__GPCstabilized (wt)
gggagaaagcuuaccauggggcagauuauuacauucuuucaagaagugccacauguaauagaggaagucaugaacauugugcuaauugcgcuuucucuauuggcaaucuugaagggcuuguauaacaucgcuacaugugggauuauuggauugguugccuuuuuauucuuguguggcaagucuuguucccuaacccuuaaagggggauaugagcugcaaaccuuagaauuaaauauggagacccuaaacaugaccaugcccuuaucaugcaccaagaacagcagucaucauuacauaagagugggcaaugagacuggauuagaauugacuuuaacuaacaccagcauuauaaaucacaaauuuugcaacuuauccgaugcucacaaaaagaaucuuuaugaucaugcucucaugagcaucaucucaacauuccaucuauccauuccaaacuucaaucaguaugaagccaugaguugugauuucaauggagggaaaaucagugugcaauacaaccucucucauuccuaugcuggggaugcggccgaacacugugggacaguugccaacggaguguugcaaacauuuaugagaauggccugggguggaagauacauugcauuagacucaggaugcggaaacugggacuguauaaugaccagcuaccaguaccugauaauucaaaauacaacaugggaggaccacugccaauucucaagaccgucuccuaucggguaccuuggccuuuugucacaaaggacaagagauauauauauaaguaggaggcgccgggggaccuucaccuggacauugucagauucugagggcaaugaaacaccaggugguuauuguuuaaccagguggaugcuaauugaagcagaacucaaguguuuugggaauacagcuguggcaaaaugcaaugagaagcaugaugaggaguuuugugacaugcugagauuguuugauuucaacaagcaagcaauccguagguugaaggcucccgcccagaugaguauucaauuaauaaauaaagccgugaaugccuuaaucaaugaucaauuaaucaugaagaaccauuuaagagacaucaugugcauucccuacugcaauuacagcaaguauugguaccuuaaucauacuaguagcgggagaacaucacuaccaaaguguuggcuuauauccaaugggucauaucuaaaugaaacccaguucucugaugacauagaacagcaagccgacaauaugaucacagagaugcuucagaaagaauacauugaaagacaagggaaaacgcccuugggacuaguggacauuuucaucuuuagcacaagcuuuuaucugaucagcauuuucuugcauuuaauuaaaaucccuacacaucgacacaucguugggaaacccugucccaaaccccauagacuaaaucacaugggaguauguuccuguggacuguacaaacacccugguguuccaacaaaguggaagagauagggacuaguuauaagacugacuagcccgaugggccucccaacgggcccuccuccccuccuugcaccgagauuaauaaaaaaaaaaaaaaaaaaaaaaaaaaaaaaaaaaaaaaaaaaaaaaaaaaaaaaaaaaaaaaaaugcaucccccccccccccccccccccccccccccccaaaggcucuuuucagagccaccagaauu

SEQ ID NO: 7261 - RNA, 1690 nt, Artificial Sequence
  mRNA product Design i-3 comprising derived and/or modified sequence from LASV(803213;Clade II)__AAF86703__GPCstabilized (wt)
gggagaaagcuuaccauggggcaaaucauaacauucuuccaagaggugccucaugucauagaggaggucaugaacauuguccuaauugcccucagucuccuggcgauacuaaaggggauuuacaauguugcuaccuguggucucuuuggguugaucuccuuucuucucuuauguggcagaucauguucaguaaccuauaaagguguuuaugagcuacaaacucuagaacugaacauggcaaaccuuaauaugacgaugcccuugucuuguacgaagaacaacagccaucauuacaucaugguuggaaaugaaacaggccuagagcugaccuuaacaaacacaagcaucauuaaccacaaguuuugcaaccuuucugaugcacauaaaaagaaucucuaugaccaugcucugaugagcaucaucucaacuuuccacuuaucuauuccaaacuuuaaucaguaugaagcaaugaguugugacuucaauggagggaaaauaaguguucaguacaaccucagucacuccuuugcuguggaugcagccaaccacugugggaccauugccaaugguguucugcagaccuuuaugaggauggcuugggguggcaguuacauagcacuugauuccggaugcgggaacugggauuguauaaugacuuccuaucaauacuugauaauucaaaacaccacuugggaagaucacugccaguuuucucgcccaucuccuauugguuacuuaggacuauugucacagagaacuagagauaucuauaucagucgaagacgccggggaacuuucacuuggacccuuucugauucugaagguaaugaagcaccugguggguauugucuaacuagauggauguuaauugaagcagaacugaaaugcuuugggaacacagcaguugcaaagugcaacgaaaaacaugaugaagaauuuugugacauguugagauuguuugauuucaacaaacaagcuauaaagaggcugaaaacacccgcacagaugaguauucagcugauaaacaaggcagugaaugcauuaaucaaugaccaacugauuaugaagaaccaucuaagggacaucaugugcauuccuuauugcaacuacaguagauauugguaucuaaaucacacugugacagggaagacaucacugccaagauguuggcuugugucaaaugguuccuaccuaaacgaaacacauuuuucugaugacauugaacaacaagcagacaacaugauaacagaaauguugcagaaagaguacauggacaggcaggggaaaacaccuuuaggguuaguggaccuuuuugucuuuagcacuagcuuuuaccucauaagcaucuuucuccaucuggucaagaucccaacucacaggcacaucguggggaaaccuugcccuaagccacacagacucaaccacaugggcaucugcucauguggucuguauaaacaucccgguguuccaguaaaauggaagagauaaggacuaguuauaagacugacuagcccgaugggccucccaacgggcccuccuccccuccuugcaccgagauuaauaaaaaaaaaaaaaaaaaaaaaaaaaaaaaaaaaaaaaaaaaaaaaaaaaaaaaaaaaaaaaaaaugcaucccccccccccccccccccccccccccccccaaaggcucuuuucagagccaccagaauu

SEQ ID NO: 7262 - RNA, 1690 nt, Artificial Sequence
  mRNA product Design i-3 comprising derived and/or modified sequence from LASV(GA391;Clade III)__CAA36645__GPCstabilized (wt)
gggagaaagcuuaccaugggacagauugugacauucuuccaagaaguuccucauguuauugaggaagugaugaauauuguccuuauugcacuauccauccuagcaauucugaagggacuauacaauguugccacguguggcuugauagggcuugucacauuccuucuacuuucaggaaggucaugcucacugaucuacaaagggacuuacgagcugcaaacccuugaguugaauauggagacucuuaauaugaccaugccgcuauccugcacaaagaacaacagucaucauuauauaaggguggggaaugagacaggacuugagcucaccuugaccaacaccagcauucuuaaucacaaauucuguaaccucucugaugcccacaaaaggaaucuuuaugaucacagccucaugaguaucaucucuaccuuucaucuguccauucccaacuucaaucaauaugaggcaaugagcugcgauuucaauggggggaaaaucacugugcaauacaaccugagucauagcuucgcaguggaugcagcaggucacugcggcacacuugcaaauggugucuuacaaacauuuaugagaauggcuuggggagggaguuauauugcucuugauucuggaugcgguaacugggacuguauaaugaccaguuaccaauaucuaaucauucagaauacaaccugggaugaccacugccaauuuuccagaccaucaccuauuggcuaccuugggcuucucucacaaagaacuagagacauauacauuagcagaaggcgccgggggacauucaccuggacacuaucagacucagagggaaaugaaacaccagggggauacugccuuacuagauggauguugauugaggccgaauuaaagugcuuuggaaacacugcaguagccaagugcaaugagaaacaugaugaagaauuuugugacaugcuaagguuguucgauuucaacaaacaggccauaaggaggcucaaaacacccgcccaaaugagcauacagcugaucaacaaggcugucaaugcuuuaauaaaugaucagcucaucaugaagaaccacuugagagacaucaugugcauaccauauuguaacuacagcagauauugguaccuuaaccacacaucaacaggaaagaccucacuaccaagguguuggcuuaucucaaauggaucauaucucaaugagaccaaguuuucagaugacaucgaacaacaagcugacaacaugauaacagagaugcuacaaaaggaauacauagauagacagggcaaaacuccacugggguuaguugaccuauuuguuuuuagcacaaguuucuaucugauaagcaucuuucuccaccuggucaaaauaccaacccauagacacauuguagguaaaccuugcccaaaaccccacaggcugaaccacaugggcaucugcuccuguggucuauacaaacagccaggugugccugucagauggaagaggugaggacuaguuauaagacugacuagcccgaugggccucccaacgggcccuccuccccuccuugcaccgagauuaauaaaaaaaaaaaaaaaaaaaaaaaaaaaaaaaaaaaaaaaaaaaaaaaaaaaaaaaaaaaaaaaaugcaucccccccccccccccccccccccccccccccaaaggcucuuuucagagccaccagaauu

SEQ ID NO: 7263 - RNA, 1693 nt, Artificial Sequence
  mRNA product Design i-3 comprising derived and/or modified sequence from LASV(AV;Clade V)__CCA30314__GPCstabilized (wt)
gggagaaagcuuaccauggggcaaauagugacauucuuucaagaggugccucaugugauagaagaggugaugaacauuguucuuauagcauugucuauauuggcaguguugaaaggucucuacaacauugccacaugcggccucaucggcuugaucacuuuccucuuauuauguggaaggucuugcucauccaaccucuacaagggggucuaugaacuucaaucucuggaccugaacauggagacacucaacaugaccaugccccucuccugcacaaagaacaauagucaucacuacauaaggguuggcaaugacacagggcuggaacugaccuugaccaacacgagcauacucaaucacaaauucugcaaccuaucagaugcucacaagaaagaccuauaugaucacgcacucaugagcauaaucucaacuuuccaccugucuauacccaauuucaaccaauacgaagcaaugaguugugacuucaaugggggcaaaaucagugugcaguacaaucuaagccauucuuaugcuauagaugcagcuaaucauugcggcacagucgcgaauggcaucuugcagacuuucaugagaauggcauggggugggagcuauauugcucuugacucaggcugcggaaacugggacuguauuaugacuagcuaucaauaucugauuauucagaacacaaccugggaaaaucacugucaguucucaagaccaucuccuauugguuaucuuggucuccucucacagaggacuagagacauuuacauuagcaggaggcgccggggcacauucacguggacacugucagacucugaggguaaugcuacaccaggagguuauugucugaccagguggauguuaauugaagcugaguugaaaugcuuuggaaacacagcaguagcaaaguguaaugaaaagcaugaugaagaauuuugcgacaugcucagacuuuuugauuuuaauaagcaggcuauaaguagauugaaaucucccgcacaaaugagcauccaacugaucaacaaagcagugaaugcuuugaucaacgaucaauuaauuaugaagaaccacuugcgagacaucaugugcauuccauauuguaauuacagcaaguauugguaccucaaucauacaauaacuggcaaaaccucauuaccuaaauguuggcuuguaucuaaugguucauacuugaaugaaacccauuuuucugacgacaucgagcaacaagcugacaauaugaucacagagaugcuacaaaaggaauacauggagaggcaagggaaaacgccuuuggguuuaguugaucuguuuguguuuagcacaaguuuuuaucuaauuaguaucuuccuccgacuagucaagauuccaacccauagacacauugugggcaaaccauguccuaagccccacagguugaaccacaugggcauuuguucuugcggcuuauacaagcagccuggcguccccgugagauggaagagauagggacuaguuauaagacugacuagcccgaugggccucccaacgggcccuccuccccuccuugcaccgagauuaauaaaaaaaaaaaaaaaaaaaaaaaaaaaaaaaaaaaaaaaaaaaaaaaaaaaaaaaaaaaaaaaaugcaucccccccccccccccccccccccccccccccaaaggcucuuuucagagccaccagaauu

SEQ ID NO: 7264 - RNA, 1690 nt, Artificial Sequence
  mRNA product Design i-3 comprising derived and/or modified sequence from LASV(Togo/2016/7082;Clade VI)__AMR44577__GPCstabilized (wt)
gggagaaagcuuaccauggggcaaauaauaaccuucuuccaggagguuccucauguuauagaggaggugaugaacauuguucugauagcacucucacuccuagcuauccugaaaggggucuacaauguggcaacaugugggauaauugggcuugugaccuuccucuuucucuguggaagaucuuguucacugaucuacaaaggcaguuaugagcugcaaacauuggaguuaaauauggagacccuaaacaugaccaugccucugucaugcacuaaaaauaguagccaccauuauauucgaguugggaacgagacuggcuuagagcugacauugaccaacaccagcauuauaaaucacaaauucuguaaccugucagaugcucacaaacguaaucuguaugaccacgcacucaugagcauccuuuccacauuccaucuguccaucccaaacuucaaccaguaugaggcgaugaguugugacuucaauggaggcaaaaucagugugcaauauaaucucagccaugcuuaugcaguugaugcugccgaacacugcggaacaguugcaaauggugugcuacaaacauucaugaggauggcuuggggaggaaguuacauugcacuugacucugggugcggcaauugggacuguauuaugacaagcuaccaauacuuaaucauucagaauacaacaugggaagaucacugccaauuuucaagaccuucuccuauugguuaucucggcuuauugucacaaagaacaagagacauuuauaucaguaggaggcgccgggguacauucaccuggacacuuucugacucagagggaaaugagacaccaggcggauacuguuuaacaagauggaugcugauagaggcugagcuaaaauguuuuggaaacacagcuguugcaaaguguaaugagaagcaugaugaggaauucugcgacauguuaagguuguuugacuucaacaaacaggcaauucagaggcucaaaucacccgcacaaaugagcauccaguuaauaaauaaagcagugaaugcauugauaaaugaucagcucauuaugaagaaccacuuaagggauaugaugugcauaccguauugcaacuacaguaaguauugguaucucaaucacaccucaucagggagaacaucguugccuaaaugcuggcuuguuuccaauggaaguuaucugaaugagacccacuucucagaugauauugaacaacaggcagacaacaugauaacugaaauguuacaaaaggaauauaucgauaggcaggguaaaacaccuuuaggacuuguugaccuuuuuguuuucagcacgaguuuuuaccuuauaaguauauucuuacacuugauaaagauaccuacucauaggcacauaguuggaaagccaugccccaagccacaccgccucaaccacauggggaucugcucuuguggacuauacaagcagccuggugucccaaccagauggaagagauaaggacuaguuauaagacugacuagcccgaugggccucccaacgggcccuccuccccuccuugcaccgagauuaauaaaaaaaaaaaaaaaaaaaaaaaaaaaaaaaaaaaaaaaaaaaaaaaaaaaaaaaaaaaaaaaaugcaucccccccccccccccccccccccccccccccaaaggcucuuuucagagccaccagaauu

SEQ ID NO: 7265 - RNA, 1690 nt, Artificial Sequence
  mRNA product Design i-3 comprising derived and/or modified sequence from LASV(KAK-428;Clade n.d. (VII))__ANH09740__GPCstabilized (wt)
gggagaaagcuuaccaugggucaaauagugaccuucuuccaggaaguaccucauguuauagaggaagugaugaacauaguucugauagcacuuucucucuuagccauccugaagggccucuacaauuuugccaccuguggaguaauuggacugauaacauuccuuuuacuuuguggaagauccuguucagcgaccuacaaaggccaauaugaacuccaaacuuuagaacuaaauauggagucccuaaacaugaccaugccacugucuugcacaaaaaacaacagucaucauuauaucagagcuggcaacaacacaggccuggaguugacccucaccaacaccagcauuauaucucauaaauucugcaaccuuucugaugcucacaagaagaaccuuuaugaccacacucuuaugaguauaauaacuaccuuucauuuguccaucccaaauuucaaccaguaugaggcaaugaguugugacuuuaacggugggaaaaucagcauacaguacaaccucagucacuccuacgcuggugaugcugcgcaacacuguggaacaguugcaaauggggugcugcaaaccuuuaugagaauggcuuggggagguaguuaucuggcccuugauucaggaugcagagguugggacugcauaauuuccaguuaccaauacuugaucauccaaaacacaacuugggaugaccauugccaguuuucaaggccauccccgaucggguaucuuggguuuguaucgcagaagaccagggacaucuauauaaguagaagacgccggggaacuuuuacauggacacuuucagacuccgagggacaugacaugccaggugguuacugcuugaccagauggaugcucauugaagcugauuuaaaguguuuuggaaacacagcugucgcuaaguguaaugagaaacaugacgaggaguucugugacauguggagguuguuugacuuuaauaagcaagccauucaaaggcucaaagcacccgcccagaugaacauccagcucauaaauaaagcugucaaugcucucauaaaugaccaauugaugaugaaaaaccauuuaagggauaucaugugcauucccuauugcaauuacaguaaauucugguaucucaauaacaccacgacugggagaaccucacugccaagaugcuggcugauuucaaauggguccuacuuaaaugagacucacuucucagaugauauugaacagcaagcugacaauaugauaacugagauguugcagaaagaauacauggacagacaaggaaaaacaccgcuaggacugguugaucucuuuguauucaguacaagcuuuuaccucauuaccauuuucuuacaucuugugaaaauaccaacccacagacacauaguuggcaagccgugcccuaaaccacacagacugaaucacaugggcaucugcuccugugggcucuacaaacagccuggugugccaguacgauggaagagaugaggacuaguuauaagacugacuagcccgaugggccucccaacgggcccuccuccccuccuugcaccgagauuaauaaaaaaaaaaaaaaaaaaaaaaaaaaaaaaaaaaaaaaaaaaaaaaaaaaaaaaaaaaaaaaaaugcaucccccccccccccccccccccccccccccccaaaggcucuuuucagagccaccagaauu

SEQ ID NO: 7266 - RNA, 1690 nt, Artificial Sequence; identical to SEQ ID NO: 7260
  mRNA product Design i-3 comprising derived and/or modified sequence from LASV(Pinneo-NIG-1969;Clade I)__AIT17836__GPCstabilized (wt)

SEQ ID NO: 7267 - RNA, 1690 nt, Artificial Sequence
  mRNA product Design i-3 comprising derived and/or modified sequence from LASV(ISTH0009-NIG-2011;Clade II)__AIT17404__GPCstabilized (wt)
gggagaaagcuuaccaugggacaaaucauaacauuuuuccaggaaguaccucaugucauagaggaagugaugaacauuguccugauugcucucagccuucuggcaauacugaaggggaucuacaauguugccaccuguggccuauuuggacugguguccuuucuccucuuaugugggagaucaugcucaacaacuuauaaggguguuuaugagcuacaaacucuagagcuggacauggcaagccuuaauaugacaaugccccuaucuugcacaaagaacaacagucaccauuacaucauggucggaaaugagacuggcuuggagcugacuuuaacaaauacaaguauuaucaaccacaaguuuuguaaccuuucugaugcacauaaaaagaaucucuaugaccaugcuuuaaugaguaucaucucaaccuuccacuuaucuauuccuaauuuuaaucaguaugaagcaaugaguugugacuucaauggggggaagauaaguguucaguacaaccuuagccacgcuuaugcuguagaugcagccaaucacugugggacuaucgccaauggcguucuucagacuuuuaugaggauggcuugggguggcaguuacauagcacuugauuccggaugcgggaguugggauuguauaaugacuuccuaccaauauuugauaauccagaacaccacuugggaagaucacugccaguuuucucgcccauccccuaucgguuaucuggggcuacugucacaaaggaccagagacauuuacaucagucgaagacgccgggggacuuuuacuuggacucucucugauucugaagguaaugaaacaccggguggguacugucuaacaagauggaugcugauugaggccgaguugaagugcuuugggaacacagcaguugcgaaaugcaaugagaaacaugaugaagaguuuugugacauguuaagacuguuugauuucaacaaacaagcuauaaggaggcuaaagacacccgcacagaugaguauccaacugauaaacaaagcagugaaugcauugaucaaugaccagcuuauuaugaagaaucacuugagagauaucaugugcauuccuuacugcaauuacagcaaguacugguaucuaaaucacacuguaacagggaagacaucguugccaaggugcuggcuugugucaaaugguuccuaccugaaugagacacauuuuucugaugacauugaacaacaggcagacaacaugauaacagaacuguugcaaaaggaguacauggacaggcaagggaaaacacccuuaggguuaguagaucuuuuugucuucagcaccagcuuuuaucucauuagcaucuuccuccaccugaucaaaaucccaacccacagacauaucacagggaaacccugcccuaaaccacacagacuuaaccacaugggcauaugcucauguggucuauacaaacauccugguguaccagucaaguggaaaagauagggacuaguuauaagacugacuagcccgaugggccucccaacgggcccuccuccccuccuugcaccgagauuaauaaaaaaaaaaaaaaaaaaaaaaaaaaaaaaaaaaaaaaaaaaaaaaaaaaaaaaaaaaaaaaaaugcaucccccccccccccccccccccccccccccccaaaggcucuuuucagagccaccagaauu

SEQ ID NO: 7268 - RNA, 1690 nt, Artificial Sequence
  mRNA product Design i-3 comprising derived and/or modified sequence from LASV(ISTH2010-NIG-2012;Clade II)__AIT17482__GPCstabilized (wt)
gggagaaagcuuaccaugggacaaaucauaacauuuuuccaggaaguaccucaugucauagaggaagugaugaacauuguccugauugcucucagccuucuggcaauauugaaggggaucuacaauguugcuaccuguggccucuuuggauugguguccuuccuccucuuauguggaaggucauguucaacaacuuacaaggguguuuaugagcuacaaacucuggagcuagacauggcaagccuuaauaugacaaugcccuuaucuugcacgaagaacaacagccaccauuacaucauggucggaaaugaaacuggcuuggagcuaacuuuaacaaauacaaguaucaucaaccacaaauuuuguaaccucucugaugcacauaagaagaaucuuuaugaucaugcuuuaaugaguaucauuucaaccuuccacuuauccauuccuaacuuuaaucaguaugaagcaaugagcugugacuucaaugggggaaagauaaguguucaguacaaccuuagccacgcuuaugcuguagaugcagccaaccacugugggaccaucgccaauggcguucuucagacuuuuaugaggauggcuugggguggcagcuauauagcacuugauuccggaugcgggaguugggauuguauaaugacuuccuaccaauauuugauaauccaaaacaucacuugggaagaucacugccaguuuucucgcccauccccuaucgguuaccuagggcuacugucacaaaggaccagggacauuuacaucagucgaagacgccgggggacuuuuacuuggacucucucugauucugaagguaaugaaacaccggguggguauugccuaacaagauggaugcugauugaagccgaguugaaaugcuuugggaacacagcaguugcgaaaugcaaugagaaacaugaugaagaguuuugugacauguuaagauuguuugacuuuaacaaacaggcuauaaggaggcuaaagacacccgcacagaugaguauccaacugauaaacaaagcagugaacgcacugaucaaugaccagcugauuaugaagaaucauuugagagauaucaugugcauuccuuacugcaauuacagcaaguacugguaucuaaaucauacuguaacagggaagacaucguugccaaggugcuggcuugugucaaaugguuccuaccugaaugagacacauuuuucugaugacauugaacaacaggcagacaacaugauaacagaacugcugcaaaaggaguacauagacaggcaagggaaaacaccuuuaggguuaguagaucuuuuugucuucagcaccagcuuuuaucucauuagcaucuuccuccaccugguuaaaaucccaacccacagacaugucguaggaaaacccugcccuaaaccacacagacucaaccacaugggcauauguucauguggucuauacaaacauccuggugugccagucaaguggaaaagauagggacuaguuauaagacugacuagcccgaugggccucccaacgggcccuccuccccuccuugcaccgagauuaauaaaaaaaaaaaaaaaaaaaaaaaaaaaaaaaaaaaaaaaaaaaaaaaaaaaaaaaaaaaaaaaaugcaucccccccccccccccccccccccccccccccaaaggcucuuuucagagccaccagaauu

SEQ ID NO: 7269 - RNA, 1690 nt, Artificial Sequence
  mRNA product Design i-3 comprising derived and/or modified sequence from LASV(Lassa virus/H.sapiens-wt/NGA/2015/ISTH_0543;Clade II)__AVO03639__GPCstabilized (wt)
gggagaaagcuuaccaugggacaaaucauaacauuuuuccaggaagugccucaugucauagaggaaguaaugaacauuguccugauugcucucagccuucuggcaauauugaaggggaucuacaauguagccaccuguggccuuuuuggacugguguccuuucuccucuuauguggaagaucaugcucaacaacuuauaagggugucuacgagcuacaaacucuagagcuggacauggcaaaccuuaauaugacaaugccccuaucuugcacaaagaacaacagucaccauuacaucauggucggaaaugaaacuggcuuggagcugacuuuaacaaauacaaguauuaucaaccacaaguuuugcaaccuuucugaugcacauaaaaagaaucucuaugaccaugcuuuaaugaguaucaucucaaccuuccacuuaucuauuccuaauuuuaaucaguaugaagcaaugaguugugacuucaauggagggaagauaaguguucaguacaaccuuagccacacuuaugcuguagaugcagccaaucacugugggacuaucgccaauggcguucuucagacuuuuaugaggauggcuugggguggcaguuacauagcacuugauucuggaugcgggaguugggauuguauaaugacuuccuaccaauaucugguaauccagaacaccacuugggaagaucacugccaauuuucucgcccauccccuaucgguuaucuggggcuacugucacaaaggaccagagacauuuacaucagucgaagacgccgggggacuuucacuuggacucucucugauucugaagguaaugaaacaccggguggguacugucuaacaagauggaugcugauugaggccgaguugaagugcuuugggaacacagcaguugcgaaaugcaaugagaaacaugaugaagaguuuugugacauguuaagacuguucgauuuuaacaaacaagcuauaaggaggcugaagacacccgcacagaugaguauccaacuaauaaacaaagcagugaaugcauugaucaaugaccagcuuauuaugaagaaucacuuaagagauaucaugugcauuccuuacugcaauuacagcaaguacugguaucuaaaucacacugugacagggaagacaucguugccaaggugcuggcuuguaucaaaugguuccuaccugaaugagacacauuuuucugaugauauugaacaacaggcagacaacaugauaacagaacuguugcaaaaggaauacauagacaggcaagggaaaacacccuuaggguuaguagaucuuuuugucuucagcaccagcuuuuaucucauuagcauuuuccuccaccuggucaaaaucccaacucacagacauaucacagggaaacccugcccuaaaccacacagacuuaaccacaugggcauaugcucauguggucuauacaaacauccugguguaccagucaaguggaaaagauagggacuaguuauaagacugacuagcccgaugggccucccaacgggcccuccuccccuccuugcaccgagauuaauaaaaaaaaaaaaaaaaaaaaaaaaaaaaaaaaaaaaaaaaaaaaaaaaaaaaaaaaaaaaaaaaugcaucccccccccccccccccccccccccccccccaaaggcucuuuucagagccaccagaauu

SEQ ID NO: 7270 - RNA, 1690 nt, Artificial Sequence
  mRNA product Design i-3 comprising derived and/or modified sequence from LASV(Lassa virus/H.sapiens-wt/NGA/2016/ISTH_0009;Clade II)__AVO03571__GPCstabilized (wt)
gggagaaagcuuaccaugggacaaaucauaacauuuuuccaggaaguaccucaugucauagaggaagugaugaacauuguccugauugcucucagccuucuggcaauacugaaggggaucuacaauguugccaccuguggccuccuuggacugguguccuuucuccucuuauguggaaggucaugcucaacaacuuauaaggguguuuaugagcuacaaacucuagagcuggacauggcaagccuuaauaugacaaugccccugucuugcacaaagaacaacagucaccauuacaucauggucggaaaugagacuggcuuggagcugacuuuaacaaauacaaguauuaucaaccacaaguuuuguaaccuuucugaugcacauaaaaagaaucucuaugaccaugcucuaaugaguaucaucucaaccuuccacuuaucuauuccuaauuuuaaccaguaugaagcaaugaguugugacuucaauggggggaggauaaguguucaguacaaccuuagccacucuuaugcuguagaugcagccaaucacugugggacuaucgccaauggcguucuucagacuuucaugaggauggcuugggguggcaguuacauagcacuugauuccggaugcgggaguugggauuguauaaugacuuccuaccaauacuugauaauccagaacaccacuugggaagaucacugccaguuuucucgcccauccccuaucgguuauuuggggcuacugucacagaggaccagagacauuuacaucagucgaagacgccgggggacuuuuacuuggacucucucugauucugaagguaaugaaacaccggguggguacugucuaacaagauggaugcugauugaggccgaguugaagugcuuugggaacacagcaguugcgaaaugcaaugagaaacaugaugaagaguucugugacauguuaagacuguuugauuuuaauaaacaagccauaaggaggcugaagacacccgcacagaugaguauccaacugauaaacaaagcagugaaugcauugaucaaugaccagcuuauuaugaagaaccacuugagagauaucaugugcauuccuuacugcaauuacagcaaguacugguaucuaaaucacacuguaacagggaagacaucguugccaaggugcuggcuugugucaaaugguuccuaccugaaugagacacauuuuuccgaugacauugaacaacaggcagacaacaugauaacagaauuguugcagaaggaguacauagacaggcaagggaaaacacccuugggguuaguagaucuuuuugucuucagcaccagcuuuuaucucauuagcaucuuccuccaccuggucaaaauuccaacccacagacauaucacagggaaacccugccccaaaccacacagacuuaaccacaugggcauaugcucauguggucuauacaaccauccuggugugccagucaaguggaaaagauagggacuaguuauaagacugacuagcccgaugggccucccaacgggcccuccuccccuccuugcaccgagauuaauaaaaaaaaaaaaaaaaaaaaaaaaaaaaaaaaaaaaaaaaaaaaaaaaaaaaaaaaaaaaaaaaugcaucccccccccccccccccccccccccccccccaaaggcucuuuucagagccaccagaauu

SEQ ID NO: 7271 - RNA, 1690 nt, Artificial Sequence
  mRNA product Design i-3 comprising derived and/or modified sequence from LASV(Lassa virus/H.sapiens-wt/NGA/2016/ISTH_0017;Clade II)__AVO03567__GPCstabilized (wt)
gggagaaagcuuaccaugggacaaaucauaacauuuuuccaggaaguaccucaugucauagaggaagugaugaacauuguccugauugcucucagccuucuggcaauacugaaagggaucuacaauguugcuaccuguggccucuuuggguugguguccuuccuccucuuaugugggagaucaugcucaacaacuuacaaggguguuuaugagcuacaaacucuagagcuagacauggcaagccuuaauaugacaaugcccuuaucuugcacgaagaacaauucccaccauuacaucauggucggaaaugagacuggcuuggagcugacuuuaacaaauacaagcauuaucaaccacaaguuuuguaaccuuucugaugcacauaaaaagaaucuuuaugaccaugccuuaaugagcaucauuucaaccuuccacuuauccauuccuaacuuuaaucaguaugaagcaaugaguugugacuucaaugggggaaaaauaaguguucaguacaaccuuagccauacuuaugcuauagaugcagcuaaccacugugggaccauugccaauggcguucuucagacuuuuaugaggauggcuugggguggcaguuacauagcacuugauuccggaugcggcagcugggacugcauuaugacuuccuaccaauauuugauaauccagaacaccacuugggaagaucacugccaguuuucucgcccaucccccaucgguuaucuggggcuacugucacaaaggaccagagacauuuacaucagucgaagacgccgggggacuuuuacauggacccucucugacucugaagguaaugaaacaccagguggguacugucuaacgagauggaugcugauugaggccgaguugaagugcuuugggaacacagcaguugcaaaaugcaaugagaaacaugaugaagaguuuugugauauguuaagauuauuugacuuuaacaaacaagcuauaaggaggcugaagacacccgcgcagaugaguauccaacugauaaacaaagcagugaacgcacugaucaaugaccagcugauuaugaagaaucauuuaagagauaucaugugcauuccuuacugcaauuacagcaaguauugguaucuaaaucacacuguaacagggaagacaucauuaccaagaugcuggcuugugucgaaugguuccuaccugaaugagacacauuuuucugaugacauugaacaacaagcagauaacaugauaacagaacuuuugcaaaaggaauauauggauaggcaagggaaaacacccuuaggguuaguagaucuuuuugucuucagcaccagcuuuuaucucauuagcaucuuccuccaccuggucagaaucccaacucacagacaugucauagggaaacccugcccuaaaccacacagacucaaccacaugggcauaugcucauguggucuguacaaacauccuggugugccagucaaauggaaaagauagggacuaguuauaagacugacuagcccgaugggccucccaacgggcccuccuccccuccuugcaccgagauuaauaaaaaaaaaaaaaaaaaaaaaaaaaaaaaaaaaaaaaaaaaaaaaaaaaaaaaaaaaaaaaaaaugcaucccccccccccccccccccccccccccccccaaaggcucuuuucagagccaccagaauu

SEQ ID NO: 7272 - RNA, 1690 nt, Artificial Sequence
  mRNA product Design i-3 comprising derived and/or modified sequence from LASV(Lassa virus/H.sapiens-wt/NGA/2018/ISTH_0959;Clade II)__AVV65099__GPCstabilized (wt)
gggagaaagcuuaccaugggacaaaucauaacauuuuuccaggaaguaccucaugucauagaggaagugaugaacauuguccugauugcucucagccuuuuggcaauacugaaggggaucuacaauguuguuaccuguggccucuuuggauugguguccuuccuccucuuauguggaagaucauguucaacaacuuacaaggguguuuaugagcuacaaacucuggagcuggacauggcaagccuuaauaugacaaugcccuuaucuugcacgaagaacaacagccaccauuacaucauggucggaaaugagacuggcuuggagcugacuuuaacaaauacaaguaucaucaaccauaaauuuuguaaccucucugaugcacauaaaaagaaucuuuaugaucaugcuuuaaugaguaucauuucaaccuuccacuuauccauuccaaacuuuaaucaguaugaagcaaugagcugugacuucaaugggggaaagauaaguguucaguacaaccuuagccacgccuaugcuauagaugcagccaaccacugcgggacuauugccaauggcguucuucaaacuuuuaugaggauggcuugggguggcagcuauauagcacuugauuccggaugcgggaguugggacuguauaaugacuuccuaccaguauuugauaauccaaaacaccacuugggaagaucauugucaguuuucucgcccauccccuaucgguuaccuagggcuacugucacaaaggaccagggacauuuacaucagucgaagacgccgggggacuuuuacuuggacucucucugauucugaagguaaugaaacaccggguggguauugucuaacaagauggaugcugauugaggccgaguugaaaugcuuugggaacacagcaguugcgaaaugcaaugagaaacaugaugaagaguuuugugacauguuaagauuguuugacuuuaacaaacaagcuauaaggaggcuaaagacacccgcacagaugaguauccagcugauaaacaaagcagugaacgcacugaucaaugaccagcugauuaugaaaaaucauuugagagauaucaugugcauuccuuacugcaauuacagcaaguacugguaucuaaaucauacuguaacagggaagacaucguugccaaggugcuggcuugugucaaaugguuccuaccugaaugagacacauuuuucugaugacauugaacaacaagcagacaauaugauaacagaacugcugcaaaaggaguacauagacaggcaagggaaaacaccuuuaggguuaguagaucuuuuugucuucagcaccagcuuuuaucucauuagcaucuuccuccaccugguuaaaaucccaacccacagacaugucauaggaaaacccugcccuaaaccacacagacuuaaucacaugggcauauguucauguggucuauacaaacauccuggugugccagucaaguggaaaagauagggacuaguuauaagacugacuagcccgaugggccucccaacgggcccuccuccccuccuugcaccgagauuaauaaaaaaaaaaaaaaaaaaaaaaaaaaaaaaaaaaaaaaaaaaaaaaaaaaaaaaaaaaaaaaaaugcaucccccccccccccccccccccccccccccccaaaggcucuuuucagagccaccagaauu

SEQ ID NO: 7273 - RNA, 1690 nt, Artificial Sequence
  mRNA product Design i-3 comprising derived and/or modified sequence from LASV(LASV003-NIG-2008;Clade II)__AIT17580__GPCstabilized (wt)
gggagaaagcuuaccauggggcaaaucauaacauuuuuccaggaagugccucaugucauagaagaagugaugaacauuguccugauugcccucagccuuuuggcaauauugaaagggaucuacaauguugcuacuuguggccucuuuggacugguguccuuucuucucuuauguggaagaucaugcucaacaacuuacaaagguguuuaugagcuacaaacucuagagcuagacauggcaagccuuaauaugacaaugcccuuaucuugcacaaagaauaauagccaccauuacaucauggucggaaaugaaacuggcuuagagcugacuuuaacaaauacaaguaucaucaaccacaaguuuuguaaccuuucugaugcacauaaaaagaaucuuuaugaccaugcuuuaaugagcaucaucucaaccuuccacuuauccauuccuaacuuuaaucaauaugaagcaaugaguugugacuucaauggggggaagauaaguguucaguacaaccuuagccacacuuaugcuguagaugcagcuaaccacugugggacuauugccaauggcguucuucagacuuucaugaggauggcuugggguggcagcuacauagcacuugauuccggaugcgggaguugggauuguauaaugacuuccuaccaauaucugauaauccagaacaccacuugggaagaucauugccaguuuucucgcccaucccccaucgguuaucuggggcuacugucacaaaggaccagggacauuuacaucagucgaagacgccgggggacuuuuacuuggacccucucugauucugaaagcaaugaaacuccagguggguauugucuaacaagguggauguugauugaggccgagcugaagugcuuugggaacacagcaguugcgaaaugcaaugaaaaacaugaugaagaguuuugugacaugcuaagauuguuugacuuuaacaaacaagcuauaaggaggcugaaagcacccgcacagaugagcauccaacuaauaaacaaagcagugaaugcacugaucaaugaccagcugauaaugaagaaucauuuaagagauaucaugugcauuccuuacugcaauuacagcaaauauugguacuugaaucacacuguaacagggaggacaucguuaccaagaugcuggcuugugucaaaugguuccuaccugaaugagacacauuuuucugacgacauugaacaacaagcagacaauaugauaacagaacuguugcagaaggaguacauggacaggcaagggaaaacaccuuuaggguuaguagaucuuuuugucuucagcaccagcuuuuaucucaucagcaucuuccuccaccugguuaaaaucccaacccacagacaugucauagggaaacccugcccuaaaccacacagacucaaccacaugggcauaugcucauguggucuguacaaacauccuggugugccagucaaguggaaaagauagggacuaguuauaagacugacuagcccgaugggccucccaacgggcccuccuccccuccuugcaccgagauuaauaaaaaaaaaaaaaaaaaaaaaaaaaaaaaaaaaaaaaaaaaaaaaaaaaaaaaaaaaaaaaaaaugcaucccccccccccccccccccccccccccccccaaaggcucuuuucagagccaccagaauu

SEQ ID NO: 7274 - RNA, 1690 nt, Artificial Sequence
  mRNA product Design i-3 comprising derived and/or modified sequence from LASV(LASV035-NIG-2009;Clade II)__AIT17588__GPCstabilized (wt)
gggagaaagcuuaccauggggcaaaucauaacauuuuuccaggaagugccucaugucauugaggaggugaugaacauugucuuaauugcucucagucuucuagcaauacugaaagggauuuacaauguugcuaccuguggccucuuuggguugguguccuuucuucucuuauguggaaggucaugcucaacaacuuacaaggguguuuaugagcuucaaacucuagagcuggauauggcaagccuuaauaugacaaugcccuuauccugcacgaagaacaacagccaccacuacaucaugguuggaaaugagacuggcuuggagcugacuuugacaaacacaaguaucaucaaccacaaguucugcaaccuuuccgaugcacauaaaaagaaucucuaugaccaugcuuuaaugagcaucaucucaacuuuccaccuauccaucccuaacuuuaaucaguaugaagcaaugaguugugacuucaauggggggaagauaaguguucaguacaaccucagccacgcuuaugcuguagaugcagcuaaccauugugggaccauugccaauggaguucuucaaacuuuuaugaggauggcuugggguggcaguuacauagcacuugauucuggaugcgggaguugggauuguauaaugacuuccuaccaauauuugauaauccaaaacaccacuugggaagaucacugccaguuuucucgcccauccccuauugguuaucuggggcuacugucacaaagaaccagggauauuuacaucagccgaagacgccggggaacuuuuacuuggacucucucugauucugaaggcaaugaaacaccggguggauauuguuuaacaagauggaugcugauugaggccgaauuaaagugcuuugggaacacagcaguugcgaaaugcaaugagaaacaugaugaagaguuuugugacauguuaagguuguuugacuuuaacaaacaggcuauaaggaggcuaaaggcacccgcacagaugagcauccaacuaauaaacaaagcagugaacgcacugaucaaugaccagcucauuaugaagaaucauuuaagagauaucaugugcauuccuuacugcaauuacagcaaguauugguauuuaaaucacacuguaacagggaagacaucguugccaagaugcuggcuuguaucaaaugguuccuaccugaaugaaacacauuuuucugaugacauugaacaacaagcagauaacaugauaacagaauuguuacagaaagaguacauugacaggcaagggaaaacacccuuaggguugguggaucuuuuugucuucagcacuagcuucuaccuuauuagcaucuuccuccaccugguuaaaaucccaacccacagacaugucauagggaagcccugccccaagccacacagacucaaccacaugggcauaugcucauguggucuguacaaacauccugguguaccagucaaguggaaaagauagggacuaguuauaagacugacuagcccgaugggccucccaacgggcccuccuccccuccuugcaccgagauuaauaaaaaaaaaaaaaaaaaaaaaaaaaaaaaaaaaaaaaaaaaaaaaaaaaaaaaaaaaaaaaaaaugcaucccccccccccccccccccccccccccccccaaaggcucuuuucagagccaccagaauu

SEQ ID NO: 7275 - RNA, 1690 nt, Artificial Sequence
  mRNA product Design i-3 comprising derived and/or modified sequence from LASV(LASV1000-NIG-2009;Clade II)__AIT17782__GPCstabilized (wt)
gggagaaagcuuaccaugggacaaaucauaacauuuuuccaggaaguuccucaugucauagaggaagugaugaacauuguccugauugcucucagccuccuggcaauacuaaaagggaucuacaauguugcuaccuguggccucuuuggauugguguccuuccuccucuuauguggaagaucaugcucaacaacuuacaaggguguuuaugagcugcaaacucuagagcuagacauggcaagccuuaauaugacaaugccucuaucuugcacgaagaauaacagccaccauuacaucauggucggaaaugagacuggcuuggagcugacuuuaacaaacacaaguauuaucaaucacaaguuuuguaaccuuucugaugcacacaaaaagaaucuuuaugaccaugcuuuaaugagcaucaucucaaccuuccauuuaucuauucccaacuucaaucaguaugaagcaaugaguugugacuucaaugggggaaagauaaguguucaguacaaccuuagccacacuuaugcuguagaugcagccaaccacugugggacuaucgccaauggcguccuucagaccuuuaugaggauggcuugggguggcaguuacauagcacuugauuccggaugcgggaguugggacuguauaaugacuuccuaucaauaucugauaauccaaaacaccacuugggaagaucacugccaguuuucucgcccaucuccuaucgguuaucuggggcuacugucacaaaggaccagagacauuuacaucagucgaagacgccgggggacuuucacuuggacucucucugauucugaagguaaugaaacaccggguggguacugucuaacaagguggaugcugauugaggccgaguugaagugcuuugggaacacagcaguugcgaaaugcaaugagaaacaugaugaagaguuuugugacauguuaagauuguuugacuuuaacaaacaagcuauaaagaggcugaagacacccgcacagaugaguauucaacugauaaacaaagcagugaacgcacugaucaaugaccagcugauuaugaagaaucauuugagagacaucaugugcauuccuuacuguaauuacagcaaguauugguaucuaaaucacaccguaacagggaagacaucguugccaaggugcuggcuugugucaaaugguuccuaccugaaugagacacacuuuucugaugacauugaacaacaagcagauaacaugauaacagaacuauugcaaaaggaguacauagacaggcaagggaaaacacccuuaggguuaguagaccuuuuugucuuuagcaccagcuuuuaucucauuagcaucuuccuccaccuggucaaaaucccaacccauagacaugucguagggaaacccugcccuaaaccacacagacucaaccacaugggcauaugcucauguggucuauacaaacauccugguguaccagucaaauggaaaagauagggacuaguuauaagacugacuagcccgaugggccucccaacgggcccuccuccccuccuugcaccgagauuaauaaaaaaaaaaaaaaaaaaaaaaaaaaaaaaaaaaaaaaaaaaaaaaaaaaaaaaaaaaaaaaaaugcaucccccccccccccccccccccccccccccccaaaggcucuuuucagagccaccagaauu

SEQ ID NO: 7276 - RNA, 1690 nt, Artificial Sequence
  mRNA product Design i-3 comprising derived and/or modified sequence from LASV(LASV221-NIG-2010;Clade II)__AIT17624__GPCstabilized (wt)
gggagaaagcuuaccaugggacaaaucauaacauuuuuccaggaaguaccucaugucauagaggaagugaugaacauuguccugauugcucucagccuucuggcaauacugaaagggaucuacaauguugcuaccuguggccucuuuggauugguguccuuccuccucuuauguggaagaucaugcucaacaacuuacaaggguguuuaugagcuacaaacucuagagcuagacauggcaagccuuaauaugacaaugcccuuaucuugcacgaagaacaacucccaccauuacaucauggucggaaaugagacuggcuuggagcugacuuugacaaauacaagcauuaucaaccacaaguuuuguaaccuuucugaugcgcauaaaaagaaucuuuaugaccaugcuuuaaugaguaucaucucaaccuuccacuuguccauuccuaacuuuaaucaguaugaagcaaugaguugugauuucaaugggggaaagauaaguguucaguacaaccuuagccacacuuaugcuauagaugcagccaaccacugugggaccauugccaauggcguucuucagacuuucaugagaauggcuugggguggcaguuacauagcacuugauuccggaugcgggagcugggauugcauaaugacuuccuaccaauauuugauaauccaaaacaccacaugggaagaucacugccaguuuucucgcccaucccccaucgguuaucuggggcuacuaucacaaagaaccagggacauuuacauuagucgaagacgccgggggacuuucacuuggacucucucugacucugaagguaaugaaacaccggguggguauugucuaacaagauggaugcugauugaggccgaguugaagugcuuuggaaacacagcaguugcaaaaugcaaugaaaaacaugaugaagaguuuugugauauguugagauuguuugacuucaacaaacaagcuauaaggaggcuaaagacacccgcacagaugaguauccaacugauaaacaaagcggugaacgcacugaucaaugaccagcugaucaugaagaaucauuugagagauaucaugugcauuccuuacugcaauuacagcaaguauugguaucuaaaucacacuguaacagggaagacaucguugccaagaugcuggcuugugucgaaugguucuuaccugaaugagacacauuuuucugaugacauugaacaacaagcagacaacaugauaacagaaauguugcaaaaggaguacauggacaggcaagggaaaacacccuuaggguuaguagaucuuuuugucuucagcaccagcuuuuaucucauuagcaucuuccuccaccuaguuaaaauuccaacccacagacaugucauagggaaacccugcccuaaaccacacagacucaaccacaugggcauauguucauguggucuguauaagcauccuggcgugccagucaaguggaaaagauagggacuaguuauaagacugacuagcccgaugggccucccaacgggcccuccuccccuccuugcaccgagauuaauaaaaaaaaaaaaaaaaaaaaaaaaaaaaaaaaaaaaaaaaaaaaaaaaaaaaaaaaaaaaaaaaugcaucccccccccccccccccccccccccccccccaaaggcucuuuucagagccaccagaauu

SEQ ID NO: 7277 - RNA, 1690 nt, Artificial Sequence
  mRNA product Design i-3 comprising derived and/or modified sequence from LASV(LASV237-NIG-2010;Clade II)__AIT17638__GPCstabilized (wt)
gggagaaagcuuaccaugggacaaaucauaacauuuuuccaggaaguaccucaugucauagaggaagugaugaacauuguccugauugcucucagccuucuggcaauacugaaggggaucuacaauguugccaccuguggccuauuuggacugguguccuuucuccucuuauguggaagaucaugcucaacaacuuauaaggguguuuaugagcuacaaacucuagagcuggauauggcaagccuuaauaugacaaugccccuaucuugcacaaagaacaacagucaccauuacaucauggucggaaaugagacuggcuuggagcugacuuuaacaaauacaaguauuaucaaccacaaguuuuguaaccuuucugaugcacauaaaaaggaucucuaugaccaugcuuuaaugaguaucaucucaaccuuccacuuaucuauuccuaauuuuaaucaguaugaagcaaugaguugugacuucaauggggggaagauaaguguucaguacaaccuuagccacacuuaugcuguagaugcagccaaucacugugggacuaucgccaauggcguucuucagacuuuuaugaggauggcuugggguggcaguuacauagcacuugauuccggaugcgggaguugggauuguauaaugacuuccuaccaauauuugauaauccagaacaccacuugggaagaucacugccaguuuucucgcccauccccuaucgguuaucuggggcuacugucacaaaggaccagagacauuuacaucagucgaagacgccgggggacuuuuacuuggacucucucugauucugaagguaaugaaacaccggguggguacugucuaacaagauggaugcugauugaggccgaguugaagugcuuugggaacacagcaguugcgaaaugcaaugagaaacaugaugaagaguuuugugacauguuaagacuguuugauuucaacaaacaagcuauaaggaggcuaaagacacccgcacagaugaguauccaacugauaaacaaagcagugaaugcauugaucaaugaccagcuuauuaugaagaaucacuugagagauaucaugugcauuccuuacugcaauuacagcaaguacugguaucugaaucacacuguaacagggaagacaucguugccgaggugcuggcuugugucaaaugguuccuaccugaaugagacacauuuuucugaugacauugaacaacaggcagacaacaugauaacagaacuguugcaaaaggaguacauggacaggcaagggaaaacacccuuaggguuaguagaccuuuuugucuucagcaccagcuuuuaucucauuagcaucuuccuccaccugaucaaaaucccaacccacagacauaucacagggaaacccugcccuaaaccacacagacuuaaccacaugggcauaugcucauguggucuauacaaacauccugguguaccagucaaguggaaaagauagggacuaguuauaagacugacuagcccgaugggccucccaacgggcccuccuccccuccuugcaccgagauuaauaaaaaaaaaaaaaaaaaaaaaaaaaaaaaaaaaaaaaaaaaaaaaaaaaaaaaaaaaaaaaaaaugcaucccccccccccccccccccccccccccccccaaaggcucuuuucagagccaccagaauu

SEQ ID NO: 7278 - RNA, 1690 nt, Artificial Sequence
  mRNA product Design i-3 comprising derived and/or modified sequence from LASV(LASV253-NIG-2011;Clade II)__AIT17670__GPCstabilized (wt)
gggagaaagcuuaccauggggcaaaucauaacauuuuuucaggaagugccucaugucauagaagaagugaugaacauuguccugauugcccucagccuucuggcaauauugaaagggaucuacaauguugcuacuuguggccucuuuggacugguguccuuucuucucuuauguggaagaucaugcucaacaacuuacaaagguguuuaugagcuacaaacucuagagcuagacauggcaagccuuaauaugacaaugcccuuaucuugcacaaagaauaauagccaccauuacaucauggucggaaaugaaacuggcuuagagcugacuuuaacaaauacaaguaucaucaaccacaaguuuuguaaccuuucugaugcacauaaaaagaaucuuuaugaccaugcuuuaaugagcaucaucucaaccuuccacuuauccauuccuaacuucaaucaauaugaagcaaugaguugugacuucaauggggggaagauaaguguucaguacaaccuuagccacacuuaugcuguagaugcagcuaaccacugugggacuauugccaauggcguucuucagacuuuuaugaggauggcuugggguggcagcuacauagcacuugauuccggaugcgggagcugggauuguauaaugacuuccuaccaauauuugauaauccagaacaccacuugggaggaucacugccaguuuucucgcccaucccccaucgguuaucuggggcuacugucacaaaggaccagggacauuuacaucagucgaagacgccggggaacuuuuacuuggacccucucugauucugaaggcaaugaaacuccagguggguauugucuaacaagguggauguugauugaggccgaguugaagugcuuugggaacacagcaguugcgaaaugcaaugagaaacaugaugaagaguuuugugacaugcuaagauuguuugacuuuaauaaacaagcuauaaggagacugaaagcacccgcacagaugaguauucaacuaauaaacaaagcagugaaugcacugaucaaugaccagcugauaaugaagaaucauuuaagagauaucaugugcauuccuuacugcaauuacagcaaguauugguaucugaaucacacuguaacaggaaggacaucguuaccaagaugcuggcuugugucaaaugguuccuaccugaaugagacacauuuuucugacgacauugaacaacaagcagacaacaugauaacagaacuguugcagaaggaguacauagacaggcaagggaaaacaccuuuaggguuaguggaucuuuuugucuucagcaccagcuuuuaucucaucagcaucuuccuccaccugguuaaaaucccaacccacagacauaucauagggaaacccugcccuaaaccacacagacucaaccacaugggcauaugcucauguggucuguacaaacauccuggugugccaguuaaguggaaaagauagggacuaguuauaagacugacuagcccgaugggccucccaacgggcccuccuccccuccuugcaccgagauuaauaaaaaaaaaaaaaaaaaaaaaaaaaaaaaaaaaaaaaaaaaaaaaaaaaaaaaaaaaaaaaaaaugcaucccccccccccccccccccccccccccccccaaaggcucuuuucagagccaccagaauu

SEQ ID NO: 7279 - RNA, 1690 nt, Artificial Sequence
  mRNA product Design i-3 comprising derived and/or modified sequence from LASV(LASV254-NIG-2011;Clade II)__AIT17674__GPCstabilized (wt)
gggagaaagcuuaccaugggacaaaucauaacauuuuuccaggaaguaccucaugucauagaggaagugaugaacauuguucugauugcucucagccuucuggcaauauugaaagggaucuacaauguugcuaccuguggccucuuuggauugguguccuuucuucucuuauguggaagaucaugcucaacaacuuacaaggguguuuaugagcuacaaacucuagagcuagacaugacaaaccucaauaugacaaugccuuuauccugcacgaaaaacaacagccaccauuacaucauggucggaaaugagacuggucuggagcugacuuuaacaaauacaagcaucaucaaccacaaguuuuguaaccuuucugaugcacauaaaaagaaucuuuauaaccaugcuuuaaugaguauuauuucaacuuuccacuuauccauuccuaacuuuaaucaguaugaagcaaugaguugugacuucaaugggggcaagauaaguguccaguacaaccuuagccauaguuaugcuguggaugcagcuaaccacugugggaccauugccaauggcgugcuucagacuuuuaugaggauggcuugggguggcaguuacauagcacuugauuccggaugcgggaauugggauuguauaaugaccuccuaccaauauuugauaauccaaaacaccacuugggaagaucacugucaguuuucucgcccauccccuauugguuaucugggguuacugucacaaaggaccagggacauuuacaucagucgaagacgccgggggacuuuuacuuggacucucucugauucugaagguaaugaaacaccagguggguauugucuaacaagauggaugcugauugaggccgaguugaagugcuuugggaacacagcaguugcgaaauguaaugagaaacaugaugaggaguuuugugacauguuaagauuguuugacuuuaacaaacaagcuauaaggaggcugaagacacccgcacaggcgaauauccaacugauaaauaaagcagugaacgcacugaucaaugaccagcugaucaugaagaaucauuugagagauaucaugugcauuccuuacugcaauuacagcaaguauugguacuuaaaucacacuguaacagggaagacaucguugccaagaugcuggcuugugucaaauggcuccuacuugaaugagacacauuuuucugaugacauugaacaacaagcagacaauaugauaacagaacuguugcagaaggaguacauggacaggcaagggaaaacacccuuaggguugguagaucuuuuugucuucagcaccagcuuuuaucucauuagcaucuuccuccaccugguuaaaaucccaacccacagacaugucauagggaaacccugcccuaaaccacacagacucaaccacaugggcauaugcucauguggucuguacaaacauccugguguaccagucaaguggaaaagauagggacuaguuauaagacugacuagcccgaugggccucccaacgggcccuccuccccuccuugcaccgagauuaauaaaaaaaaaaaaaaaaaaaaaaaaaaaaaaaaaaaaaaaaaaaaaaaaaaaaaaaaaaaaaaaaugcaucccccccccccccccccccccccccccccccaaaggcucuuuucagagccaccagaauu

SEQ ID NO: 7280 - RNA, 1690 nt, Artificial Sequence
  mRNA product Design i-3 comprising derived and/or modified sequence from LASV(Nig08-A19;Clade III)__ADU56618__GPCstabilized (wt)
gggagaaagcuuaccaugggacaaauugugacauucuuccaggaagucccucauguuaucgaggaagugaugaauaucguccucauagcauugucaauuuuggcaauccuaaaaggacucuacaacauugcuacauguggcuugauaggccuugucacauuccucuuacuuucuggaaggucauguucaaugaccuacaaaggaguuuaugaacuacagacccuugaacugaacaugaacacucugaauaugacuaugccgcuaucuuguacaaagaacaauagucaccacuacaucauggugggaaacgagacagggcuugagcucaccuuaaccaacacaagcuugcuccaucacaaauucugcaaccuaucagaugcucauaagaaaaaucuuuaugaucacacucucaugagcauuaucuccacauuccauuuguccauuccuaacuuuaaucaguaugaggcaaugaguugugauuuuaaugguggcaagaucacugugcaauacaaucugagucauagcuaugcaauugaugcagcaaaccauuguggcacaguggcaaacgguguguugcaaacauuuaugaggauggcuuggggagguaguuacauugcccuugauuccggaugcgggaaaugggauuguauaaugaccaguuaucaauacuuaaucauccagaacacaaccugggaagaucauugucaauuuuccagaccauccccaauuggauaucuugggcuccucucacagagaacuagagacauauacauuaguagaagacgccggggaacauuuacuuggacacuuucugacucagaaggaaaugagacaccaggagguuacugucucacuagauggauguugauugaggcugaacuaaaguguuucgggaauacagcuguagcuaagugcaaugaaaaacacgaugaagaguuuugugacaugcuaaggcuauuugacuucaauaagcaagcuauaaggagguuaaaggcacccgcccaaaugagcauacagcugaucaacaaagcaguuaaugcucuaauaaacgaucagcugaucaugaagaaucaucuaagggacaucaugugcauaccauacugcaauuacagcaaguacugguaucucaaucacaccucaacagggaggaccucauuaccgagauguuggcuuguuucaaaugggucauaucucaaugaaacucacuuuucagaugacauugagcagcaagcugauaacaugauaacugaaauguugcaaaaagaauaccuggacagacaaggaaagaccccauugggauugguagaucuuuuugucuucaguacaaguuuuuacuuaaucaguauuuuccuccaucuggucaaaauaccaacccauagacacauuguagggaagccuugccccaaaccucauagguugaaccacaugggcaucugcucuuguggucuauauaaacagccaggaguacccguuagauggaagagauaaggacuaguuauaagacugacuagcccgaugggccucccaacgggcccuccuccccuccuugcaccgagauuaauaaaaaaaaaaaaaaaaaaaaaaaaaaaaaaaaaaaaaaaaaaaaaaaaaaaaaaaaaaaaaaaaugcaucccccccccccccccccccccccccccccccaaaggcucuuuucagagccaccagaauu

SEQ ID NO: 7281 - RNA, 1693 nt, Artificial Sequence
  mRNA product Design i-3 comprising derived and/or modified sequence from LASV(G1180-SLE-2010;Clade IV)__AIT17168__GPCstabilized (wt)
gggagaaagcuuaccaugggacagauagugacauucuuccaggaagugccucauguaauagaagaggugaugaacauuguucucauugcacugucuauacuagcagugcugaaaggucuguacaauuuugcaacauguggccucguuggucuacucacuuuccuccuguuguguggcagaucuugcacagcuagucguuacaaagggguuuaugagcuucagacucuggaacuaaacauggagacacucaauaugaccaugccucucuccugcacaaagaacaacagucaucauuauauaaugguggguaaugagacaggacuagaacugacuuugacuaacacgagcaucauuaaucauaaauuuugcaaucugucugaugcccacaaaaagaaccuuuaugaccacgcucuuaugagcauaauuucaacuuuccacuuauccauccccaacuucaaucaguaugaggcaaugagcugcgauuuuaaugggggaaagauuagugugcaguacaaccugagucacagcuaugcuggggaugcagccaaucauugugguacuguugcaaauggugucuugcagaccuucaugaggauggcuuggggugggagcuacauugcucuugacucaggcugcggcaguugggacuguauuaugacuaguuaucaauaucugauaauccaaaauacaaccugggaagaucacugccaguucucaagaccaucucccauugguuaucucgggcuccuuucacaaagaaccagagauauuuacauuaguagaagacgccggggcacauucacauggacacugucagauucugaaggcaaggacacaccagggggauauugucugaccagauggaugcuaauugaagcugaacuaaaaugcuucgggaacacagcuguggcaaaauguaaugagaagcaugaugaggaauuuugugacaugcugaggcuguuugacuucaacaaacaagccauucaaagguugaaagcucccgcacaaaugagcauucaauugaucaacaaggcaguaaaugcuuugauaaaugaccaacuuauaaugaagaaccauuuacgagacaucaugugcaucccauacuguaauuacagcaaguauugguaccucaaccacacaaccacugggaaaacaucacugccuaaguguuggcuuguaucaaaugguucauacuuaaaugagacccacuuuucugaugauauugagcaacaagcugacaacaugaucacugagauguuacagaaggaguauauggaaaggcagggcaagacaccauugggccuaguugaccucuuuguguuuagcacaaguuucuaucucauuagcaucuuccuucaccuggucaaaauaccaacucauaggcauauuguaggcaagucgugucccaaaccucauagauugaaucacaugggcauauguuccuguggacucuacaaacagcccggugugccugugaaauggaagagaugaggacuaguuauaagacugacuagcccgaugggccucccaacgggcccuccuccccuccuugcaccgagauuaauaaaaaaaaaaaaaaaaaaaaaaaaaaaaaaaaaaaaaaaaaaaaaaaaaaaaaaaaaaaaaaaaugcaucccccccccccccccccccccccccccccccaaaggcucuuuucagagccaccagaauu

SEQ ID NO: 7282 - RNA, 1693 nt, Artificial Sequence
  mRNA product Design i-3 comprising derived and/or modified sequence from LASV(G1442-SLE-2011;Clade IV)__AIT17180__GPCstabilized (wt)
gggagaaagcuuaccaugggacaaauagugacauucuuucaggaagugccucaugugauagaggagguaaugaacauugugcucauugcacuauccauacuggcagugcugaagggucuauacaauguugcaacaugcggccugauugguuuagucaccuuccuauuguuaugugguaggucuugcacaacaacucuuuacaaaggaguuuacgaacuucagacucuggaauuaaacauggagacacucaauaugacuaugccucucucuuguacaaagaacaacagucaccacuauauaaggguggguaaugagacaggacuagaguugacccugaccaacacaagcaucaucaaucacaaguuuugcaaucuaucugaugcucacaaaaagaaccucuaugaucaugcuuugaugagcauaaucucgacuuuucacuuguccauucccaacuucaaccaauaugaggcaaugagcugugacuucaauggagggaagauuagugugcaguauaaccugagucacagcuaugcuggagaugcagccaaccauugugguacaguugcaaaugguguuuuacaaaccuucaugaggauggcuuggggugggaguuacaucgcccuugacucagguugcggcaauugggacuguauuaugacuaguuaucaauaccuaauaauucagaauacgaccugggaugaucauugccaauucucaagaccaucccccaucgguuaucuugggcuccucucacaaaggaccagagauguuuauaucaguagaagacgccggggcacauucacauggacacugucagauucugaaggcaaggacacaccaggaggguacugucugaccagguggaugcuaauugaagcugaacugaaaugcuuuggcaacacagcuguagcaaaauguaaugagaaacaugaugaagaauucugugacaugcuaaggcuguuugacuucaauaaacaagcuauucagagguugaaagcccccgcacaaaugaguauucaguugaucaacaaagcagugaaugcuuugauaaaugaccaacuaauaaugaaaaaccaucuacgggacaucaugugcauuccauacugcaauuacagcaaguacugguaucucaacaacacagccacugggaaaacaucacugcccaaauguuggcuuauaucaaauggcucauauuugaacgaaacucacuucucugaugacauugaacaggaagcugacaauaugaucacugagauguuacaaaaagaauacauggagaggcaggggaagacaccauuaggucugguugaccucuuuguguucagcacaaguuucuaucucauuagcaucuuccuucaccuagucaaaauaccaacucacaggcauauugugggcaaaucauguccuaaaccccauagguugaaucacauggguauuugcucuuguggacuuuauaaacaacccggugugccuguaagauggaagagaugaggacuaguuauaagacugacuagcccgaugggccucccaacgggcccuccuccccuccuugcaccgagauuaauaaaaaaaaaaaaaaaaaaaaaaaaaaaaaaaaaaaaaaaaaaaaaaaaaaaaaaaaaaaaaaaaugcaucccccccccccccccccccccccccccccccaaaggcucuuuucagagccaccagaauu

SEQ ID NO: 7283 - RNA, 1693 nt, Artificial Sequence
  mRNA product Design i-3 comprising derived and/or modified sequence from LASV(G3010-SLE-2013;Clade IV)__AIT17344__GPCstabilized (wt)
gggagaaagcuuaccaugggacagauaguaacauucuuccaggaagugccucaugugauagaagaggugaugaacauuguucucauugcacugucuauauuagcagugcugaaaggucuguacaauuuugcaacauguggccucguugguuugguuaccuuccuccuguuaugugguaggucuugcacaaccagucuuuacaaagggguuuaugagcuucagacucuggaacuaaacauggagacacucaauaugaccaugccucucuccuguacaaagaacaacagucaucauuauauuaugguggguaaugagacaggacuagaacugaccuugaccaacacgagcaucauuaaucauaaauuuugcaaucugucugaugcccacaaaaagaaccucuauaaucacgcucuuaugagcauaauuucaacuuuccaucuguccauucccaacuucaaucaguaugaggcaaugagcugcgauuucaaugggggaaagauuagugugcaguacaaccugagucacaguuaugcuggggaugcggccagccauuguggcacuguugcaaauggugucuuacagacuuucaugaggauggcuugggguggaagcuauauugcucuugacucaggcugcggcaagugggacugcauuaugacuaguuaucaguaccugauaauucaaaauacaaccugggaagaucacugccaauucucaagaccaucucccauuggcuaucucgggcuccucucacaaaggaccagagauauuuauauuaguagaagacgccggggcacauucacauggacacugucggauucugaagguaaggacacaccagggggauauuguuugaccagauggaugcuaauugaagcugaacuaaagugcuucgggaacacagcuguagcaaaauguaaugagaagcaugaugaggaauuuugugacaugcugaggcuguuugacuucaacaaacaagccauucaaagauugaaaacucccgcacaaaugagcauucaguugaucaacaaggcaguaaaugccuuaauaaaugaccagcuuauaaugaagaaccaucuacgagacauaaugugcauuccauacuguaacuacagcaaguauugguaccucaaccacacaaccacugggaaaacaucacugccuaaauguuggcuuguaucaaauggcucauacuugaaugagacccacuuuucugaugauauugaacaacaggcugacaacaugaucacugagauguuacagaaagaguacauggagaggcaggggaagacaccauugggccuggucgaccuuuuuguguucagcacaaguuucuaucucaucaguaucuuucuucaccuagucaaaauaccaacucauagacauauuguaggaaagucgugucccaaaccucacagauugaaucacaugggcauauguuccuguggacucuacaaacagcccggugugccugugagauggaagagaugaggacuaguuauaagacugacuagcccgaugggccucccaacgggcccuccuccccuccuugcaccgagauuaauaaaaaaaaaaaaaaaaaaaaaaaaaaaaaaaaaaaaaaaaaaaaaaaaaaaaaaaaaaaaaaaaugcaucccccccccccccccccccccccccccccccaaaggcucuuuucagagccaccagaauu

SEQ ID NO: 7284 - RNA, 1693 nt, Artificial Sequence
  mRNA product Design i-3 comprising derived and/or modified sequence from LASV(G502-SLE-2009;Clade IV)__AIT17126__GPCstabilized (wt)
gggagaaagcuuaccaugggacagauagugacauucuuccaggaaguaccucauguaauagaagaggugaugaacauuguucucauugcacugucuauacuagcagugcugaaaggucuguauaauuuugcaacauguggccucguuggucuacucaccuuccuccuauuguguggcaggucuugcacaaccggacuuuacaaagggguuuaugagcuucaaacucuggaacuaaacauggagacacucaauaugaccaugccucucuccugcacaaagaacaacagucaucauuauauaaugguggguaaugagacaggacuagaacugacuuugacuaacacgagcaucauuaaucauaaauuuugcaaucugucugaugcccacaaaaagaaccuuuaugaccacgcucuuaugagcauaauuucaacuuuccacuuguccauccccaacuucaaucaguaugaggcaaugagcugcgauuuuaaugggggaaagauuaguguacaguacaaccugagccacaguuaugcuggggaugcggcugaucauuguggcacuguugcaaauggugucuugcagacuuucaugaggauggccuggggugggagcuacauugcucuugacucagguugcggcaggugggacuguauuaugacuaguuaucaauauuugauaauccaaaauacaaccugggaagaucacugccaguucucaagaccaucucccaucgguuaucucgggcuccucucacaaagaacuagagacauuuacauuaguagaaggcgccggggcacauucacauggacacugucagauucugaaggcaaggacacaccaggaggauauugucugacuagauggaugcugauugaggcugaauuaaaaugcuucgggaacacagcuguagcaaaauguaaugagaagcaugaugaggaauuuugugacaugcugaggcuguuugacuucaacaaacaagccauucaaagguuaaaagcucccgcacagaugagcauucaauugaucaacaaggcaguaaaugcuuugauaaaugaccaacuuguaaugaagaaccacuuacgggacaucaugugcauuccauacuguaauuacagcagguauugguaucucaaccacacaaccacuggaagaacaucacugccuaaauguuggcuugugucaaauggcucauacuuaaacgagacccacuuuucugaugauauugagcaacaagcugacaacaugaucacugagauguuacagaaggaauauauggaaaggcagggaaagacaccauuaggucugguugaccucuuuguguucagcacaaguuucuaucuuauuagcaucuuccuucaccuggucaagauaccaacucauaggcauauugugggcaagucgugucccaaaccucauagauugaaucacaugggcauauguuccuguggacucuacaaacagcccgguguaccugugaaauggaagagaugaggacuaguuauaagacugacuagcccgaugggccucccaacgggcccuccuccccuccuugcaccgagauuaauaaaaaaaaaaaaaaaaaaaaaaaaaaaaaaaaaaaaaaaaaaaaaaaaaaaaaaaaaaaaaaaaugcaucccccccccccccccccccccccccccccccaaaggcucuuuucagagccaccagaauu

SEQ ID NO: 7285 - RNA, 1693 nt, Artificial Sequence
  mRNA product Design i-3 comprising derived and/or modified sequence from LASV(G733-SLE-2010;Clade IV)__AIT17154__GPCstabilized (wt)
gggagaaagcuuaccaugggacagauagugacauucuuccaggaagugccucauguaauagaagaggugaugaacauuguucucauugcacugucuauacuagcaguccugaagggucuguacaacuuugcaacauguggcaucguugguuuggucagcuuucuccuguuguguggcaggucuugcacaaccagucuuuacaaagggguuuaugagcuucagacucuggagcuaaacauggagacacuuaacaugaccaugccucucucuugcacaaagaacaacagucaucauuauauaauggugggcaaugagacgggauuggaacugaccuugaccaacacgagcauuaucaaucauaaauuuugcaaucuaucugaugcccauaagaagaaccucuaugaccacgcccuuaugaguauaaucucaaccuuccacuuguccauccccaacuucaaucaguaugaagcaaugagcugugauuucaaugggggaaagauuaguguacaguacaaccugagucacagcuaugcuggggaugcagccaaccauuguggcacaauugcaaauggugucuuacagacuuucaugaggauggccuggggugggagcuacauugcucuugacucaggcugcgacaggugggacugcauaaugaccaguuaucaauaucugauaauccaaaacacaaccugggaagaucacugccaauucucaagaccaucucccaucgguuaucuugggcuccucucacaaaggaccagagauauauauauuaguaggagacgccggggcacauuuacauggacauugucagauucugaagguaaggacacaccaggaggguauugucuaaccagauggaugcugauugaggcugagcugaaaugcuuugggaacacagcuguggcaaaaugcaaugagaaacaugaugaggaauuuugugauaugcuaaggcuguuugacuucaacaaacaagccauucaaagguuaaaagcucccgcacaaaugagcauucaguugaucaacaaagcagugaaugcuuugauaaacgaccaacuaauaaugaagaaccaucuacgggacaucaugugcauuccauacuguaauuacagcaaguacugguaccucaaccacacaacuacugggaaaacaucacugccuaaauguuggcuugugucgaaugguucauacuuaaacgagacucacuuuucugaugacauugaacaacaagcugacaauaugaucacugagauguuacagaaggaauacauggaaaggcaggggaagacaccauugggucuaguugaccucuuuguguucagcacaaguuucuaucucauuagcaucuuccuucauuuggucaaaauaccaacucauaggcauguuguaggcaagucgugucccaagccucacagauugaaucacaugggcauaugcuccugcggacucuauggacagccugguguaccugugaaauggaagagaugaggacuaguuauaagacugacuagcccgaugggccucccaacgggcccuccuccccuccuugcaccgagauuaauaaaaaaaaaaaaaaaaaaaaaaaaaaaaaaaaaaaaaaaaaaaaaaaaaaaaaaaaaaaaaaaaugcaucccccccccccccccccccccccccccccccaaaggcucuuuucagagccaccagaauu

SEQ ID NO: 7286 - RNA, 1693 nt, Artificial Sequence
  mRNA product Design i-3 comprising derived and/or modified sequence from MOPV/LASV reassortant(IGS-1;Clade IV)__AFY05576__GPCstabilized (wt)
gggagaaagcuuaccaugggacaaauagugacauucuuccaggaagugccucauguaauagaagaggugaugaacauuguucucauugcacugucuguacuagcagugcugaaaggucuguacaauuuugcaacguguggccuuguugguuuggucacuuuccuccuguugugugguaggucuugcacaaccagucuuuauaaagggguuuaugagcuucagacucuggaacuaaacauggagacacucaauaugaccaugccucucuccugcacaaagaacaacagucaucauuauauaauggugggcaaugagacaggacuagaacugaccuugaccaacacgagcauuauuaaucacaaauuuugcaaucugucugaugcccacaaaaagaaccucuaugaccacgcucuuaugagcauaaucucaacuuuccacuuguccauccccaacuucaaucaguaugaggcaaugagcugcgauuuuaaugggggaaagauuagugugcaguacaaccugagucacagcuaugcuggggaugcagccaaccauugugguacuguugcaaaugguguguuacagacuuuuaugaggauggcuuggggugggagcuacauugcucuugacucaggcugcggcaacugggacuguauuaugacuaguuaucaauaucugauaauccaaaauacaaccugggaagaucacugccaauucucgagaccaucucccaucgguuaucucgggcuccucucacaaaggacuagagauauuuauauuaguagaagacgccggggcacauucacauggacacugucagauucugaaggugaagacacaccagggggauauugucugaccagguggaugcuaauugaggcugaacuaaaaugcuucgggaacacagcuguggcaaaauguaaugagaagcaugaugaggaauuuugugacaugcugaggcuguuugacuucaacaaacaagccauucaaagguugaaagcucccgcacaaaugagcauucaguugaucaacaaagcaguaaaugcuuugauaaaugaccaacuuauaaugaagaaccaucuacgggacaucaugugcauuccauacuguaauuacagcaaguauugguaccucaaccacacaacuacugggagaacaucacugcccaaauguuggcuuguaucaaaugguucauacuugaacgagacccacuuuucugaugauauugaacaacaagcugacaauaugaucacugagauguuacagaaggaguauauggagaggcaggggaagacaccauugggucuaguugaccucuuuguguucagcacaaguuucuaucuuauuagcaucuuccuucaccuagucaaaauaccaacucauaggcauauuguaggcaagucgugucccaaaccucacagauugaaucauaugggcauuuguuccuguggacucuacaaacagccuggugugccugugaaauggaagagaugaggacuaguuauaagacugacuagcccgaugggccucccaacgggcccuccuccccuccuugcaccgagauuaauaaaaaaaaaaaaaaaaaaaaaaaaaaaaaaaaaaaaaaaaaaaaaaaaaaaaaaaaaaaaaaaaugcaucccccccccccccccccccccccccccccccaaaggcucuuuucagagccaccagaauu

SEQ ID NO: 7287 - RNA, 1693 nt, Artificial Sequence
  mRNA product Design i-3 comprising derived and/or modified sequence from LASV(LM765-SLE-2012;Clade IV)__AIT17814__GPCstabilized (wt)
gggagaaagcuuaccaugggacaaauagugacauucuuccaggaagugccccaugucauagaagaggugaugaacauuguucucauugcacuguccauacuagcagugcugaaaggucuguacaauuuugcaacauguggccucguuggcuuggucacuuuccuccuguuguguggcaggucuuguacaacuagccuuuacaaagggguuuaugagcuucagacucuggaacuaaacauggaaacacucaauaugaccaugccucucuccugcacaaagaacaauagucaucauuauauaauggugggcaaugagacaggacuagaacugaccuugaccaacacgagcauuauugaucauaaauuuugcaaucugucugaugcccacagaaagaaccucuaugaccacgcucuuaugagcauuaucucaacuuuccacuugucuaucccuaacuucaaucaguaugaggcaaugagcugcgauuucaaugggggaaagauuaguguacaguacaaccugagucacagcuaugccaaggacgcagccgaccauuguggaacuguugcaaaugguguauuacagacuuucaugaggauggcuuggggugggagcuacaucgcucuugacucaggcugcggcaggugggacuguauuaugacuaguuaucaauaucugauaauccaaaauacaaccugggaagaucacugccaauucucgagaccaucucccaucgguuaucucgggcuccucucacagaggaccagagauauuuauauuaguagaaggcgccggggcacauucacauggacacugucagauucugaaggcaaggacacaccagggggauauugucuaaccagauggaugcuaauugaggcugagcuaaagugcuucgggaauacagcuguggcaaaauguaaugagaagcaugaugaggaauuuugugacaugcugagguuguuugacuuuaacaagcaagccauucaaagguugaaagcucccgcacaaaugagcauucaguugaucaacaaagcaguaaaugcuuugauaaaugaccaacuuauaaugaagaaccaucuacgggacaucaugugcauuccauacuguaauuacagcaaguauugguaccucaaccacacaacuacuggaaaaacaucacugcccaaguguuggcuuguaucaaaugguucauaccugaacgagacccacuuuucugaugacauugaacaacaagcugacaacaugaucaccgagauguuacagaaggaguauauggagaggcaggggaagacaccauugggucugguugaccucuuuguguucagcacaagcuucuaucucauuagcaucuuccuucaccuaguuaaaauaccaacucauaggcauauuguaggcaagccgugucccaaaccucacagguugaaucauaugggcauuuguuccuguggacucuauaaacagccuggugugccuguaaaauggaagagaugaggacuaguuauaagacugacuagcccgaugggccucccaacgggcccuccuccccuccuugcaccgagauuaauaaaaaaaaaaaaaaaaaaaaaaaaaaaaaaaaaaaaaaaaaaaaaaaaaaaaaaaaaaaaaaaaugcaucccccccccccccccccccccccccccccccaaaggcucuuuucagagccaccagaauu

SEQ ID NO: 7288 - RNA, 1693 nt, Artificial Sequence
  mRNA product Design i-3 comprising derived and/or modified sequence from LASV(LM776-SLE-2012;Clade IV)__AIT17824__GPCstabilized (wt)
gggagaaagcuuaccaugggacagauagugacauucuuccaggaagugccucauguaauagaagaggugaugaacauuguccucauugcgcugucuauauuagcagugcugaaaggucuguacaacuuugcaacauguggccucguugguuugguuacuuuccuccuguuguguggcaggucuugcacaaccaguguuuauaaaggggucuaugagcuucagacucuggaguuaaacauggagacacucaauaugaccaugccucucuccugcacaaagaauaacagucaucauuauauaaugguagguaaugagacaggacuagaacugaccuugaccaacacaagcauuauuaaucauaaauuuugcaaucugucugaugcccacaaaaagaaccucuaugaccaugcccuuaugagcauaauuucaacuuuccacuuguccauccccaacuucaaucaguaugaagcaaugagcugugauuucaaugggggaaagauuagugugcaguacaaccugagucacagcuaugcuggggaugcugccaaccauuguggcacuguugcaaauggugucuuacagacuuucaugaggauggcuuggggugggagcuacauugcucuugacucaggcugcggcaagugggacuguauuaugacuaguuaucaauaucugauaauccaaaauacaaccugggaagaucacugccaauucucaagaccaucuccuaucgguuaucuugggcuucucucacaaaggaccagagauauuuauaucaguagaagacgccggggcacauucacauggacacugucagauucugaaggcaaggacacaccagggggauauugucugaccagauggaugcugauugaagcugaauuaaaaugcuucgggaacacagcuguagcaaaauguaaugagaagcaugaugaggaauuuugugacauguugaggcuguuugacuucaacaaacaagccauucaaagguugaaagcucccgcacaaaugagcauucaguugaucaacaaggcaguaaaugccuugauaaaugaucaacuuauaaugaagaaccaucuacgggacaucaugugcaucccauacuguaauuacagcaaauauugguaccucaaccacacaacuacugggaaaacaucacugccuaaauguuggcuugucucaaaugggucauacuugaacgagacccacuuuucugaugauauugaacaacaagcugacaacaugaucacugagauguuacagaaggaguauauggagaggcaggggaagacaccauugggccuaguugaccucuuuguguucagcacaaguuucuaucucaucagcaucuuccuucaccuagucaaaauaccaacucauaggcauauuguaggcaagucguguccuaaaccucacagauugaaucacaugggcauauguuccuguggacucuacaaacagcccggugugccugugagauggaaaagaugaggacuaguuauaagacugacuagcccgaugggccucccaacgggcccuccuccccuccuugcaccgagauuaauaaaaaaaaaaaaaaaaaaaaaaaaaaaaaaaaaaaaaaaaaaaaaaaaaaaaaaaaaaaaaaaaugcaucccccccccccccccccccccccccccccccaaaggcucuuuucagagccaccagaauu

SEQ ID NO: 7289 - RNA, 1693 nt, Artificial Sequence
  mRNA product Design i-3 comprising derived and/or modified sequence from LASV(Mad39;Clade IV)__ANH09722__GPCstabilized (wt)
gggagaaagcuuaccauggggcaaauugugacauucuuucaggaagugccucauguaauugaggaggugaugaacauuguacucauugcacuauccauacuggcagugcuaaagggucuguacaauguugcaacauguggccucauuggcuugguuaccuuccuccugcugugugguagaucuuguacaaccacucuuuauaaagggguuuaugagcuucaagcucuggaacuaaacauggaaacacucaacaugacuaugccucucucuugcacaaaaaacaacucucaucacuauauaagggugggcaaugaaacaggccuagaacugaccuugaccaacacaagccucauaaaucacaaguucugcaaucugucugaugcucacaaaaagaaccucuaugaucaugcucuuaugagcauaaucucaacuuuccauuuguccauccccaacuucaaucaguaugaagcaaugagcugugauuucaaugaugggaagaucaguguacaguacaaccuaagccacaccuacgcuggggauacagccaaccacugugguacuguugcgaacgguguuuuacagacuuucaugaggauggcuuggggugggaguuacauugcucuugauucaggcugcgguggaugggacugcauuaugaccagcuaucaauauuugauaauucagaacacaaccugggaagaucacugucaguucucaagaccaucucccaucggguaccuugggcuccucucacaaagaaccagagacauuuauaucaguagaagacgccggggcacauucacauggacacuaucagauucugaggguaaagacacaccagggggguacugucuaacuagguggaugcugauugaagcugaauugaaaugcuuuggcaacacagcuguagcaaaaugcaaugagaagcaugaugaggaauuuugugauauguugaggcuauuugacuuuaacaaacaagccauucaaagauugaaagcucccgcacaaaugaguauucagcugaucaacaaagcagugaaugccuugauaaaugaucaacugauaaugaaaaaccauuugcgggacauuaugugcauuccguacugcaacuacagcaaguauugguaucuuaaucacacagucaccggaaagacaucauuacccaaaugcuggcuuguaucaaauggcucauaccuaaacgagacccacuucucugaugauauugagcagcaagcugauaacaugauuacugagaugcuacagaaggaauacauggagagacaggggaagacaccacuuggucugguugaccucuuuguauuuagcacaaguuucuaucucauuagcauuuuccuucaccuagugaaaauaccaacucauaggcauguugugggcaaaccguguccuaaaccucacagacugaaccacauggguauauguucuuguggguucuacaagcaaccuggugugccugugagauggaagagaugaggacuaguuauaagacugacuagcccgaugggccucccaacgggcccuccuccccuccuugcaccgagauuaauaaaaaaaaaaaaaaaaaaaaaaaaaaaaaaaaaaaaaaaaaaaaaaaaaaaaaaaaaaaaaaaaugcaucccccccccccccccccccccccccccccccaaaggcucuuuucagagccaccagaauu

SEQ ID NO: 7290 - RNA, 1693 nt, Artificial Sequence
  mRNA product Design i-3 comprising derived and/or modified sequence from LASV(Z0947-SLE-2011;Clade IV)__AIT17840__GPCstabilized (wt)
gggagaaagcuuaccaugggacaaauagugacauucuuccaggaagugccccaugucauagaagaggugaugaacaucguucucauugcacugucuauacuagcaguguugaaaggucuguacaauuuugcaacauguggccucguuggcuuggucacuuuccuccuguuguguggcaggucuugcacaauuagccuuuacaaggggguuuaugagcuucagacucuggaacuaaacauggaaacacucaauaugaccaugccucucuccuguacaaagaacaacagucaucauuauauaauggugggcaaugagacaggacuagaacugaccuugaccaacacgagcauuauuaaucauaaauuuugcaaucugucugaugcccacaaaaagaaccucuaugaccaugcucuuaugagcauuaucucaacuuuccacuuguccaucccuaacuucaaucaguaugaggcaaugagcugcgauuucaaugggggaaagauuagugugcaguacaaccugagucacagcuaugccggggacgcagccaaccauugugguacuguugcaaaugguguauuacagacuuucaugaggauggcuuggggugggagcuacaucgcucuugacucaggcugcgacaggugggacuguauuaugacuaguuaucaauaucugauaauccaaaauacaaccugggaagaucacugccaauucucgagaccaucucccaucgguuaucucgggcuccucucacaaaggaccagagauauuuauauuaguagaaggcgccggggcacauucacauggacacugucagauucugaaggcaaggacacaccagggggauauugucuaaccagauggaugcuaauugaggcugagcuaaagugcuucgggaacacagccguggcaaaauguaaugagaagcaugaugaggaauuuugugacaugcugagguuguuugacuuuaacaaacaagccauucaaagguugaaagcucccgcacaaaugagcauucaguugaucaacaaagcaguaaaugcuuugauaaaugaccaacuuauaaugaagaaccaucuacgggacaucaugugcauuccauacuguaauuacagcaaguauugguaccucaaccacacaacuacuggaaaaacaucacugcccaaguguuggcuuguaucaaaugguucauaccugaacgagacccacuuuucugaugacaucgaacaacaagcugacaacaugaucacugagauguuacagaaggaguauauggagaggcaggggaagacaccauugggucugguugaccucuuuguguucagcacaagcuucuaucucauuagcaucuuccuucaccuaguuaaaauaccaacucauaggcauauuguaggcaagccgugucccaaaccucacagguugaaucauaugggcauuuguuccuguggacucuauaaacagccuggugugccugugaaauggaagagaugaggacuaguuauaagacugacuagcccgaugggccucccaacgggcccuccuccccuccuugcaccgagauuaauaaaaaaaaaaaaaaaaaaaaaaaaaaaaaaaaaaaaaaaaaaaaaaaaaaaaaaaaaaaaaaaaugcaucccccccccccccccccccccccccccccccaaaggcucuuuucagagccaccagaauu

SEQ ID NO: 7291 - RNA, 1693 nt, Artificial Sequence
  mRNA product Design i-3 comprising derived and/or modified sequence from LASV(Josiah;Clade IV)__NP_694870__GPCstabilized (opt1) R7390
gggagaaagcuuaccaugggccagaucgugaccuucuuccaggaggucccccacgugaucgaggaggugaugaacaucguccugaucgcccucagcgugcuggccgugcugaaggggcucuacaacuucgcgaccugcggccuggucgggcuggugacguuccuccugcugugcggccgcuccugcaccaccagccucuacaaggggguguacgagcugcagacccuggagcucaacauggagacgcugaacaugaccaugccgcuguccugcaccaagaacaacagccaccacuacaucauggucggcaacgagaccggccucgagcugacgcugaccaacaccuccaucaucaaccacaaguucugcaaccucagcgacgcccacaagaagaaccuguacgaccacgcccugauguccaucaucagcaccuuccaccucuccauccccaacuucaaccaguacgaggccaugagcugcgacuucaacgggggcaagaucuccgugcaguacaaccugagccacuccuacgccggggacgcggccaaccacugcggcacgguggccaacgggguccugcagaccuucaugcggauggccuggggcggcagcuacaucgcgcucgacuccgggugcggcaacugggacugcaucaugaccagcuaccaguaccugaucauccagaacaccacgugggaggaccacugccaguucucccggcccagccccaucggguaccugggccuccugucccagcgcacccgggacaucuacaucagccgccggcgccggggcaccuucaccuggacgcugagcgacuccgaggggaaggacaccccgggcggguacugccugacccgcuggaugcucaucgaggccgagcugaagugcuucggcaacaccgccguggccaagugcaacgagaagcacgacgaggaguucugcgacaugcugcggcuguucgacuucaacaagcaggccauccagcgccugaaggcgcccgcccagaugagcauccagcugaucaacaaggccgugaacgcccucaucaacgaccagcugaucaugaagaaccaccuccgggacaucaugugcauccccuacugcaacuacuccaaguacugguaccucaaccacacgaccaccggccgcaccagccugcccaagugcuggcuggucuccaacggcagcuaccucaacgagacgcacuucuccgacgacaucgagcagcaggccgacaacaugaucaccgagaugcugcagaaggaguacauggagcggcaggggaagacgccccugggccucguggaccuguucguguucagcaccuccuucuaccugaucagcaucuuccugcaccucgucaagaucccgacccaccgccacaucguggggaaguccugccccaagccccaccggcugaaccacaugggcaucugcagcugcgggcuguacaagcagcccggcgugccggucaaguggaagcgcugaggacuaguuauaagacugacuagcccgaugggccucccaacgggcccuccuccccuccuugcaccgagauuaauaaaaaaaaaaaaaaaaaaaaaaaaaaaaaaaaaaaaaaaaaaaaaaaaaaaaaaaaaaaaaaaaugcaucccccccccccccccccccccccccccccccaaaggcucuuuucagagccaccagaauu

SEQ ID NO: 7292 - RNA, 1690 nt, Artificial Sequence
  mRNA product Design i-3 comprising derived and/or modified sequence from LASV(LP;Clade I)__AAF86701__GPCstabilized (opt1)
gggagaaagcuuaccaugggccagaucaucaccuucuuccaggaggugccccacgucaucgaggaggugaugaacaucgugcugaucgcccucagccugcuggccauccucaaggggcuguacaacaucgcgaccugcggcaucaucgggcuggucgccuuccucuuccugugcggcaaguccugcagccugacgcucaagggcggguacgagcugcagacccuggagcucaacauggagacccugaacaugaccaugccgcuguccugcacgaagaacagcucccaccacuacauccgcgugggcaacgagaccgggcucgagcugacccugaccaacacgagcaucaucaaccacaaguucugcaaccucuccgacgcccacaagaagaaccuguacgaccacgcccugaugagcaucaucuccaccuuccaccucagcauccccaacuucaaccaguacgaggccauguccugcgacuucaacggcgggaagaucagcgugcaguacaaccugucccacagcuacgcgggcgacgccgccgagcacugcgggaccgucgccaacggcgugcugcagaccuucaugcggauggcguggggcgggcgcuacaucgcccucgacuccggcugcgggaacugggacugcaucaugacgagcuaccaguaccugaucauccagaacaccaccugggaggaccacugccaguucucccggcccagccccaucggcuaccugggccuccugucccagcgcacccgggacaucuacaucagccgccggcgccgggggacguucaccuggacccugagcgacuccgagggcaacgagacccccgggggcuacugccugacgcgcuggaugcucaucgaggccgagcugaagugcuucgggaacaccgccguggccaagugcaacgagaagcacgacgaggaguucugcgacaugcugcggcuguucgacuucaacaagcaggcgauccgccggcugaaggcccccgcccagaugagcauccagcugaucaacaaggccgucaacgcccucaucaacgaccagcugaucaugaagaaccaccuccgcgacaucaugugcauccccuacugcaacuacuccaaguacugguaccucaaccacaccagcuccggccggaccagccugcccaagugcuggcugaucuccaacgggagcuaccucaacgagacgcaguucuccgacgacaucgagcagcaggcggacaacaugaucaccgagaugcugcagaaggaguacaucgagcgccagggcaagaccccgcuggggcucguggacaucuucaucuucagcaccuccuucuaccugaucagcaucuuccugcaccugaucaagaucccgacgcaccggcacaucgugggcaagcccugccccaagccccaccgccucaaccacaugggggucugcuccugcggccuguacaagcacccgggcgugcccaccaaguggaagcggugaggacuaguuauaagacugacuagcccgaugggccucccaacgggcccuccuccccuccuugcaccgagauuaauaaaaaaaaaaaaaaaaaaaaaaaaaaaaaaaaaaaaaaaaaaaaaaaaaaaaaaaaaaaaaaaaugcaucccccccccccccccccccccccccccccccaaaggcucuuuucagagccaccagaauu

SEQ ID NO: 7293 - RNA, 1690 nt, Artificial Sequence
  mRNA product Design i-3 comprising derived and/or modified sequence from LASV(803213;Clade II)__AAF86703__GPCstabilized (opt1)
gggagaaagcuuaccaugggccagaucaucaccuucuuccaggaggugccccacgucaucgaggaggugaugaacaucgugcugaucgcccucagccugcuggccauccucaaggggaucuacaacgucgcgaccugcggccuguucgggcugaucuccuuccuccugcugugcggccgcagcugcuccgugacguacaaggggguguacgagcuccagacccuggagcugaacauggccaaccucaacaugaccaugccgcugagcugcaccaagaacaacucccaccacuacaucauggucggcaacgagacgggccuggagcucacccugaccaacaccagcaucaucaaccacaaguucugcaaccuguccgacgcccacaagaagaaccucuacgaccacgcccugaugagcaucaucuccacguuccaccugagcauccccaacuucaaccaguacgaggccauguccugcgacuucaacgggggcaagaucagcgugcaguacaaccucucccacagcuucgcgguggacgccgccaaccacugcgggaccaucgccaacggcguccugcagaccuucaugcggauggcguggggcggguccuacaucgcccuggacagcggcugcgggaacugggacugcaucaugaccuccuaccaguaccucaucauccagaacacgaccugggaggaccacugccaguucagccgccccucccccaucggcuaccuggggcugcucagccagcggacccgcgacaucuacaucagccggcgccgccggggcaccuucacguggacccucuccgacagcgagggcaacgaggcccccgggggcuacugccugacccgguggaugcugaucgaggccgagcucaagugcuucgggaacaccgccguggcgaagugcaacgagaagcacgacgaggaguucugcgacaugcugcgccuguucgacuucaacaagcaggccaucaagcggcucaagacgcccgcccagauguccauccagcugaucaacaaggccgugaacgcccugaucaacgaccagcucaucaugaagaaccaccuccgcgacaucaugugcauccccuacugcaacuacagccgguacugguaccugaaccacaccgucaccgggaagaccucccugccccgcugcuggcuggugagcaacggcuccuaccugaacgagacgcacuucagcgacgacaucgagcagcaggcggacaacaugaucaccgagaugcuccagaaggaguacauggaccggcagggcaagaccccgcuggggcugguggaccucuucgucuucuccaccagcuucuaccugaucuccaucuuccugcaccuggugaagaucccgacgcaccgccacaucgugggcaagcccugccccaagccccaccggcucaaccacauggggaucugcagcugcggccuguacaagcacccggggguccccgugaaguggaagcgcugaggacuaguuauaagacugacuagcccgaugggccucccaacgggcccuccuccccuccuugcaccgagauuaauaaaaaaaaaaaaaaaaaaaaaaaaaaaaaaaaaaaaaaaaaaaaaaaaaaaaaaaaaaaaaaaaugcaucccccccccccccccccccccccccccccccaaaggcucuuuucagagccaccagaauu

SEQ ID NO: 7294 - RNA, 1690 nt, Artificial Sequence
  mRNA product Design i-3 comprising derived and/or modified sequence from LASV(GA391;Clade III)__CAA36645__GPCstabilized (opt1)
gggagaaagcuuaccaugggccagaucgugaccuucuuccaggaggucccccacgugaucgaggaggugaugaacaucguccugaucgcccucagcauccuggccauccugaaggggcucuacaacguggcgaccugcggccugaucgggcuggugacguuccuccugcuguccggccgcagcugcucccucaucuacaaggggaccuacgagcugcagacccuggagcucaacauggagacccugaacaugacgaugccgcugagcugcaccaagaacaacucccaccacuacauccgggucggcaacgagaccggccucgagcugacccugacgaacaccagcauccucaaccacaaguucugcaaccuguccgacgcccacaagcgcaaccuguacgaccacagccucauguccaucaucagcaccuuccaccuguccauccccaacuucaaccaguacgaggccaugagcugcgacuucaacgggggcaagaucaccgugcaguacaaccugucccacagcuucgccguggacgccgcggggcacugcggcacgcucgccaacgggguccugcagaccuucaugcggauggccuggggcggcuccuacaucgcccuggacagcgggugcggcaacugggacugcaucaugaccuccuaccaguaccucaucauccagaacaccacgugggacgaccacugccaguucagccggcccucccccaucggguaccugggccugcucagccagcgcacccgggacaucuacaucagccgccggcgccggggcaccuucaccuggacgcucuccgacagcgaggggaacgagaccccgggcggguacugccugacccgcuggaugcugaucgaggcggagcucaagugcuucggcaacaccgccguggccaagugcaacgagaagcacgacgaggaguucugcgacaugcugcggcuguucgacuucaacaagcaggccauccgccggcucaagacgcccgcccagauguccauccagcugaucaacaaggcggugaacgcccugaucaacgaccagcucaucaugaagaaccaccuccgcgacaucaugugcauccccuacugcaacuacagccgguacugguaccugaaccacaccuccaccggcaagaccagccugccccgcugcuggcugaucuccaacggcagcuaccugaacgagacgaaguucuccgacgacaucgagcagcaggccgacaacaugaucaccgagaugcuccagaaggaguacaucgaccggcaggggaagacgccccugggccuggucgaccuguucguguucagcaccuccuucuaccucaucagcaucuuccugcaccuggugaagaucccgacccaccgccacaucgucgggaagcccugccccaagccccaccggcucaaccacaugggcaucugcuccugcgggcuguacaagcagccgggcgugcccgugcgcuggaagcggugaggacuaguuauaagacugacuagcccgaugggccucccaacgggcccuccuccccuccuugcaccgagauuaauaaaaaaaaaaaaaaaaaaaaaaaaaaaaaaaaaaaaaaaaaaaaaaaaaaaaaaaaaaaaaaaaugcaucccccccccccccccccccccccccccccccaaaggcucuuuucagagccaccagaauu

SEQ ID NO: 7295 - RNA, 1693 nt, Artificial Sequence
  mRNA product Design i-3 comprising derived and/or modified sequence from LASV(AV;Clade V)__CCA30314__GPCstabilized (opt1)
gggagaaagcuuaccaugggccagaucgugaccuucuuccaggaggucccccacgugaucgaggaggugaugaacaucguccugaucgcccucagcauccuggccgugcugaaggggcucuacaacaucgcgaccugcggccugaucgggcugaucacguuccuccugcugugcggccgcuccugcagcuccaaccucuacaaggggguguacgagcugcagagccuggaccucaacauggagacccugaacaugaccaugccgcuguccugcaccaagaacaacagccaccacuacauccgggucggcaacgacacgggccucgagcugacccugaccaacaccuccauccucaaccacaaguucugcaaccugagcgacgcccacaagaaggaccuguacgaccacgcccucauguccaucaucagcacguuccaccuguccauccccaacuucaaccaguacgaggccaugagcugcgacuucaacgggggcaagaucuccgugcaguacaaccugagccacuccuacgccaucgacgcggccaaccacugcgggaccguggccaacggcauccuccagaccuucaugcgcauggccuggggcgggagcuacaucgcgcuggacuccggcugcgggaacugggacugcaucaugaccagcuaccaguaccugaucauccagaacacgaccugggagaaccacugccaguucucccgccccagccccaucggcuaccucgggcugcugagccagcggacccgcgacaucuacaucucccggcgccgccggggcaccuucacguggacccugagcgacuccgagggcaacgccacccccgggggcuacugccucacccgguggaugcugaucgaggccgagcugaagugcuucgggaacacggccgucgccaagugcaacgagaagcacgacgaggaguucugcgacaugcuccgccuguucgacuucaacaagcaggcgaucagccggcugaagucccccgcccagaugagcauccagcucaucaacaaggccgugaacgcccugaucaacgaccagcugaucaugaagaaccaccuccgcgacaucaugugcauccccuacugcaacuacuccaaguacugguaccugaaccacaccaucaccgggaagaccagccugcccaagugcuggcucguguccaacggcagcuaccugaacgagacgcacuucuccgacgacaucgagcagcaggccgacaacaugaucaccgagaugcugcagaaggaguacauggagcggcagggcaagaccccgcucgggcuggucgaccuguucguguucagcaccuccuucuaccugaucagcaucuuccuccgccuggugaagaucccgacgcaccggcacaucgucggcaagcccugccccaagccccaccgccugaaccacauggggaucugcuccugcggccucuacaagcagccgggggugcccgugcgguggaagcgcugaggacuaguuauaagacugacuagcccgaugggccucccaacgggcccuccuccccuccuugcaccgagauuaauaaaaaaaaaaaaaaaaaaaaaaaaaaaaaaaaaaaaaaaaaaaaaaaaaaaaaaaaaaaaaaaaugcaucccccccccccccccccccccccccccccccaaaggcucuuuucagagccaccagaauu

SEQ ID NO: 7296 - RNA, 1690 nt, Artificial Sequence
  mRNA product Design i-3 comprising derived and/or modified sequence from LASV(Togo/2016/7082;Clade VI)__AMR44577__GPCstabilized (opt1)
gggagaaagcuuaccaugggccagaucaucaccuucuuccaggaggugccccacgucaucgaggaggugaugaacaucgugcugaucgcccucagccugcuggccauccucaagggggucuacaacguggcgaccugcggcaucaucgggcuggugacguuccuguuccucugcggccgcuccugcagccugaucuacaagggguccuacgagcugcagacccucgagcugaacauggagacccugaacaugaccaugccgcucagcugcacgaagaacuccagccaccacuacauccgggucggcaacgagaccggccuggagcugacccucaccaacacguccaucaucaaccacaaguucugcaaccugagcgacgcccacaagcgcaaccuguacgaccacgcccucauguccauccugagcaccuuccaccuguccauccccaacuucaaccaguacgaggccaugagcugcgacuucaacgggggcaagaucuccgugcaguacaaccucagccacgccuacgcgguggacgccgccgagcacugcgggaccgucgccaacggcgugcugcagaccuucaugcggauggcguggggcggguccuacaucgcccuggacagcggcugcgggaacugggacugcaucaugacguccuaccaguaccucaucauccagaacaccaccugggaggaccacugccaguucagccggcccucccccaucggcuaccuggggcugcucagccagcgcacccgggacaucuacaucagccgccggcgccggggcacguucaccuggacccucuccgacagcgagggcaacgagacccccgggggcuacugccugacgcgcuggaugcugaucgaggccgagcucaagugcuucgggaacaccgccguggccaagugcaacgagaagcacgacgaggaguucugcgacaugcugcggcuguucgacuucaacaagcaggcgauccagcgccucaagucccccgcccagaugagcauccagcugaucaacaaggccgucaacgcccugaucaacgaccagcucaucaugaagaaccaccuccgggacaugaugugcauccccuacugcaacuacuccaaguacugguaccugaaccacaccagcuccgggcgcaccagccugcccaagugcuggcugguguccaacggcagcuaccugaacgagacgcacuucuccgacgacaucgagcagcaggccgacaacaugaucaccgagaugcuccagaaggaguacaucgaccggcagggcaagaccccgcuggggcugguggaccucuucgucuucagcaccuccuucuaccugaucagcaucuuccugcaccugaucaagaucccgacgcaccgccacaucgugggcaagcccugccccaagccccaccggcucaaccacauggggaucugcuccugcggccuguacaagcagccgggggugcccacccgcuggaagcggugaggacuaguuauaagacugacuagcccgaugggccucccaacgggcccuccuccccuccuugcaccgagauuaauaaaaaaaaaaaaaaaaaaaaaaaaaaaaaaaaaaaaaaaaaaaaaaaaaaaaaaaaaaaaaaaaugcaucccccccccccccccccccccccccccccccaaaggcucuuuucagagccaccagaauu

SEQ ID NO: 7297 - RNA, 1690 nt, Artificial Sequence
  mRNA product Design i-3 comprising derived and/or modified sequence from LASV(KAK-428;Clade n.d. (VII))__ANH09740__GPCstabilized (opt1)
gggagaaagcuuaccaugggccagaucgugaccuucuuccaggaggucccccacgugaucgaggaggugaugaacaucguccugaucgcccucagccugcuggccauccucaaggggcuguacaacuucgcgaccugcggcgugaucgggcugaucacguuccuccugcugugcggccgcuccugcagcgccaccuacaaggggcaguacgagcuccagacccuggagcugaacauggagucccucaacaugaccaugccgcugagcugcacgaagaacaacucccaccacuacauccgggccggcaacaacaccggccuggagcucacccugaccaacacgagcaucaucucccacaaguucugcaaccugagcgacgcccacaagaagaaccucuacgaccacacccugauguccaucaucaccaccuuccaccugagcauccccaacuucaaccaguacgaggccauguccugcgacuucaacgggggcaagaucagcauccaguacaaccucucccacagcuacgcgggggacgccgcccagcacugcggcacgguggccaacgggguccugcagaccuucaugcgcauggcguggggcggcuccuaccuggcccucgacagcgggugccgcggcugggacugcaucaucuccagcuaccaguaccugaucauccagaacaccaccugggacgaccacugccaguucucccggcccagccccaucggguaccugggcuucgugagccagaagacgcgcgacaucuacaucucccggcgccgccggggcaccuucaccuggacccugagcgacuccgaggggcacgacaugccgggcggguacugccucacgcgguggaugcugaucgaggccgaccugaagugcuucggcaacaccgccguggccaagugcaacgagaagcacgacgaggaguucugcgacauguggcgccucuucgacuucaacaagcaggcgauccagcggcugaaggcccccgcccagaugaacauccagcugaucaacaaggccgucaacgcccucaucaacgaccagcugaugaugaagaaccaccuccgcgacaucaugugcauccccuacugcaacuacagcaaguucugguaccugaacaacaccaccacgggccggaccucccugccccgcugcuggcugaucagcaacggcuccuaccucaacgagacccacuucagcgacgacaucgagcagcaggcggacaacaugaucaccgagaugcugcagaaggaguacauggaccggcaggggaagacgccccugggccucguggaccuguucguguucuccaccagcuucuaccugaucaccaucuuccuccaccuggucaagaucccgacccaccgccacaucguggggaagcccugccccaagccccaccggcugaaccacaugggcaucugcuccugcgggcuguacaagcagccgggcgugcccguccgcuggaagcggugaggacuaguuauaagacugacuagcccgaugggccucccaacgggcccuccuccccuccuugcaccgagauuaauaaaaaaaaaaaaaaaaaaaaaaaaaaaaaaaaaaaaaaaaaaaaaaaaaaaaaaaaaaaaaaaaugcaucccccccccccccccccccccccccccccccaaaggcucuuuucagagccaccagaauu

SEQ ID NO: 7298 - RNA, 1690 nt, Artificial Sequence; identical to SEQ ID NO: 7292
  mRNA product Design i-3 comprising derived and/or modified sequence from LASV(Pinneo-NIG-1969;Clade I)__AIT17836__GPCstabilized (opt1)

SEQ ID NO: 7299 - RNA, 1690 nt, Artificial Sequence
  mRNA product Design i-3 comprising derived and/or modified sequence from LASV(ISTH0009-NIG-2011;Clade II)__AIT17404__GPCstabilized (opt1)
gggagaaagcuuaccaugggccagaucaucaccuucuuccaggaggugccccacgucaucgaggaggugaugaacaucgugcugaucgcccucagccugcuggccauccucaaggggaucuacaacgucgcgaccugcggccuguucgggcugguguccuuccuccugcugugcggccgcagcugcuccacgaccuacaaggggguguacgagcuccagacccuggagcuggacauggccagccucaacaugaccaugccgcuguccugcacgaagaacaacagccaccacuacaucauggucggcaacgagaccggccuggagcucacccugaccaacacguccaucaucaaccacaaguucugcaaccugagcgacgcccacaagaagaaccucuacgaccacgcccugauguccaucaucagcaccuuccaccuguccauccccaacuucaaccaguacgaggccaugagcugcgacuucaacgggggcaagaucuccgugcaguacaaccucagccacgcguacgccguggacgccgccaaccacugcgggaccaucgcgaacggcguccugcagaccuucaugcggauggccuggggcggguccuacaucgcccuggacagcggcugcggguccugggacugcaucaugacgagcuaccaguaccucaucauccagaacaccaccugggaggaccacugccaguucucccgccccagccccaucggcuaccuggggcugcucagccagcggacccgcgacaucuacaucucccggcgccgccggggcacguucaccuggacccucagcgacuccgagggcaacgagacccccgggggcuacugccugacgcgguggaugcugaucgaggccgagcucaagugcuucgggaacaccgccguggcgaagugcaacgagaagcacgacgaggaguucugcgacaugcugcgccuguucgacuucaacaagcaggccauccggcgccucaagacccccgcccagaugagcauccagcugaucaacaaggccgugaacgcccugaucaacgaccagcucaucaugaagaaccaccuccgggacaucaugugcaucccguacugcaacuacuccaaguacugguaccugaaccacaccgucacggggaagaccagccugccccgcugcuggcugguguccaacggcagcuaccugaacgagacccacuucuccgacgacaucgagcagcaggcggacaacaugaucaccgagcuccugcagaaggaguacauggaccggcagggcaagacgccccuggggcucguggaccuguucgucuucagcaccuccuucuaccugaucagcaucuuccugcaccucaucaagaucccgacccaccgccacaucaccggcaagcccugccccaagccccaccggcugaaccacauggggaucugcuccugcggccuguacaagcacccgggggugcccgugaaguggaagcgcugaggacuaguuauaagacugacuagcccgaugggccucccaacgggcccuccuccccuccuugcaccgagauuaauaaaaaaaaaaaaaaaaaaaaaaaaaaaaaaaaaaaaaaaaaaaaaaaaaaaaaaaaaaaaaaaaugcaucccccccccccccccccccccccccccccccaaaggcucuuuucagagccaccagaauu

SEQ ID NO: 7300 - RNA, 1690 nt, Artificial Sequence
  mRNA product Design i-3 comprising derived and/or modified sequence from LASV(ISTH2010-NIG-2012;Clade II)__AIT17482__GPCstabilized (opt1)
gggagaaagcuuaccaugggccagaucaucaccuucuuccaggaggugccccacgucaucgaggaggugaugaacaucgugcugaucgcccucagccugcuggccauccucaaggggaucuacaacgucgcgaccugcggccuguucgggcugguguccuuccuccugcugugcggccgcagcugcuccacgaccuacaaggggguguacgagcuccagacccuggagcuggacauggccagccucaacaugaccaugccgcuguccugcacgaagaacaacagccaccacuacaucauggucggcaacgagaccggccuggagcucacccugaccaacacguccaucaucaaccacaaguucugcaaccugagcgacgcccacaagaagaaccucuacgaccacgcccugauguccaucaucagcaccuuccaccuguccauccccaacuucaaccaguacgaggccaugagcugcgacuucaacgggggcaagaucuccgugcaguacaaccucagccacgcguacgccguggacgccgccaaccacugcgggaccaucgcgaacggcguccugcagaccuucaugcggauggccuggggcggguccuacaucgcccuggacagcggcugcggguccugggacugcaucaugacgagcuaccaguaccucaucauccagaacaucaccugggaggaccacugccaguucucccgccccagccccaucggcuaccuggggcugcucagccagcggacccgcgacaucuacaucucccggcgccgccggggcaccuucacguggacccucagcgacuccgagggcaacgagacccccgggggcuacugccugacccgguggaugcugaucgaggccgagcucaagugcuucgggaacacggccguggcgaagugcaacgagaagcacgacgaggaguucugcgacaugcugcgccuguucgacuucaacaagcaggccauccggcgccucaagacccccgcccagaugagcauccagcugaucaacaaggccgugaacgcccugaucaacgaccagcucaucaugaagaaccaccuccgggacaucaugugcauccccuacugcaacuacuccaaguacugguaccugaaccacaccgucaccgggaagacgagccugccccgcugcuggcugguguccaacggcagcuaccugaacgagacccacuucuccgacgacaucgagcagcaggcggacaacaugaucaccgagcuccugcagaaggaguacaucgaccggcagggcaagaccccgcuggggcucguggaccuguucgucuucagcacguccuucuaccugaucagcaucuuccugcaccucgugaagaucccgacccaccgccacguggucggcaagcccugccccaagccccaccggcugaaccacauggggaucugcuccugcggccuguacaagcacccgggggugcccgugaaguggaagcgcugaggacuaguuauaagacugacuagcccgaugggccucccaacgggcccuccuccccuccuugcaccgagauuaauaaaaaaaaaaaaaaaaaaaaaaaaaaaaaaaaaaaaaaaaaaaaaaaaaaaaaaaaaaaaaaaaugcaucccccccccccccccccccccccccccccccaaaggcucuuuucagagccaccagaauu

SEQ ID NO: 7301 - RNA, 1690 nt, Artificial Sequence
  mRNA product Design i-3 comprising derived and/or modified sequence from LASV(Lassa virus/H.sapiens-wt/NGA/2015/ISTH_0543;Clade II)__AVO03639__GPCstabilized (opt1)
gggagaaagcuuaccaugggccagaucaucaccuucuuccaggaggugccccacgucaucgaggaggugaugaacaucgugcugaucgcccucagccugcuggccauccucaaggggaucuacaacgucgcgaccugcggccuguucgggcugguguccuuccuccugcugugcggccgcagcugcuccacgaccuacaaggggguguacgagcuccagacccuggagcuggacauggccaaccucaacaugaccaugccgcugagcugcacgaagaacaacucccaccacuacaucauggucggcaacgagaccggccuggagcucacccugaccaacacgagcaucaucaaccacaaguucugcaaccuguccgacgcccacaagaagaaccucuacgaccacgcccugaugagcaucaucuccaccuuccaccugagcauccccaacuucaaccaguacgaggccauguccugcgacuucaacgggggcaagaucagcgugcaguacaaccucucccacaccuacgcgguggacgccgccaaccacugcgggaccaucgccaacggcguccugcagacguucaugcggauggcguggggcgggagcuacaucgcccuggacuccggcugcgggagcugggacugcaucaugaccuccuaccaguaccucgugauccagaacaccaccugggaggaccacugccaguucagccgccccucccccaucggcuaccuggggcugcucagccagcggacgcgcgacaucuacaucagccggcgccgccggggcaccuucaccuggacccucuccgacagcgagggcaacgagacgcccgggggcuacugccugacccgguggaugcugaucgaggccgagcucaagugcuucgggaacaccgccguggccaagugcaacgagaagcacgacgaggaguucugcgacaugcugcgccuguucgacuucaacaagcaggcgauccggcgccucaagacccccgcccagauguccauccagcugaucaacaaggccgucaacgcccugaucaacgaccagcucaucaugaagaaccaccuccgggacaucaugugcauccccuacugcaacuacagcaaguacugguaccugaaccacacggugaccgggaagaccucccugccccgcugcuggcuggugagcaacggcuccuaccugaacgagacccacuucagcgacgacaucgagcagcaggccgacaacaugaucacggagcuccugcagaaggaguacaucgaccggcagggcaagaccccgcuggggcucgucgaccuguucguguucuccaccagcuucuaccugaucuccaucuuccugcaccucgugaagaucccgacccaccgccacaucacgggcaagcccugccccaagccccaccggcugaaccacauggggaucugcagcugcggccuguacaagcacccggggguccccgugaaguggaagcgcugaggacuaguuauaagacugacuagcccgaugggccucccaacgggcccuccuccccuccuugcaccgagauuaauaaaaaaaaaaaaaaaaaaaaaaaaaaaaaaaaaaaaaaaaaaaaaaaaaaaaaaaaaaaaaaaaugcaucccccccccccccccccccccccccccccccaaaggcucuuuucagagccaccagaauu

SEQ ID NO: 7302 - RNA, 1690 nt, Artificial Sequence
  mRNA product Design i-3 comprising derived and/or modified sequence from LASV(Lassa virus/H.sapiens-wt/NGA/2016/ISTH_0009;Clade II)__AVO03571__GPCstabilized (opt1)
gggagaaagcuuaccaugggccagaucaucaccuucuuccaggaggugccccacgucaucgaggaggugaugaacaucgugcugaucgcccucagccugcuggccauccucaaggggaucuacaacgucgcgaccugcggccugcuggggcucguguccuuccugcugcucugcggccgcagcugcuccacgaccuacaaggggguguacgagcugcagacccuggagcucgacauggccagccugaacaugaccaugccgcuguccugcacgaagaacaacagccaccacuacaucauggucggcaacgagaccggccucgagcugacccugaccaacacguccaucaucaaccacaaguucugcaaccucagcgacgcccacaagaagaaccuguacgaccacgcccugauguccaucaucagcaccuuccaccucuccauccccaacuucaaccaguacgaggccaugagcugcgacuucaacgggggccggaucuccgugcaguacaaccugagccacuccuacgcgguggacgccgccaaccacugcgggaccaucgccaacggcguccugcagaccuucaugcgcauggcguggggcgggagcuacaucgcccucgacuccggcugcgggagcugggacugcaucaugacguccuaccaguaccugaucauccagaacaccaccugggaggaccacugccaguucagccggcccagccccaucggcuaccuggggcuccugucccagcgcacccgggacaucuacaucagccgccggcgccggggcacguucaccuggacccuguccgacagcgagggcaacgagacccccgggggcuacugccugacgcgcuggaugcucaucgaggccgagcugaagugcuucgggaacaccgccguggccaagugcaacgagaagcacgacgaggaguucugcgacaugcugcggcuguucgacuucaacaagcaggcgauccgccggcugaagacccccgcccagauguccauccagcugaucaacaaggccgugaacgcccucaucaacgaccagcugaucaugaagaaccaccuccgcgacaucaugugcaucccguacugcaacuacagcaaguacugguaccucaaccacaccgucacggggaagaccucccugccccggugcuggcuggugagcaacggcuccuaccucaacgagacccacuucagcgacgacaucgagcagcaggccgacaacaugaucaccgagcugcugcagaaggaguacaucgaccgccagggcaagacgccccucgggcugguggaccuguucgucuucuccaccagcuucuaccugaucuccaucuuccuccaccuggugaagaucccgacccaccggcacaucaccggcaagcccugccccaagccccaccgccugaaccacauggggaucugcagcugcggccucuacaaccacccgggggugcccgucaaguggaagcggugaggacuaguuauaagacugacuagcccgaugggccucccaacgggcccuccuccccuccuugcaccgagauuaauaaaaaaaaaaaaaaaaaaaaaaaaaaaaaaaaaaaaaaaaaaaaaaaaaaaaaaaaaaaaaaaaugcaucccccccccccccccccccccccccccccccaaaggcucuuuucagagccaccagaauu

SEQ ID NO: 7303 - RNA, 1690 nt, Artificial Sequence
  mRNA product Design i-3 comprising derived and/or modified sequence from LASV(Lassa virus/H.sapiens-wt/NGA/2016/ISTH_0017;Clade II)__AVO03567__GPCstabilized (opt1)
gggagaaagcuuaccaugggccagaucaucaccuucuuccaggaggugccccacgucaucgaggaggugaugaacaucgugcugaucgcccucagccugcuggccauccucaaggggaucuacaacgucgcgaccugcggccuguucgggcugguguccuuccuccugcugugcggccgcagcugcuccacgaccuacaaggggguguacgagcuccagacccuggagcuggacauggccagccucaacaugaccaugccgcuguccugcacgaagaacaacagccaccacuacaucauggucggcaacgagaccggccuggagcucacccugaccaacacguccaucaucaaccacaaguucugcaaccugagcgacgcccacaagaagaaccucuacgaccacgcccugauguccaucaucagcaccuuccaccuguccauccccaacuucaaccaguacgaggccaugagcugcgacuucaacgggggcaagaucuccgugcaguacaaccucagccacaccuacgcgaucgacgccgccaaccacugcgggaccaucgccaacggcgugcugcagacguucaugcggauggcguggggcggguccuacaucgcccuggacagcggcugcggguccugggacugcaucaugaccagcuaccaguaccucaucauccagaacaccaccugggaggaccacugccaguucucccgccccagccccaucggcuaccuggggcugcucagccagcggacgcgcgacaucuacaucucccggcgccgccggggcaccuucaccuggacccucagcgacuccgagggcaacgagacgcccgggggcuacugccugacccgguggaugcugaucgaggccgagcucaagugcuucgggaacaccgccgucgccaagugcaacgagaagcacgacgaggaguucugcgacaugcugcgccuguucgacuucaacaagcaggcgauccggcgccucaagacccccgcccagaugagcauccagcugaucaacaaggccgugaacgcccugaucaacgaccagcucaucaugaagaaccaccuccgggacaucaugugcauccccuacugcaacuacuccaaguacugguaccugaaccacacggugaccgggaagaccagccugccccgcugcuggcuggucuccaacggcagcuaccugaacgagacccacuucuccgacgacaucgagcagcaggccgacaacaugaucacggagcuccugcagaaggaguacauggaccggcagggcaagaccccgcuggggcucguggaccuguucguguucagcaccuccuucuaccugaucagcaucuuccugcaccucguccgcaucccgacccaccggcacgugaucggcaagcccugccccaagccccaccgccugaaccacauggggaucugcuccugcggccuguacaagcacccgggggugcccgucaaguggaagcggugaggacuaguuauaagacugacuagcccgaugggccucccaacgggcccuccuccccuccuugcaccgagauuaauaaaaaaaaaaaaaaaaaaaaaaaaaaaaaaaaaaaaaaaaaaaaaaaaaaaaaaaaaaaaaaaaugcaucccccccccccccccccccccccccccccccaaaggcucuuuucagagccaccagaauu

SEQ ID NO: 7304 - RNA, 1690 nt, Artificial Sequence
  mRNA product Design i-3 comprising derived and/or modified sequence from LASV(Lassa virus/H.sapiens-wt/NGA/2018/ISTH_0959;Clade II)__AVV65099__GPCstabilized (opt1)
gggagaaagcuuaccaugggccagaucaucaccuucuuccaggaggugccccacgucaucgaggaggugaugaacaucgugcugaucgcccucagccugcuggccauccucaaggggaucuacaacgucgugaccugcggccuguucgggcugguguccuuccuccugcugugcggccgcagcugcuccacgaccuacaagggggucuacgagcuccagacccuggagcuggacauggcgagccucaacaugaccaugccgcuguccugcacgaagaacaacagccaccacuacaucauggugggcaacgagaccggccuggagcucacccugaccaacacguccaucaucaaccacaaguucugcaaccugagcgacgcccacaagaagaaccucuacgaccacgcccugauguccaucaucagcaccuuccaccuguccauccccaacuucaaccaguacgaggccaugagcugcgacuucaacgggggcaagaucuccgugcaguacaaccucagccacgccuacgcgaucgacgccgccaaccacugcgggaccaucgccaacggcguccugcagaccuucaugcggauggcguggggcggguccuacaucgcccuggacagcggcugcggguccugggacugcaucaugacgagcuaccaguaccucaucauccagaacaccaccugggaggaccacugccaguucucccgccccagccccaucggcuaccuggggcugcucagccagcggacccgcgacaucuacaucucccggcgccgccggggcacguucaccuggacccucagcgacuccgagggcaacgagacccccgggggcuacugccugacgcgguggaugcugaucgaggccgagcucaagugcuucgggaacaccgccguggccaagugcaacgagaagcacgacgaggaguucugcgacaugcugcgccuguucgacuucaacaagcaggcgauccggcgccucaagacccccgcccagaugagcauccagcugaucaacaaggccgugaacgcccugaucaacgaccagcucaucaugaagaaccaccuccgggacaucaugugcaucccguacugcaacuacuccaaguacugguaccugaaccacaccgucacggggaagaccagccugccccgcugcuggcugguguccaacggcagcuaccugaacgagacccacuucuccgacgacaucgagcagcaggccgacaacaugaucaccgagcuccugcagaaggaguacaucgaccggcagggcaagacgccccuggggcucguggaccuguucgucuucagcaccuccuucuaccugaucagcaucuuccugcaccucgugaagaucccgacccaccgccacgugaucggcaagcccugccccaagccccaccggcugaaccacauggggaucugcuccugcggccuguacaagcacccggggguccccgugaaguggaagcgcugaggacuaguuauaagacugacuagcccgaugggccucccaacgggcccuccuccccuccuugcaccgagauuaauaaaaaaaaaaaaaaaaaaaaaaaaaaaaaaaaaaaaaaaaaaaaaaaaaaaaaaaaaaaaaaaaugcaucccccccccccccccccccccccccccccccaaaggcucuuuucagagccaccagaauu

SEQ ID NO: 7305 - RNA, 1690 nt, Artificial Sequence
  mRNA product Design i-3 comprising derived and/or modified sequence from LASV(LASV003-NIG-2008;Clade II)__AIT17580__GPCstabilized (opt1)
gggagaaagcuuaccaugggccagaucaucaccuucuuccaggaggugccccacgucaucgaggaggugaugaacaucgugcugaucgcccucagccugcuggccauccucaaggggaucuacaacgucgcgaccugcggccuguucgggcugguguccuuccuccugcugugcggccgcagcugcuccacgaccuacaaggggguguacgagcuccagacccuggagcuggacauggccagccucaacaugaccaugccgcuguccugcacgaagaacaacagccaccacuacaucauggucggcaacgagaccggccuggagcucacccugaccaacacguccaucaucaaccacaaguucugcaaccugagcgacgcccacaagaagaaccucuacgaccacgcccugauguccaucaucagcaccuuccaccuguccauccccaacuucaaccaguacgaggccaugagcugcgacuucaacgggggcaagaucuccgugcaguacaaccucagccacaccuacgcgguggacgccgccaaccacugcgggaccaucgccaacggcguccugcagacguucaugcggauggcguggggcggguccuacaucgcccuggacagcggcugcggguccugggacugcaucaugaccagcuaccaguaccucaucauccagaacaccaccugggaggaccacugccaguucucccgccccagccccaucggcuaccuggggcugcucagccagcggacgcgcgacaucuacaucucccggcgccgccggggcaccuucaccuggacccucagcgacuccgagagcaacgagacgccgggcggguacugccugacccgguggaugcugaucgaggccgagcucaagugcuucggcaacaccgccguggccaagugcaacgagaagcacgacgaggaguucugcgacaugcugcgccuguucgacuucaacaagcaggcgauccggcgccucaaggcccccgcccagauguccauccagcugaucaacaaggccgugaacgcccugaucaacgaccagcucaucaugaagaaccaccuccgggacaucaugugcauccccuacugcaacuacagcaaguacugguaccugaaccacaccgucacgggccgcaccucccugccccggugcuggcuggugagcaacggguccuaccugaacgagacccacuucagcgacgacaucgagcagcaggcggacaacaugaucaccgagcuccugcagaaggaguacauggaccgccagggcaagacgccccugggccucguggaccuguucgucuucuccaccagcuucuaccugaucuccaucuuccugcaccucgugaagaucccgacccaccggcacgugaucgggaagcccugccccaagccccaccgccugaaccacaugggcaucugcagcugcgggcuguacaagcacccgggcguccccgugaaguggaagcggugaggacuaguuauaagacugacuagcccgaugggccucccaacgggcccuccuccccuccuugcaccgagauuaauaaaaaaaaaaaaaaaaaaaaaaaaaaaaaaaaaaaaaaaaaaaaaaaaaaaaaaaaaaaaaaaaugcaucccccccccccccccccccccccccccccccaaaggcucuuuucagagccaccagaauu

SEQ ID NO: 7306 - RNA, 1690 nt, Artificial Sequence
  mRNA product Design i-3 comprising derived and/or modified sequence from LASV(LASV035-NIG-2009;Clade II)__AIT17588__GPCstabilized (opt1)
gggagaaagcuuaccaugggccagaucaucaccuucuuccaggaggugccccacgucaucgaggaggugaugaacaucgugcugaucgcccucagccugcuggccauccucaaggggaucuacaacgucgcgaccugcggccuguucgggcugguguccuuccuccugcugugcggccgcagcugcuccacgaccuacaaggggguguacgagcuccagacccuggagcuggacauggccagccucaacaugaccaugccgcuguccugcacgaagaacaacagccaccacuacaucauggucggcaacgagaccggccuggagcucacccugaccaacacguccaucaucaaccacaaguucugcaaccugagcgacgcccacaagaagaaccucuacgaccacgcccugauguccaucaucagcaccuuccaccuguccauccccaacuucaaccaguacgaggccaugagcugcgacuucaacgggggcaagaucuccgugcaguacaaccucagccacgcguacgccguggacgccgccaaccacugcgggaccaucgcgaacggcguccugcagaccuucaugcggauggccuggggcggguccuacaucgcccuggacagcggcugcggguccugggacugcaucaugacgagcuaccaguaccucaucauccagaacaccaccugggaggaccacugccaguucucccgccccagccccaucggcuaccuggggcugcucagccagcggacccgcgacaucuacaucucccggcgccgccggggcacguucaccuggacccucagcgacuccgagggcaacgagacccccgggggcuacugccugacgcgguggaugcugaucgaggccgagcucaagugcuucgggaacaccgccguggcgaagugcaacgagaagcacgacgaggaguucugcgacaugcugcgccuguucgacuucaacaagcaggccauccggcgccucaaggcccccgcccagaugagcauccagcugaucaacaaggccgugaacgcgcugaucaacgaccagcucaucaugaagaaccaccuccgggacaucaugugcauccccuacugcaacuacuccaaguacugguaccugaaccacaccgucaccgggaagacgagccugccccgcugcuggcugguguccaacggcagcuaccugaacgagacccacuucuccgacgacaucgagcagcaggccgacaacaugaucaccgagcuccugcagaaggaguacaucgaccggcagggcaagaccccgcuggggcucguggaccuguucgucuucagcacguccuucuaccugaucagcaucuuccugcaccucgugaagaucccgacccaccgccacgugaucggcaagcccugccccaagccccaccggcugaaccacauggggaucugcuccugcggccuguacaagcacccggggguccccgugaaguggaagcgcugaggacuaguuauaagacugacuagcccgaugggccucccaacgggcccuccuccccuccuugcaccgagauuaauaaaaaaaaaaaaaaaaaaaaaaaaaaaaaaaaaaaaaaaaaaaaaaaaaaaaaaaaaaaaaaaaugcaucccccccccccccccccccccccccccccccaaaggcucuuuucagagccaccagaauu

SEQ ID NO: 7307 - RNA, 1690 nt, Artificial Sequence
  mRNA product Design i-3 comprising derived and/or modified sequence from LASV(LASV1000-NIG-2009;Clade II)__AIT17782__GPCstabilized (opt1)
gggagaaagcuuaccaugggccagaucaucaccuucuuccaggaggugccccacgucaucgaggaggugaugaacaucgugcugaucgcccucagccugcuggccauccucaaggggaucuacaacgucgcgaccugcggccuguucgggcugguguccuuccuccugcugugcggccgcagcugcuccacgaccuacaaggggguguacgagcuccagacccuggagcuggacauggccagccucaacaugaccaugccgcuguccugcacgaagaacaacagccaccacuacaucauggucggcaacgagaccggccuggagcucacccugaccaacacguccaucaucaaccacaaguucugcaaccugagcgacgcccacaagaagaaccucuacgaccacgcccugauguccaucaucagcaccuuccaccuguccauccccaacuucaaccaguacgaggccaugagcugcgacuucaacgggggcaagaucuccgugcaguacaaccucagccacaccuacgcgguggacgccgccaaccacugcgggaccaucgccaacggcguccugcagacguucaugcggauggcguggggcggguccuacaucgcccuggacagcggcugcggguccugggacugcaucaugaccagcuaccaguaccucaucauccagaacaccaccugggaggaccacugccaguucucccgccccagccccaucggcuaccuggggcugcucagccagcggacgcgcgacaucuacaucucccggcgccgccggggcaccuucaccuggacccucagcgacuccgagggcaacgagacgcccgggggcuacugccugacccgguggaugcugaucgaggccgagcucaagugcuucgggaacaccgccguggccaagugcaacgagaagcacgacgaggaguucugcgacaugcugcgccuguucgacuucaacaagcaggcgaucaagcggcucaagacccccgcccagaugagcauccagcugaucaacaaggccgugaacgcccugaucaacgaccagcucaucaugaagaaccaccuccgcgacaucaugugcauccccuacugcaacuacuccaaguacugguaccugaaccacacggucaccgggaagaccagccugccccggugcuggcugguguccaacggcagcuaccugaacgagacccacuucuccgacgacaucgagcagcaggccgacaacaugaucacggagcuccugcagaaggaguacaucgaccgccagggcaagaccccgcuggggcucguggaccuguucgucuucagcaccuccuucuaccugaucagcaucuuccugcaccucgugaagaucccgacccaccggcacguggucggcaagcccugccccaagccccaccgccugaaccacauggggaucugcuccugcggccuguacaagcacccgggggugcccgugaaguggaagcggugaggacuaguuauaagacugacuagcccgaugggccucccaacgggcccuccuccccuccuugcaccgagauuaauaaaaaaaaaaaaaaaaaaaaaaaaaaaaaaaaaaaaaaaaaaaaaaaaaaaaaaaaaaaaaaaaugcaucccccccccccccccccccccccccccccccaaaggcucuuuucagagccaccagaauu

SEQ ID NO: 7308 - RNA, 1690 nt, Artificial Sequence
  mRNA product Design i-3 comprising derived and/or modified sequence from LASV(LASV221-NIG-2010;Clade II)__AIT17624__GPCstabilized (opt1)
gggagaaagcuuaccaugggccagaucaucaccuucuuccaggaggugccccacgucaucgaggaggugaugaacaucgugcugaucgcccucagccugcuggccauccucaaggggaucuacaacgucgcgaccugcggccuguucgggcugguguccuuccuccugcugugcggccgcagcugcuccacgaccuacaaggggguguacgagcuccagacccuggagcuggacauggccagccucaacaugaccaugccgcuguccugcacgaagaacaacagccaccacuacaucauggucggcaacgagaccggccuggagcucacccugaccaacacguccaucaucaaccacaaguucugcaaccugagcgacgcccacaagaagaaccucuacgaccacgcccugauguccaucaucagcaccuuccaccuguccauccccaacuucaaccaguacgaggccaugagcugcgacuucaacgggggcaagaucuccgugcaguacaaccucagccacaccuacgcgaucgacgccgccaaccacugcgggaccaucgccaacggcgugcugcagacguucaugcggauggcguggggcggguccuacaucgcccuggacagcggcugcggguccugggacugcaucaugaccagcuaccaguaccucaucauccagaacaccaccugggaggaccacugccaguucucccgccccagccccaucggcuaccuggggcugcucagccagcggacgcgcgacaucuacaucucccggcgccgccggggcaccuucaccuggacccucagcgacuccgagggcaacgagacgcccgggggcuacugccugacccgguggaugcugaucgaggccgagcucaagugcuucgggaacaccgccgucgccaagugcaacgagaagcacgacgaggaguucugcgacaugcugcgccuguucgacuucaacaagcaggcgauccggcgccucaagacccccgcccagaugagcauccagcugaucaacaaggccgugaacgcccugaucaacgaccagcucaucaugaagaaccaccuccgggacaucaugugcauccccuacugcaacuacuccaaguacugguaccugaaccacacggugaccgggaagaccagccugccccgcugcuggcuggucuccaacggcagcuaccugaacgagacccacuucuccgacgacaucgagcagcaggccgacaacaugaucacggagaugcuccagaaggaguacauggaccggcagggcaagaccccgcuggggcugguggaccucuucguguucagcaccuccuucuaccugaucagcaucuuccugcaccuggucaagaucccgacccaccgccacgugaucggcaagcccugccccaagccccaccggcucaaccacauggggaucugcuccugcggccuguacaagcacccgggggugcccgucaaguggaagcgcugaggacuaguuauaagacugacuagcccgaugggccucccaacgggcccuccuccccuccuugcaccgagauuaauaaaaaaaaaaaaaaaaaaaaaaaaaaaaaaaaaaaaaaaaaaaaaaaaaaaaaaaaaaaaaaaaugcaucccccccccccccccccccccccccccccccaaaggcucuuuucagagccaccagaauu

SEQ ID NO: 7309 - RNA, 1690 nt, Artificial Sequence
  mRNA product Design i-3 comprising derived and/or modified sequence from LASV(LASV237-NIG-2010;Clade II)__AIT17638__GPCstabilized (opt1)
gggagaaagcuuaccaugggccagaucaucaccuucuuccaggaggugccccacgucaucgaggaggugaugaacaucgugcugaucgcccucagccugcuggccauccucaaggggaucuacaacgucgcgaccugcggccuguucgggcugguguccuuccuccugcugugcggccgcagcugcuccacgaccuacaaggggguguacgagcuccagacccuggagcuggacauggccagccucaacaugaccaugccgcuguccugcacgaagaacaacagccaccacuacaucauggucggcaacgagaccggccuggagcucacccugaccaacacguccaucaucaaccacaaguucugcaaccugagcgacgcccacaagaaggaccucuacgaccacgcccugauguccaucaucagcaccuuccaccuguccauccccaacuucaaccaguacgaggccaugagcugcgacuucaacgggggcaagaucuccgugcaguacaaccucagccacaccuacgcgguggacgccgccaaccacugcgggaccaucgccaacggcguccugcagacguucaugcggauggcguggggcggguccuacaucgcccuggacagcggcugcggguccugggacugcaucaugaccagcuaccaguaccucaucauccagaacaccaccugggaggaccacugccaguucucccgccccagccccaucggcuaccuggggcugcucagccagcggacgcgcgacaucuacaucucccggcgccgccggggcaccuucaccuggacccucagcgacuccgagggcaacgagacgcccgggggcuacugccugacccgguggaugcugaucgaggccgagcucaagugcuucgggaacaccgccguggccaagugcaacgagaagcacgacgaggaguucugcgacaugcugcgccuguucgacuucaacaagcaggcgauccggcgccucaagacccccgcccagaugagcauccagcugaucaacaaggccgugaacgcccugaucaacgaccagcucaucaugaagaaccaccuccgggacaucaugugcauccccuacugcaacuacuccaaguacugguaccugaaccacacggucaccgggaagaccagccugccccgcugcuggcugguguccaacggcagcuaccugaacgagacccacuucuccgacgacaucgagcagcaggccgacaacaugaucacggagcuccugcagaaggaguacauggaccggcagggcaagaccccgcuggggcucguggaccuguucgucuucagcaccuccuucuaccugaucagcaucuuccugcaccucaucaagaucccgacccaccgccacaucacgggcaagcccugccccaagccccaccggcugaaccacauggggaucugcuccugcggccuguacaagcacccgggggugcccgugaaguggaagcgcugaggacuaguuauaagacugacuagcccgaugggccucccaacgggcccuccuccccuccuugcaccgagauuaauaaaaaaaaaaaaaaaaaaaaaaaaaaaaaaaaaaaaaaaaaaaaaaaaaaaaaaaaaaaaaaaaugcaucccccccccccccccccccccccccccccccaaaggcucuuuucagagccaccagaauu

SEQ ID NO: 7310 - RNA, 1690 nt, Artificial Sequence
  mRNA product Design i-3 comprising derived and/or modified sequence from LASV(LASV253-NIG-2011;Clade II)__AIT17670__GPCstabilized (opt1)
gggagaaagcuuaccaugggccagaucaucaccuucuuccaggaggugccccacgucaucgaggaggugaugaacaucgugcugaucgcccucagccugcuggccauccucaaggggaucuacaacgucgcgaccugcggccuguucgggcugguguccuuccuccugcugugcggccgcagcugcuccacgaccuacaaggggguguacgagcuccagacccuggagcuggacauggccagccucaacaugaccaugccgcuguccugcacgaagaacaacagccaccacuacaucauggucggcaacgagaccggccuggagcucacccugaccaacacguccaucaucaaccacaaguucugcaaccugagcgacgcccacaagaagaaccucuacgaccacgcccugauguccaucaucagcaccuuccaccuguccauccccaacuucaaccaguacgaggccaugagcugcgacuucaacgggggcaagaucuccgugcaguacaaccucagccacaccuacgcgguggacgccgccaaccacugcgggaccaucgccaacggcguccugcagacguucaugcggauggcguggggcggguccuacaucgcccuggacagcggcugcggguccugggacugcaucaugaccagcuaccaguaccucaucauccagaacaccaccugggaggaccacugccaguucucccgccccagccccaucggcuaccuggggcugcucagccagcggacgcgcgacaucuacaucucccggcgccgccggggcaccuucaccuggacccucagcgacuccgagggcaacgagacgcccgggggcuacugccugacccgguggaugcugaucgaggccgagcucaagugcuucgggaacaccgccguggccaagugcaacgagaagcacgacgaggaguucugcgacaugcugcgccuguucgacuucaacaagcaggcgauccggcgccucaaggcccccgcccagaugagcauccagcugaucaacaaggccgugaacgcccugaucaacgaccagcucaucaugaagaaccaccuccgggacaucaugugcaucccguacugcaacuacuccaaguacugguaccugaaccacaccgucacggggcgcaccagccugccccggugcuggcugguguccaacggcagcuaccugaacgagacccacuucuccgacgacaucgagcagcaggcggacaacaugaucaccgagcuccugcagaaggaguacaucgaccgccagggcaagacgccccuggggcucguggaccuguucgucuucagcaccuccuucuaccugaucagcaucuuccugcaccucgugaagaucccgacccaccggcacaucaucggcaagcccugccccaagccccaccgccugaaccacauggggaucugcuccugcggccuguacaagcacccgggggugcccgucaaguggaagcggugaggacuaguuauaagacugacuagcccgaugggccucccaacgggcccuccuccccuccuugcaccgagauuaauaaaaaaaaaaaaaaaaaaaaaaaaaaaaaaaaaaaaaaaaaaaaaaaaaaaaaaaaaaaaaaaaugcaucccccccccccccccccccccccccccccccaaaggcucuuuucagagccaccagaauu

SEQ ID NO: 7311 - RNA, 1690 nt, Artificial Sequence
  mRNA product Design i-3 comprising derived and/or modified sequence from LASV(LASV254-NIG-2011;Clade II)__AIT17674__GPCstabilized (opt1)
gggagaaagcuuaccaugggccagaucaucaccuucuuccaggaggugccccacgucaucgaggaggugaugaacaucgugcugaucgcccucagccugcuggccauccucaaggggaucuacaacgucgcgaccugcggccuguucgggcugguguccuuccuccugcugugcggccgcagcugcuccacgaccuacaaggggguguacgagcuccagacccuggagcuggacaugaccaaccucaacaugacgaugccgcugagcugcaccaagaacaacucccaccacuacaucauggucggcaacgagaccggccuggagcucacccugacgaacaccagcaucaucaaccacaaguucugcaaccuguccgacgcccacaagaagaaccucuacaaccacgcccugaugagcaucaucuccaccuuccaccugagcauccccaacuucaaccaguacgaggccauguccugcgacuucaacgggggcaagaucagcgugcaguacaaccucucccacagcuacgccguggacgcggccaaccacugcgggaccaucgccaacggcguccugcagacguucaugcggauggccuggggcggguccuacaucgcgcuggacagcggcugcgggaacugggacugcaucaugaccuccuaccaguaccucaucauccagaacaccaccugggaggaccacugccaguucagccgccccucccccaucggcuaccuggggcugcucagccagcggacgcgcgacaucuacaucagccggcgccgccggggcaccuucaccuggacccucuccgacagcgagggcaacgagacgcccgggggcuacugccugacccgguggaugcugaucgaggccgagcucaagugcuucgggaacaccgccguggccaagugcaacgagaagcacgacgaggaguucugcgacaugcugcgccuguucgacuucaacaagcaggccauccggcgccucaagacccccgcgcaggccaacauccagcugaucaacaaggccgugaacgcccugaucaacgaccagcucaucaugaagaaccaccuccgggacaucaugugcauccccuacugcaacuacuccaaguacugguaccugaaccacacggucaccgggaagaccagccugccccgcugcuggcugguguccaacggcagcuaccugaacgagacccacuucuccgacgacaucgagcagcaggccgacaacaugaucacggagcuccugcagaaggaguacauggaccggcagggcaagaccccgcuggggcucguggaccuguucgucuucagcaccuccuucuaccugaucagcaucuuccugcaccucgugaagaucccgacccaccgccacgugaucggcaagcccugccccaagccccaccggcugaaccacauggggaucugcuccugcggccuguacaagcacccggggguccccgugaaguggaagcgcugaggacuaguuauaagacugacuagcccgaugggccucccaacgggcccuccuccccuccuugcaccgagauuaauaaaaaaaaaaaaaaaaaaaaaaaaaaaaaaaaaaaaaaaaaaaaaaaaaaaaaaaaaaaaaaaaugcaucccccccccccccccccccccccccccccccaaaggcucuuuucagagccaccagaauu

SEQ ID NO: 7312 - RNA, 1690 nt, Artificial Sequence
  mRNA product Design i-3 comprising derived and/or modified sequence from LASV(Nig08-A19;Clade III)__ADU56618__GPCstabilized (opt1)
gggagaaagcuuaccaugggccagaucgugaccuucuuccaggaggucccccacgugaucgaggaggugaugaacaucguccugaucgcccucagcauccuggccauccugaaggggcucuacaacaucgcgaccugcggccugaucgggcuggugacguuccuccugcuguccggccgcagcugcuccaugaccuacaaggggguguacgagcuccagacccuggagcugaacaugaacacccucaacaugacgaugccgcugagcugcaccaagaacaacucccaccacuacaucauggucggcaacgagaccggccuggagcucacccugacgaacaccagccugcuccaccacaaguucugcaaccuguccgacgcccacaagaagaaccuguacgaccacacccucaugagcaucaucuccaccuuccaccugagcauccccaacuucaaccaguacgaggccauguccugcgacuucaacgggggcaagaucacggugcaguacaaccugagccacuccuacgccaucgacgccgcgaaccacugcgggaccguggccaacggcguccuccagaccuucaugcggauggccuggggcgggagcuacaucgcccuggacuccggcugcgggaagugggacugcaucaugaccagcuaccaguaccugaucauccagaacacgaccugggaggaccacugccaguucucccggcccagccccaucggcuaccucgggcugcugucccagcgcacccgggacaucuacaucagccgccggcgccggggcaccuucacguggacccugagcgacuccgagggcaacgagacccccgggggcuacugccucacccgcuggaugcugaucgaggcggagcugaagugcuucgggaacacggccguggccaagugcaacgagaagcacgacgaggaguucugcgacaugcuccggcuguucgacuucaacaagcaggccauccgccggcugaaggcccccgcgcagaugagcauccagcucaucaacaaggccgugaacgcccugaucaacgaccagcugaucaugaagaaccaccuccgcgacaucaugugcauccccuacugcaacuacuccaaguacugguaccugaaccacaccagcaccgggcggaccucccugccccgcugcuggcucgucagcaacggcuccuaccugaacgagacgcacuucagcgacgacaucgagcagcaggccgacaacaugaucaccgagaugcugcagaaggaguaccucgaccggcagggcaagaccccgcuggggcugguggaccuguucguguucuccaccagcuucuaccucaucuccaucuuccugcaccuggucaagaucccgacgcaccgccacaucgugggcaagcccugccccaagccccaccggcucaaccacauggggaucugcagcugcggccuguacaagcagccgggggugcccguccgcuggaagcggugaggacuaguuauaagacugacuagcccgaugggccucccaacgggcccuccuccccuccuugcaccgagauuaauaaaaaaaaaaaaaaaaaaaaaaaaaaaaaaaaaaaaaaaaaaaaaaaaaaaaaaaaaaaaaaaaugcaucccccccccccccccccccccccccccccccaaaggcucuuuucagagccaccagaauu

SEQ ID NO: 7313 - RNA, 1693 nt, Artificial Sequence
  mRNA product Design i-3 comprising derived and/or modified sequence from LASV(G1180-SLE-2010;Clade IV)__AIT17168__GPCstabilized (opt1)
gggagaaagcuuaccaugggccagaucgugaccuucuuccaggaggucccccacgugaucgaggaggugaugaacaucguccugaucgcccucagcauccuggccgugcugaaggggcucuacaacuucgcgaccugcggccugguggggcugcucaccuuccugcugcucugcggccgcuccugcaccgccagccgguacaagggggucuacgagcugcagacccuggagcucaacauggagacccugaacaugacgaugccgcuguccugcaccaagaacaacagccaccacuacaucauggugggcaacgagaccggccucgagcugacccugacgaacaccuccaucaucaaccacaaguucugcaaccucagcgacgcccacaagaagaaccuguacgaccacgcccugauguccaucaucagcaccuuccaccucuccauccccaacuucaaccaguacgaggccaugagcugcgacuucaacgggggcaagaucuccgugcaguacaaccugagccacuccuacgcgggggacgccgccaaccacugcggcaccgucgccaacggggugcugcagacguucaugcgcauggcguggggcggcagcuacaucgcccucgacuccgggugcggcagcugggacugcaucaugaccuccuaccaguaccugaucauccagaacaccaccugggaggaccacugccaguucagccggcccucccccaucggguaccugggccuccugagccagcgcacgcgggacaucuacaucagccgccggcgccggggcaccuucaccuggacccuguccgacagcgaggggaaggacacgccgggcggguacugccugacccgcuggaugcucaucgaggccgagcugaagugcuucggcaacaccgccguggccaagugcaacgagaagcacgacgaggaguucugcgacaugcugcggcuguucgacuucaacaagcaggcgauccagcgccugaaggcccccgcccagauguccauccagcugaucaacaaggccgucaacgcccucaucaacgaccagcugaucaugaagaaccaccuccgggacaucaugugcauccccuacugcaacuacagcaaguacugguaccucaaccacaccacgaccggcaagaccucccugcccaagugcuggcuggugagcaacggcuccuaccucaacgagacccacuucagcgacgacaucgagcagcaggcggacaacaugaucacggagaugcugcagaaggaguacauggagcgccaggggaagacgccccugggccucguggaccuguucgucuucuccaccagcuucuaccugaucuccaucuuccugcaccucgugaagaucccgacccaccggcacaucgugggcaagagcugccccaagccccaccgccugaaccacauggggaucugcuccugcgggcuguacaagcagcccggcgucccggugaaguggaagcggugaggacuaguuauaagacugacuagcccgaugggccucccaacgggcccuccuccccuccuugcaccgagauuaauaaaaaaaaaaaaaaaaaaaaaaaaaaaaaaaaaaaaaaaaaaaaaaaaaaaaaaaaaaaaaaaaugcaucccccccccccccccccccccccccccccccaaaggcucuuuucagagccaccagaauu

SEQ ID NO: 7314 - RNA, 1693 nt, Artificial Sequence
  mRNA product Design i-3 comprising derived and/or modified sequence from LASV(G1442-SLE-2011;Clade IV)__AIT17180__GPCstabilized (opt1)
gggagaaagcuuaccaugggccagaucgugaccuucuuccaggaggucccccacgugaucgaggaggugaugaacaucguccugaucgcccucagcauccuggccgugcugaaggggcucuacaacguggcgaccugcggccugaucgggcuggucacguuccuccugcugugcggccgcuccugcaccaccacccucuacaaggggguguacgagcugcagacgcuggagcucaacauggagacccugaacaugaccaugccgcugagcugcaccaagaacaacucccaccacuacauccgggugggcaacgagacgggccucgagcugacccugaccaacaccagcaucaucaaccacaaguucugcaaccucuccgacgcccacaagaagaaccuguacgaccacgcccugaugagcaucaucuccacguuccaccucagcauccccaacuucaaccaguacgaggccauguccugcgacuucaacgggggcaagaucagcguccaguacaaccugucccacagcuacgccggggacgcggccaaccacugcggcaccguggccaacggggugcugcagaccuucaugcgcauggccuggggcggcuccuacaucgcgcucgacagcgggugcggcaacugggacugcaucaugaccuccuaccaguaccugaucauccagaacacgaccugggacgaccacugccaguucagccgccccucccccaucggguaccugggccuccugagccagcggacccgcgacgucuacaucucccggcgccgccggggcaccuucacguggacccugagcgacagcgaggggaaggacaccccgggcggguacugccugacccgguggaugcucaucgaggccgagcugaagugcuucggcaacacggccguggccaagugcaacgagaagcacgacgaggaguucugcgacaugcugcgccucuucgacuucaacaagcaggccauccagcggcugaaggcgcccgcccagauguccauccagcugaucaacaaggccgugaacgcccucaucaacgaccagcugaucaugaagaaccaccuccgcgacaucaugugcauccccuacugcaacuacagcaaguacugguaccugaacaacaccgccaccggcaagaccucccugcccaagugcuggcugaucagcaacggcuccuaccucaacgagacgcacuucagcgacgacaucgagcaggaggcggacaacaugaucaccgagaugcugcagaaggaguacauggagcggcaggggaagacgccccugggccucgucgaccuguucguguucuccaccagcuucuaccugaucuccaucuuccugcaccucgugaagaucccgacccaccgccacaucgucggcaagagcugccccaagccccaccggcugaaccacauggggaucugcuccugcgggcuguacaagcagcccggcgugccggugcgcuggaagcggugaggacuaguuauaagacugacuagcccgaugggccucccaacgggcccuccuccccuccuugcaccgagauuaauaaaaaaaaaaaaaaaaaaaaaaaaaaaaaaaaaaaaaaaaaaaaaaaaaaaaaaaaaaaaaaaaugcaucccccccccccccccccccccccccccccccaaaggcucuuuucagagccaccagaauu

SEQ ID NO: 7315 - RNA, 1693 nt, Artificial Sequence
  mRNA product Design i-3 comprising derived and/or modified sequence from LASV(G3010-SLE-2013;Clade IV)__AIT17344__GPCstabilized (opt1)
gggagaaagcuuaccaugggccagaucgugaccuucuuccaggaggucccccacgugaucgaggaggugaugaacaucguccugaucgcccucagcauccuggccgugcugaaggggcucuacaacuucgcgaccugcggccugguggggcuggucacguuccuccugcugugcggccgcuccugcaccaccagccucuacaaggggguguacgagcugcagacccuggagcucaacauggagacgcugaacaugaccaugccgcuguccugcaccaagaacaacagccaccacuacaucauggugggcaacgagaccggccucgagcugacgcugaccaacaccuccaucaucaaccacaaguucugcaaccucagcgacgcccacaagaagaaccuguacaaccacgcccugauguccaucaucagcaccuuccaccucuccauccccaacuucaaccaguacgaggccaugagcugcgacuucaacgggggcaagaucuccguccaguacaaccugagccacuccuacgccggggacgcggccagccacugcggcacgguggccaacggggugcugcagaccuucaugcggauggccuggggcggcuccuacaucgcgcucgacagcgggugcggcaagugggacugcaucaugaccuccuaccaguaccugaucauccagaacaccacgugggaggaccacugccaguucagccgccccucccccaucggguaccugggccuccugagccagcggacccgcgacaucuacaucagccggcgccgccggggcaccuucaccuggacgcuguccgacagcgaggggaaggacaccccgggcggguacugccugacccgguggaugcucaucgaggccgagcugaagugcuucggcaacaccgccgucgccaagugcaacgagaagcacgacgaggaguucugcgacaugcugcgccucuucgacuucaacaagcaggccauccagcggcugaagacgcccgcgcagauguccauccagcugaucaacaaggccgugaacgcccucaucaacgaccagcugaucaugaagaaccaccuccgcgacaucaugugcauccccuacugcaacuacagcaaguacugguaccugaaccacaccaccaccggcaagacgucccugcccaagugcuggcuggugagcaacggcuccuaccucaacgagacccacuucagcgacgacaucgagcagcaggccgacaacaugaucaccgagaugcugcagaaggaguacauggagcggcaggggaagacgccccugggccucgucgaccuguucguguucuccaccagcuucuaccugaucuccaucuuccugcaccucgugaagaucccgacccaccgccacaucgucggcaagagcugccccaagccccaccggcugaaccacauggggaucugcuccugcgggcuguacaagcagcccggcgugccggugcgcuggaagcggugaggacuaguuauaagacugacuagcccgaugggccucccaacgggcccuccuccccuccuugcaccgagauuaauaaaaaaaaaaaaaaaaaaaaaaaaaaaaaaaaaaaaaaaaaaaaaaaaaaaaaaaaaaaaaaaaugcaucccccccccccccccccccccccccccccccaaaggcucuuuucagagccaccagaauu

SEQ ID NO: 7316 - RNA, 1693 nt, Artificial Sequence
  mRNA product Design i-3 comprising derived and/or modified sequence from LASV(G502-SLE-2009;Clade IV)__AIT17126__GPCstabilized (opt1)
gggagaaagcuuaccaugggccagaucgugaccuucuuccaggaggucccccacgugaucgaggaggugaugaacaucguccugaucgcccucagcauccuggccgugcugaaggggcucuacaacuucgcgaccugcggccugguggggcugcucacguuccugcugcucugcggccgcuccugcaccaccgggcuguacaagggcgucuacgagcugcagacccucgagcugaacauggagacgcugaacaugaccaugccgcucagcugcaccaagaacaacucccaccacuacaucauggugggcaacgagaccgggcuggagcugacgcucaccaacaccagcaucaucaaccacaaguucugcaaccuguccgacgcccacaagaagaaccuguacgaccacgcccucaugagcaucaucuccaccuuccaccugagcauccccaacuucaaccaguacgaggccauguccugcgacuucaacggcgggaagaucagcgugcaguacaaccugucccacagcuacgccggcgacgcggccgaccacugcgggacggucgccaacggcgugcuccagaccuucaugcggauggccuggggcggguccuacaucgcgcuggacagcggcugcgggcggugggacugcaucaugaccuccuaccaguaccugaucauccagaacaccacgugggaggaccacugccaguucagccgccccucccccaucggcuaccucggccugcugagccagcggacccgcgacaucuacaucucccggcgccgccgggggaccuucaccuggacgcugagcgacagcgagggcaaggacacccccgggggcuacugccucacccgguggaugcugaucgaggccgagcugaagugcuucgggaacaccgccguggccaagugcaacgagaagcacgacgaggaguucugcgacaugcuccgccuguucgacuucaacaagcaggccauccagcggcugaaggcgcccgcccagauguccauccagcucaucaacaaggccgucaacgcccugaucaacgaccagcuggugaugaagaaccaccuccgcgacaucaugugcauccccuacugcaacuacagccgguacugguaccugaaccacacgaccaccggccgcaccucccugcccaagugcuggcucgugagcaacggguccuaccugaacgagacgcacuucagcgacgacaucgagcagcaggccgacaacaugaucaccgagaugcugcagaaggaguacauggagcggcagggcaagaccccgcucgggcuggucgaccuguucguguucuccaccagcuucuaccugaucuccaucuuccuccaccuggugaagaucccgacgcaccgccacaucgucggcaagagcugccccaagccccaccggcugaaccacauggggaucugcuccugcggccucuacaagcagcccggcgugccggugaaguggaagcgcugaggacuaguuauaagacugacuagcccgaugggccucccaacgggcccuccuccccuccuugcaccgagauuaauaaaaaaaaaaaaaaaaaaaaaaaaaaaaaaaaaaaaaaaaaaaaaaaaaaaaaaaaaaaaaaaaugcaucccccccccccccccccccccccccccccccaaaggcucuuuucagagccaccagaauu

SEQ ID NO: 7317 - RNA, 1693 nt, Artificial Sequence
  mRNA product Design i-3 comprising derived and/or modified sequence from LASV(G733-SLE-2010;Clade IV)__AIT17154__GPCstabilized (opt1)
gggagaaagcuuaccaugggccagaucgugaccuucuuccaggaggucccccacgugaucgaggaggugaugaacaucguccugaucgcccucagcauccuggccgugcugaaggggcucuacaacuucgcgaccugcggcaucguggggcuggucuccuuccugcuccugugcggccgcagcugcacgaccucccuguacaaggggguguacgagcuccagacccuggagcugaacauggagacccucaacaugacgaugccgcugagcugcaccaagaacaacucccaccacuacaucauggugggcaacgagaccggccuggagcucacccugacgaacaccagcaucaucaaccacaaguucugcaaccuguccgacgcccacaagaagaaccucuacgaccacgcccugaugagcaucaucuccaccuuccaccugagcauccccaacuucaaccaguacgaggccauguccugcgacuucaacgggggcaagaucagcguccaguacaaccucucccacagcuacgccggggacgcggccaaccacugcggcaccaucgccaacggggugcugcagacguucaugcggauggccuggggcggcuccuacaucgcgcuggacagcgggugcgaccggugggacugcaucaugaccuccuaccaguaccucaucauccagaacaccaccugggaggaccacugccaguucagccgccccucccccaucggcuaccuggggcugcucagccagcggacgcgcgacaucuacaucagccggcgccgccggggcaccuucaccuggacccucuccgacagcgagggcaaggacacgcccgggggcuacugccugacccgguggaugcugaucgaggccgagcucaagugcuucgggaacaccgccguggccaagugcaacgagaagcacgacgaggaguucugcgacaugcugcgccuguucgacuucaacaagcaggccauccagcggcucaaggcgcccgcccagauguccauccagcugaucaacaaggccgucaacgcccugaucaacgaccagcucaucaugaagaaccaccuccgcgacaucaugugcauccccuacugcaacuacagcaaguacugguaccugaaccacaccacgaccgggaagaccucccugcccaagugcuggcuggugagcaacggcuccuaccugaacgagacccacuucagcgacgacaucgagcagcaggccgacaacaugaucacggagaugcuccagaaggaguacauggagcggcagggcaagaccccgcuggggcugguggaccucuucgucuucuccaccagcuucuaccugaucuccaucuuccugcaccuggugaagaucccgacccaccgccacguggucggcaagagcugccccaagccccaccggcucaaccacauggggaucugcuccugcggccuguacgggcagcccggcgugccggugaaguggaagcgcugaggacuaguuauaagacugacuagcccgaugggccucccaacgggcccuccuccccuccuugcaccgagauuaauaaaaaaaaaaaaaaaaaaaaaaaaaaaaaaaaaaaaaaaaaaaaaaaaaaaaaaaaaaaaaaaaugcaucccccccccccccccccccccccccccccccaaaggcucuuuucagagccaccagaauu

SEQ ID NO: 7318 - RNA, 1693 nt, Artificial Sequence
  mRNA product Design i-3 comprising derived and/or modified sequence from MOPV/LASV reassortant(IGS-1;Clade IV)__AFY05576__GPCstabilized (opt1)
gggagaaagcuuaccaugggccagaucgugaccuucuuccaggaggucccccacgugaucgaggaggugaugaacaucguccugaucgcccucagcgugcuggccgugcugaaggggcucuacaacuucgcgaccugcggccuggucgggcuggugacguuccuccugcugugcggccgcuccugcaccaccagccucuacaaggggguguacgagcugcagacccuggagcucaacauggagacgcugaacaugaccaugccgcuguccugcaccaagaacaacagccaccacuacaucauggucggcaacgagaccggccucgagcugacgcugaccaacaccuccaucaucaaccacaaguucugcaaccucagcgacgcccacaagaagaaccuguacgaccacgcccugauguccaucaucagcaccuuccaccucuccauccccaacuucaaccaguacgaggccaugagcugcgacuucaacgggggcaagaucuccgugcaguacaaccugagccacuccuacgccggggacgcggccaaccacugcggcacgguggccaacgggguccugcagaccuucaugcggauggccuggggcggcagcuacaucgcgcucgacuccgggugcggcaacugggacugcaucaugaccagcuaccaguaccugaucauccagaacaccacgugggaggaccacugccaguucucccggcccagccccaucggguaccugggccuccugucccagcgcacccgggacaucuacaucagccgccggcgccggggcaccuucaccuggacgcugagcgacuccgagggggaggacaccccgggcggguacugccugacccgcuggaugcucaucgaggccgagcugaagugcuucggcaacaccgccguggccaagugcaacgagaagcacgacgaggaguucugcgacaugcugcggcuguucgacuucaacaagcaggccauccagcgccugaaggcgcccgcccagaugagcauccagcugaucaacaaggccgugaacgcccucaucaacgaccagcugaucaugaagaaccaccuccgggacaucaugugcauccccuacugcaacuacuccaaguacugguaccucaaccacacgaccaccggccgcaccagccugcccaagugcuggcuggucuccaacggcagcuaccucaacgagacgcacuucuccgacgacaucgagcagcaggccgacaacaugaucaccgagaugcugcagaaggaguacauggagcggcaggggaagacgccccugggccucguggaccuguucguguucagcaccuccuucuaccugaucagcaucuuccugcaccucgucaagaucccgacccaccgccacaucguggggaaguccugccccaagccccaccggcugaaccacaugggcaucugcagcugcgggcuguacaagcagcccggcgugccggucaaguggaagcgcugaggacuaguuauaagacugacuagcccgaugggccucccaacgggcccuccuccccuccuugcaccgagauuaauaaaaaaaaaaaaaaaaaaaaaaaaaaaaaaaaaaaaaaaaaaaaaaaaaaaaaaaaaaaaaaaaugcaucccccccccccccccccccccccccccccccaaaggcucuuuucagagccaccagaauu

SEQ ID NO: 7319 - RNA, 1693 nt, Artificial Sequence
  mRNA product Design i-3 comprising derived and/or modified sequence from LASV(LM765-SLE-2012;Clade IV)__AIT17814__GPCstabilized (opt1)
gggagaaagcuuaccaugggccagaucgugaccuucuuccaggaggucccccacgugaucgaggaggugaugaacaucguccugaucgcccucagcauccuggccgugcugaaggggcucuacaacuucgcgaccugcggccugguggggcuggucacguuccuccugcugugcggccgcuccugcaccaccagccucuacaaggggguguacgagcugcagacccuggagcucaacauggagacgcugaacaugaccaugccgcuguccugcaccaagaacaacagccaccacuacaucauggugggcaacgagaccggccucgagcugacgcugaccaacaccuccaucaucgaccacaaguucugcaaccucagcgacgcccaccggaagaaccuguacgaccacgcccugauguccaucaucagcaccuuccaccucuccauccccaacuucaaccaguacgaggccaugagcugcgacuucaacgggggcaagaucuccguccaguacaaccugagccacuccuacgccaaggacgcggccgaccacugcgggacgguggccaacggcgugcugcagaccuucaugcgcauggccuggggcgggagcuacaucgcgcucgacuccggcugcgggcgcugggacugcaucaugaccagcuaccaguaccugaucauccagaacaccacgugggaggaccacugccaguucucccggcccagccccaucggcuaccuggggcuccugucccagcgcacccgggacaucuacaucagccgccggcgccggggcaccuucaccuggacgcugagcgacuccgagggcaaggacacccccgggggcuacugccugacccgcuggaugcucaucgaggccgagcugaagugcuucgggaacaccgccgucgccaagugcaacgagaagcacgacgaggaguucugcgacaugcugcggcuguucgacuucaacaagcaggccauccagcgccugaaggcgcccgcccagaugagcauccagcugaucaacaaggccgugaacgcccucaucaacgaccagcugaucaugaagaaccaccuccgggacaucaugugcauccccuacugcaacuacuccaaguacugguaccucaaccacacgaccaccgggaagaccagccugcccaagugcuggcugguguccaacggcagcuaccucaacgagacgcacuucuccgacgacaucgagcagcaggccgacaacaugaucaccgagaugcugcagaaggaguacauggagcgccagggcaagaccccgcuggggcucgucgaccuguucguguucagcaccuccuucuaccugaucagcaucuuccugcaccucgugaagaucccgacgcaccggcacaucgucggcaagcccugccccaagccccaccgccugaaccacauggggaucugcuccugcggccuguacaagcagccgggggugcccgugaaguggaagcggugaggacuaguuauaagacugacuagcccgaugggccucccaacgggcccuccuccccuccuugcaccgagauuaauaaaaaaaaaaaaaaaaaaaaaaaaaaaaaaaaaaaaaaaaaaaaaaaaaaaaaaaaaaaaaaaaugcaucccccccccccccccccccccccccccccccaaaggcucuuuucagagccaccagaauu

SEQ ID NO: 7320 - RNA, 1693 nt, Artificial Sequence
  mRNA product Design i-3 comprising derived and/or modified sequence from LASV(LM776-SLE-2012;Clade IV)__AIT17824__GPCstabilized (opt1)
gggagaaagcuuaccaugggccagaucgugaccuucuuccaggaggucccccacgugaucgaggaggugaugaacaucguccugaucgcccucagcauccuggccgugcugaaggggcucuacaacuucgcgaccugcggccugguggggcuggucacguuccuccugcugugcggccgcuccugcaccaccagcguguacaaggggguguacgagcuccagacccuggagcugaacauggagacgcucaacaugaccaugccgcuguccugcaccaagaacaacagccaccacuacaucauggucggcaacgagaccggccuggagcucacgcugaccaacaccuccaucaucaaccacaaguucugcaaccugagcgacgcccacaagaagaaccucuacgaccacgcccugauguccaucaucagcaccuuccaccuguccauccccaacuucaaccaguacgaggccaugagcugcgacuucaacgggggcaagaucuccgugcaguacaaccucagccacuccuacgccggggacgcggccaaccacugcggcacgguggccaacgggguccugcagaccuucaugcggauggccuggggcggcagcuacaucgcgcuggacuccgggugcggcaagugggacugcaucaugaccagcuaccaguaccucaucauccagaacaccacgugggaggaccacugccaguucucccgccccagccccaucggguaccugggccugcucucccagcggacccgcgacaucuacaucagccggcgccgccggggcaccuucaccuggacgcucagcgacuccgaggggaaggacaccccgggcggguacugccugacccgguggaugcugaucgaggccgagcucaagugcuucggcaacaccgccguggccaagugcaacgagaagcacgacgaggaguucugcgacaugcugcgccuguucgacuucaacaagcaggccauccagcggcucaaggcgcccgcccagaugagcauccagcugaucaacaaggccgugaacgcccugaucaacgaccagcucaucaugaagaaccaccuccgcgacaucaugugcauccccuacugcaacuacuccaaguacugguaccugaaccacacgaccaccggcaagaccagccugcccaagugcuggcuggucuccaacggcagcuaccugaacgagacgcacuucuccgacgacaucgagcagcaggccgacaacaugaucaccgagaugcuccagaaggaguacauggagcggcaggggaagacgccccugggccugguggaccucuucguguucagcaccuccuucuaccugaucagcaucuuccugcaccuggucaagaucccgacccaccgccacaucguggggaaguccugccccaagccccaccggcucaaccacaugggcaucugcagcugcgggcuguacaagcagcccggcgugccgguccgcuggaagcggugaggacuaguuauaagacugacuagcccgaugggccucccaacgggcccuccuccccuccuugcaccgagauuaauaaaaaaaaaaaaaaaaaaaaaaaaaaaaaaaaaaaaaaaaaaaaaaaaaaaaaaaaaaaaaaaaugcaucccccccccccccccccccccccccccccccaaaggcucuuuucagagccaccagaauu

SEQ ID NO: 7321 - RNA, 1693 nt, Artificial Sequence
  mRNA product Design i-3 comprising derived and/or modified sequence from LASV(Mad39;Clade IV)__ANH09722__GPCstabilized (opt1)
gggagaaagcuuaccaugggccagaucgugaccuucuuccaggaggucccccacgugaucgaggaggugaugaacaucguccugaucgcccucagcauccuggccgugcugaaggggcucuacaacguggcgaccugcggccugaucgggcuggucacguuccuccugcugugcggccgcuccugcaccaccacccucuacaaggggguguacgagcugcaggcccuggagcucaacauggagacgcugaacaugaccaugccgcugagcugcaccaagaacaacucccaccacuacauccgggugggcaacgagaccggccucgagcugacgcugaccaacaccagccucaucaaccacaaguucugcaaccuguccgacgcccacaagaagaaccuguacgaccacgcccucaugagcaucaucuccaccuuccaccugagcauccccaacuucaaccaguacgaggccauguccugcgacuucaacgacgggaagaucagcguccaguacaaccugucccacacguacgcgggcgacaccgccaaccacugcgggaccguggccaacggcgugcuccagaccuucaugcgcauggccuggggcgggagcuacaucgcgcuggacuccggcugcgggggcugggacugcaucaugacgagcuaccaguaccugaucauccagaacaccaccugggaggaccacugccaguucucccggcccagccccaucggguaccucggccugcugucccagcggacccgcgacaucuacaucagccggcgccgccggggcacguucaccuggacccuguccgacagcgaggggaaggacaccccgggcggguacugccucacgcgguggaugcugaucgaggccgagcugaagugcuucggcaacaccgccgucgccaagugcaacgagaagcacgacgaggaguucugcgacaugcuccgccuguucgacuucaacaagcaggccauccagcggcugaaggcgcccgcccagaugagcauccagcucaucaacaaggccgugaacgcccugaucaacgaccagcugaucaugaagaaccaccuccgcgacaucaugugcauccccuacugcaacuacuccaaguacugguaccugaaccacaccgugaccggcaagacgagccugcccaagugcuggcucgucuccaacggcagcuaccugaacgagacccacuucuccgacgacaucgagcagcaggccgacaacaugaucaccgagaugcugcagaaggaguacauggagcggcaggggaagacgccccucggccugguggaccuguucguguucagcaccuccuucuaccugaucagcaucuuccuccaccuggucaagaucccgacccaccgccacgugguggggaagcccugccccaagccccaccggcugaaccacaugggcaucugcuccugcggguucuacaagcagccgggcguccccgugcgcuggaagcggugaggacuaguuauaagacugacuagcccgaugggccucccaacgggcccuccuccccuccuugcaccgagauuaauaaaaaaaaaaaaaaaaaaaaaaaaaaaaaaaaaaaaaaaaaaaaaaaaaaaaaaaaaaaaaaaaugcaucccccccccccccccccccccccccccccccaaaggcucuuuucagagccaccagaauu

SEQ ID NO: 7322 - RNA, 1693 nt, Artificial Sequence
  mRNA product Design i-3 comprising derived and/or modified sequence from LASV(Z0947-SLE-2011;Clade IV)__AIT17840__GPCstabilized (opt1)
gggagaaagcuuaccaugggccagaucgugaccuucuuccaggaggucccccacgugaucgaggaggugaugaacaucguccugaucgcccucagcauccuggccgugcugaaggggcucuacaacuucgcgaccugcggccugguggggcuggucacguuccuccugcugugcggccgcuccugcaccaucagccucuacaaggggguguacgagcugcagacccuggagcucaacauggagacccugaacaugacgaugccgcuguccugcaccaagaacaacagccaccacuacaucauggugggcaacgagaccggccucgagcugacccugacgaacaccuccaucaucaaccacaaguucugcaaccucagcgacgcccacaagaagaaccuguacgaccacgcccugauguccaucaucagcaccuuccaccucuccauccccaacuucaaccaguacgaggccaugagcugcgacuucaacgggggcaagaucuccguccaguacaaccugagccacuccuacgccggggacgcggccaaccacugcggcaccguggccaacggggugcugcagacguucaugcggauggccuggggcggcagcuacaucgcgcucgacuccgggugcgaccggugggacugcaucaugaccagcuaccaguaccugaucauccagaacaccaccugggaggaccacugccaguucucccgccccagccccaucggcuaccuggggcuccugucccagcggacgcgcgacaucuacaucagccggcgccgccggggcaccuucaccuggacccugagcgacuccgagggcaaggacacgcccgggggcuacugccugacccgguggaugcucaucgaggccgagcugaagugcuucgggaacaccgccgucgccaagugcaacgagaagcacgacgaggaguucugcgacaugcugcgccucuucgacuucaacaagcaggccauccagcggcugaaggcgcccgcccagaugagcauccagcugaucaacaaggccgugaacgcccucaucaacgaccagcugaucaugaagaaccaccuccgcgacaucaugugcauccccuacugcaacuacuccaaguacugguaccugaaccacaccacgaccgggaagaccagccugcccaagugcuggcugguguccaacggcagcuaccucaacgagacccacuucuccgacgacaucgagcagcaggccgacaacaugaucacggagaugcugcagaaggaguacauggagcggcagggcaagaccccgcuggggcucgucgaccuguucguguucagcaccuccuucuaccugaucagcaucuuccugcaccucgugaagaucccgacccaccgccacaucgucggcaagcccugccccaagccccaccggcugaaccacauggggaucugcuccugcggccuguacaagcagccgggggugcccgugaaguggaagcgcugaggacuaguuauaagacugacuagcccgaugggccucccaacgggcccuccuccccuccuugcaccgagauuaauaaaaaaaaaaaaaaaaaaaaaaaaaaaaaaaaaaaaaaaaaaaaaaaaaaaaaaaaaaaaaaaaugcaucccccccccccccccccccccccccccccccaaaggcucuuuucagagccaccagaauu

SEQ ID NO: 7323 - RNA, 1693 nt, Artificial Sequence
  mRNA product Design i-3 comprising derived and/or modified sequence from LASV(Josiah;Clade IV)__NP_694870__GPCstabilized (opt1)
gggagaaagcuuaccaugggccagaucgugaccuucuuccaggaggucccccacgugaucgaggaggugaugaacaucguccugaucgcccucagcgugcuggccgugcugaaggggcucuacaacuucgcgaccugcggccuggucgggcuggugacguuccuccugcugugcggccgcuccugcaccaccagccucuacaaggggguguacgagcugcagacccuggagcucaacauggagacgcugaacaugaccaugccgcuguccugcaccaagaacaacagccaccacuacaucauggucggcaacgagaccggccucgagcugacgcugaccaacaccuccaucaucaaccacaaguucugcaaccucagcgacgcccacaagaagaaccuguacgaccacgcccugauguccaucaucagcaccuuccaccucuccauccccaacuucaaccaguacgaggccaugagcugcgacuucaacgggggcaagaucuccgugcaguacaaccugagccacuccuacgccggggacgcggccaaccacugcggcacgguggccaacgggguccugcagaccuucaugcggauggccuggggcggcagcuacaucgcgcucgacuccgggugcggcaacugggacugcaucaugaccagcuaccaguaccugaucauccagaacaccacgugggaggaccacugccaguucucccgccccagccccaucggguaccugggccuccugucccagcggacccgcgacaucuacaucagccggcgccggcgcggcaccuucaccuggacgcugagcgacuccgaggggaaggacaccccgggcggguacugccucacccgguggaugcugaucgaggccgagcugaagugcuucggcaacaccgccguggccaagugcaacgagaagcacgacgaggaguucugcgacaugcuccgccuguucgacuucaacaagcaggccauccagcggcugaaggcgcccgcccagaugagcauccagcucaucaacaaggccgugaacgcccugaucaacgaccagcugaucaugaagaaccaccuccgcgacaucaugugcauccccuacugcaacuacuccaaguacugguaccugaaccacacgaccaccgggcggaccagccugcccaagugcuggcucgucuccaacggcagcuaccugaacgagacgcacuucuccgacgacaucgagcagcaggccgacaacaugaucaccgagaugcugcagaaggaguacauggagcgccagggcaagaccccgcucgggcugguggaccuguucguguucagcaccuccuucuaccucaucagcaucuuccugcaccuggucaagauccccacgcaccggcacaucgugggcaaguccugccccaagccccaccgccugaaccacauggggaucugcagcugcggccucuacaagcagccgggggugcccgucaaguggaagcggugaggacuaguuauaagacugacuagcccgaugggccucccaacgggcccuccuccccuccuugcaccgagauuaauaaaaaaaaaaaaaaaaaaaaaaaaaaaaaaaaaaaaaaaaaaaaaaaaaaaaaaaaaaaaaaaaugcaucccccccccccccccccccccccccccccccaaaggcucuuuucagagccaccagaauu

SEQ ID NO: 7324 - RNA, 1690 nt, Artificial Sequence
  mRNA product Design i-3 comprising derived and/or modified sequence from LASV(LP;Clade I)__AAF86701__GPCstabilized (opt1)
gggagaaagcuuaccaugggccagaucaucaccuucuuccaggaggugccccacgucaucgaggaggugaugaacaucgugcugaucgcccucagccugcuggccauccucaaggggcuguacaacaucgcgaccugcggcaucaucgggcuggucgccuuccucuuccugugcggcaaguccugcagccugacgcucaagggcggguacgagcugcagacccuggagcucaacauggagacccugaacaugaccaugccgcuguccugcacgaagaacagcucccaccacuacauccgcgugggcaacgagaccgggcucgagcugacccugaccaacacgagcaucaucaaccacaaguucugcaaccucuccgacgcccacaagaagaaccuguacgaccacgcccugaugagcaucaucuccaccuuccaccucagcauccccaacuucaaccaguacgaggccauguccugcgacuucaacggcgggaagaucagcgugcaguacaaccugucccacagcuacgcgggcgacgccgccgagcacugcgggaccgucgccaacggcgugcugcagaccuucaugcggauggcguggggcgggcgcuacaucgcccucgacuccggcugcgggaacugggacugcaucaugacgagcuaccaguaccugaucauccagaacaccaccugggaggaccacugccaguucucccggcccagccccaucggcuaccugggccuccugucccagcgcacccgggacaucuacaucagccgccggcgccgggggacguucaccuggacccugagcgacuccgagggcaacgagacccccgggggcuacugccucacgcgcuggaugcugaucgaggccgagcugaagugcuucgggaacaccgccguggccaagugcaacgagaagcacgacgaggaguucugcgacaugcuccggcuguucgacuucaacaagcaggcgauccgccggcugaaggccccggcccagaugagcauccagcucaucaacaaggccgucaacgcccugaucaacgaccagcugaucaugaagaaccaccuccgcgacaucaugugcauccccuacugcaacuacuccaaguacugguaccugaaccacaccagcuccggccggaccagccugcccaagugcuggcucaucuccaacggcagcuaccugaacgagacgcaguucuccgacgacaucgagcagcaggcggacaacaugaucaccgagaugcugcagaaggaguacaucgagcgccaggggaagaccccgcucggccugguggacaucuucaucuucagcaccuccuucuaccugaucagcaucuuccuccaccugaucaagauccccacgcaccggcacaucguggggaagcccugccccaagccgcaccgccugaaccacaugggcgucugcuccugcgggcuguacaagcaccccggcgugcccaccaaguggaagcggugaggacuaguuauaagacugacuagcccgaugggccucccaacgggcccuccuccccuccuugcaccgagauuaauaaaaaaaaaaaaaaaaaaaaaaaaaaaaaaaaaaaaaaaaaaaaaaaaaaaaaaaaaaaaaaaaugcaucccccccccccccccccccccccccccccccaaaggcucuuuucagagccaccagaauu

SEQ ID NO: 7325 - RNA, 1690 nt, Artificial Sequence
  mRNA product Design i-3 comprising derived and/or modified sequence from LASV(803213;Clade II)__AAF86703__GPCstabilized (opt1)
gggagaaagcuuaccaugggccagaucaucaccuucuuccaggaggugccccacgucaucgaggaggugaugaacaucgugcugaucgcccucagccugcuggccauccucaaggggaucuacaacgucgcgaccugcggccuguucgggcugaucuccuuccuccugcugugcggccgcagcugcuccgugacguacaaggggguguacgagcuccagacccuggagcugaacauggccaaccucaacaugaccaugccgcugagcugcaccaagaacaacucccaccacuacaucauggucggcaacgagacgggccuggagcucacccugaccaacaccagcaucaucaaccacaaguucugcaaccuguccgacgcccacaagaagaaccucuacgaccacgcccugaugagcaucaucuccacguuccaccugagcauccccaacuucaaccaguacgaggccauguccugcgacuucaacgggggcaagaucagcgugcaguacaaccucucccacagcuucgcgguggacgccgccaaccacugcgggaccaucgccaacggcguccugcagaccuucaugcggauggcguggggcggguccuacaucgcccuggacagcggcugcgggaacugggacugcaucaugaccuccuaccaguaccucaucauccagaacacgaccugggaggaccacugccaguucagccgccccucccccaucggcuaccuggggcugcucagccagcggacccgcgacaucuacaucagccggcgccggcgcggcaccuucacguggacccuguccgacagcgagggcaacgaggcccccgggggcuacugccugacccgguggaugcucaucgaggccgagcugaagugcuucgggaacaccgccguggcgaagugcaacgagaagcacgacgaggaguucugcgacaugcugcgccucuucgacuucaacaagcaggccaucaagcggcugaagacgccggcccagauguccauccagcugaucaacaaggccgugaacgcccucaucaacgaccagcugaucaugaagaaccaccuccgcgacaucaugugcauccccuacugcaacuacagccgguacugguaccugaaccacaccgucaccggcaagaccucccugccccgcugcuggcuggugagcaacggguccuaccucaacgagacgcacuucagcgacgacaucgagcagcaggcggacaacaugaucaccgagaugcugcagaaggaguacauggaccggcagggcaagaccccgcugggccucguggaccuguucgucuucuccaccagcuucuaccugaucuccaucuuccuccaccuggugaagauccccacgcaccgccacaucguggggaagcccugccccaagccgcaccggcugaaccacaugggcaucugcagcugcgggcuguacaagcaccccggcguccccgugaaguggaagcgcugaggacuaguuauaagacugacuagcccgaugggccucccaacgggcccuccuccccuccuugcaccgagauuaauaaaaaaaaaaaaaaaaaaaaaaaaaaaaaaaaaaaaaaaaaaaaaaaaaaaaaaaaaaaaaaaaugcaucccccccccccccccccccccccccccccccaaaggcucuuuucagagccaccagaauu

SEQ ID NO: 7326 - RNA, 1690 nt, Artificial Sequence
  mRNA product Design i-3 comprising derived and/or modified sequence from LASV(GA391;Clade III)__CAA36645__GPCstabilized (opt1)
gggagaaagcuuaccaugggccagaucgugaccuucuuccaggaggucccccacgugaucgaggaggugaugaacaucguccugaucgcccucagcauccuggccauccugaaggggcucuacaacguggcgaccugcggccugaucgggcuggugacguuccuccugcuguccggccgcagcugcucccucaucuacaaggggaccuacgagcugcagacccuggagcucaacauggagacccugaacaugacgaugccgcugagcugcaccaagaacaacucccaccacuacauccgggucggcaacgagaccggccucgagcugacccugacgaacaccagcauccucaaccacaaguucugcaaccuguccgacgcccacaagcgcaaccuguacgaccacagccucauguccaucaucagcaccuuccaccuguccauccccaacuucaaccaguacgaggccaugagcugcgacuucaacgggggcaagaucaccgugcaguacaaccugucccacagcuucgccguggacgccgcggggcacugcggcacgcucgccaacgggguccugcagaccuucaugcggauggccuggggcggcuccuacaucgcccuggacagcgggugcggcaacugggacugcaucaugaccuccuaccaguaccucaucauccagaacaccacgugggacgaccacugccaguucagccgccccucccccaucggguaccugggccugcucagccagcggacccgcgacaucuacaucagccggcgccggcgcggcaccuucaccuggacgcuguccgacagcgaggggaacgagaccccgggcggguacugccugacccgguggaugcucaucgaggcggagcugaagugcuucggcaacaccgccguggccaagugcaacgagaagcacgacgaggaguucugcgacaugcugcgccucuucgacuucaacaagcaggccauccggcgccugaagacgcccgcccagauguccauccagcugaucaacaaggcggugaacgcccucaucaacgaccagcugaucaugaagaaccaccuccgggacaucaugugcauccccuacugcaacuacagccgcuacugguaccugaaccacaccuccaccgggaagaccagccugccccggugcuggcugaucuccaacggcagcuaccucaacgagacgaaguucuccgacgacaucgagcagcaggccgacaacaugaucaccgagaugcugcagaaggaguacaucgaccgccagggcaagaccccgcuggggcucgucgaccuguucguguucagcaccuccuucuaccugaucagcaucuuccugcaccucgugaagauccccacgcaccggcacaucgucggcaagcccugccccaagccgcaccgccugaaccacauggggaucugcuccugcggccuguacaagcagcccggggugcccgugcgguggaagcgcugaggacuaguuauaagacugacuagcccgaugggccucccaacgggcccuccuccccuccuugcaccgagauuaauaaaaaaaaaaaaaaaaaaaaaaaaaaaaaaaaaaaaaaaaaaaaaaaaaaaaaaaaaaaaaaaaugcaucccccccccccccccccccccccccccccccaaaggcucuuuucagagccaccagaauu

SEQ ID NO: 7327 - RNA, 1693 nt, Artificial Sequence
  mRNA product Design i-3 comprising derived and/or modified sequence from LASV(AV;Clade V)__CCA30314__GPCstabilized (opt1)
gggagaaagcuuaccaugggccagaucgugaccuucuuccaggaggucccccacgugaucgaggaggugaugaacaucguccugaucgcccucagcauccuggccgugcugaaggggcucuacaacaucgcgaccugcggccugaucgggcugaucacguuccuccugcugugcggccgcuccugcagcuccaaccucuacaaggggguguacgagcugcagagccuggaccucaacauggagacccugaacaugaccaugccgcuguccugcaccaagaacaacagccaccacuacauccgggucggcaacgacacgggccucgagcugacccugaccaacaccuccauccucaaccacaaguucugcaaccugagcgacgcccacaagaaggaccuguacgaccacgcccucauguccaucaucagcacguuccaccuguccauccccaacuucaaccaguacgaggccaugagcugcgacuucaacgggggcaagaucuccgugcaguacaaccugagccacuccuacgccaucgacgcggccaaccacugcgggaccguggccaacggcauccuccagaccuucaugcgcauggccuggggcgggagcuacaucgcgcuggacuccggcugcgggaacugggacugcaucaugaccagcuaccaguaccugaucauccagaacacgaccugggagaaccacugccaguucucccggcccagccccaucggcuaccucgggcugcugagccagcgcacccgggacaucuacaucucccgccggcgccggggcaccuucacguggacccucagcgacuccgagggcaacgccacccccgggggcuacugccugacccgcuggaugcugaucgaggccgagcucaagugcuucgggaacacggccgucgccaagugcaacgagaagcacgacgaggaguucugcgacaugcugcggcuguucgacuucaacaagcaggcgaucagccgccucaaguccccggcccagaugagcauccagcugaucaacaaggccgugaacgcccugaucaacgaccagcucaucaugaagaaccaccuccgggacaucaugugcauccccuacugcaacuacuccaaguacugguaccugaaccacaccaucaccggcaagaccagccugcccaagugcuggcugguguccaacgggagcuaccugaacgagacgcacuucuccgacgacaucgagcagcaggccgacaacaugaucaccgagaugcuccagaaggaguacauggagcgccagggcaagaccccgcugggccuggucgaccucuucguguucagcaccuccuucuaccugaucagcaucuuccugcggcuggugaagauccccacgcaccgccacaucgucgggaagcccugccccaagccgcaccggcucaaccacaugggcaucugcuccugcgggcuguacaagcagcccggcgugcccgugcgcuggaagcggugaggacuaguuauaagacugacuagcccgaugggccucccaacgggcccuccuccccuccuugcaccgagauuaauaaaaaaaaaaaaaaaaaaaaaaaaaaaaaaaaaaaaaaaaaaaaaaaaaaaaaaaaaaaaaaaaugcaucccccccccccccccccccccccccccccccaaaggcucuuuucagagccaccagaauu

SEQ ID NO: 7328 - RNA, 1690 nt, Artificial Sequence
  mRNA product Design i-3 comprising derived and/or modified sequence from LASV(Togo/2016/7082;Clade VI)__AMR44577__GPCstabilized (opt1)
gggagaaagcuuaccaugggccagaucaucaccuucuuccaggaggugccccacgucaucgaggaggugaugaacaucgugcugaucgcccucagccugcuggccauccucaagggggucuacaacguggcgaccugcggcaucaucgggcuggugacguuccuguuccucugcggccgcuccugcagccugaucuacaagggguccuacgagcugcagacccucgagcugaacauggagacccugaacaugaccaugccgcucagcugcacgaagaacuccagccaccacuacauccgggucggcaacgagaccggccuggagcugacccucaccaacacguccaucaucaaccacaaguucugcaaccugagcgacgcccacaagcgcaaccuguacgaccacgcccucauguccauccugagcaccuuccaccuguccauccccaacuucaaccaguacgaggccaugagcugcgacuucaacgggggcaagaucuccgugcaguacaaccucagccacgccuacgcgguggacgccgccgagcacugcgggaccgucgccaacggcgugcugcagaccuucaugcggauggcguggggcggguccuacaucgcccuggacagcggcugcgggaacugggacugcaucaugacguccuaccaguaccucaucauccagaacaccaccugggaggaccacugccaguucagccgccccucccccaucggcuaccuggggcugcucagccagcggacccgcgacaucuacaucagccggcgccggcgcggcacguucaccuggacccuguccgacagcgagggcaacgagacccccgggggcuacugccugacgcgguggaugcucaucgaggccgagcugaagugcuucgggaacaccgccguggccaagugcaacgagaagcacgacgaggaguucugcgacaugcugcgccucuucgacuucaacaagcaggcgauccagcggcugaaguccccggcccagaugagcauccagcugaucaacaaggccgucaacgcccucaucaacgaccagcugaucaugaagaaccaccuccgcgacaugaugugcauccccuacugcaacuacuccaaguacugguaccugaaccacaccagcuccggccggaccagccugcccaagugcuggcugguguccaacgggagcuaccucaacgagacgcacuucuccgacgacaucgagcagcaggccgacaacaugaucaccgagaugcugcagaaggaguacaucgaccgccagggcaagaccccgcugggccucguggaccuguucgucuucagcaccuccuucuaccugaucagcaucuuccuccaccugaucaagauccccacgcaccggcacaucguggggaagcccugccccaagccgcaccgccugaaccacaugggcaucugcuccugcgggcuguacaagcagcccggcgugcccacccgguggaagcgcugaggacuaguuauaagacugacuagcccgaugggccucccaacgggcccuccuccccuccuugcaccgagauuaauaaaaaaaaaaaaaaaaaaaaaaaaaaaaaaaaaaaaaaaaaaaaaaaaaaaaaaaaaaaaaaaaugcaucccccccccccccccccccccccccccccccaaaggcucuuuucagagccaccagaauu

SEQ ID NO: 7329 - RNA, 1690 nt, Artificial Sequence
  mRNA product Design i-3 comprising derived and/or modified sequence from LASV(KAK-428;Clade n.d. (VII))__ANH09740__GPCstabilized (opt1)
gggagaaagcuuaccaugggccagaucgugaccuucuuccaggaggucccccacgugaucgaggaggugaugaacaucguccugaucgcccucagccugcuggccauccucaaggggcuguacaacuucgcgaccugcggcgugaucgggcugaucacguuccuccugcugugcggccgcuccugcagcgccaccuacaaggggcaguacgagcuccagacccuggagcugaacauggagucccucaacaugaccaugccgcugagcugcacgaagaacaacucccaccacuacauccgggccggcaacaacaccggccuggagcucacccugaccaacacgagcaucaucucccacaaguucugcaaccugagcgacgcccacaagaagaaccucuacgaccacacccugauguccaucaucaccaccuuccaccugagcauccccaacuucaaccaguacgaggccauguccugcgacuucaacgggggcaagaucagcauccaguacaaccucucccacagcuacgcgggggacgccgcccagcacugcggcacgguggccaacgggguccugcagaccuucaugcgcauggcguggggcggcuccuaccuggcccucgacagcgggugccggggcugggacugcaucaucuccagcuaccaguaccugaucauccagaacaccaccugggacgaccacugccaguucucccgccccagccccaucggguaccugggcuucgugagccagaagacgcgggacaucuacaucucccgccggcgccggggcaccuucaccuggacccucagcgacuccgaggggcacgacaugccgggcggguacugccugacgcgcuggaugcugaucgaggccgaccucaagugcuucggcaacaccgccguggccaagugcaacgagaagcacgacgaggaguucugcgacauguggcggcuguucgacuucaacaagcaggcgauccagcgccugaaggcccccgcccagaugaacauccagcucaucaacaaggccgucaacgcccugaucaacgaccagcugaugaugaagaaccaccuccgggacaucaugugcauccccuacugcaacuacagcaaguucugguaccugaacaacaccaccacggggcgcaccucccugccccggugcuggcucaucagcaacggcuccuaccugaacgagacccacuucagcgacgacaucgagcagcaggcggacaacaugaucaccgagaugcugcagaaggaguacauggaccgccagggcaagacgccgcucgggcugguggaccuguucguguucuccaccagcuucuaccucaucaccaucuuccugcaccuggucaagauccccacccaccggcacaucgugggcaagcccugccccaagccgcaccgccucaaccacauggggaucugcuccugcggccuguacaagcagcccggggugcccguccgguggaagcgcugaggacuaguuauaagacugacuagcccgaugggccucccaacgggcccuccuccccuccuugcaccgagauuaauaaaaaaaaaaaaaaaaaaaaaaaaaaaaaaaaaaaaaaaaaaaaaaaaaaaaaaaaaaaaaaaaugcaucccccccccccccccccccccccccccccccaaaggcucuuuucagagccaccagaauu

SEQ ID NO: 7330 - RNA, 1690 nt, Artificial Sequence; identical to SEQ ID NO: 7324
  mRNA product Design i-3 comprising derived and/or modified sequence from LASV(Pinneo-NIG-1969;Clade I)__AIT17836__GPCstabilized (opt1)

SEQ ID NO: 7331 - RNA, 1690 nt, Artificial Sequence
  mRNA product Design i-3 comprising derived and/or modified sequence from LASV(ISTH0009-NIG-2011;Clade II)__AIT17404__GPCstabilized (opt1)
gggagaaagcuuaccaugggccagaucaucaccuucuuccaggaggugccccacgucaucgaggaggugaugaacaucgugcugaucgcccucagccugcuggccauccucaaggggaucuacaacgucgcgaccugcggccuguucgggcugguguccuuccuccugcugugcggccgcagcugcuccacgaccuacaaggggguguacgagcuccagacccuggagcuggacauggccagccucaacaugaccaugccgcuguccugcacgaagaacaacagccaccacuacaucauggucggcaacgagaccggccuggagcucacccugaccaacacguccaucaucaaccacaaguucugcaaccugagcgacgcccacaagaagaaccucuacgaccacgcccugauguccaucaucagcaccuuccaccuguccauccccaacuucaaccaguacgaggccaugagcugcgacuucaacgggggcaagaucuccgugcaguacaaccucagccacgcguacgccguggacgccgccaaccacugcgggaccaucgcgaacggcguccugcagaccuucaugcggauggccuggggcggguccuacaucgcccuggacagcggcugcggguccugggacugcaucaugacgagcuaccaguaccucaucauccagaacaccaccugggaggaccacugccaguucucccgccccagccccaucggcuaccuggggcugcucagccagcggacccgcgacaucuacaucucccggcgccggcgcggcacguucaccuggacccugagcgacuccgagggcaacgagacccccgggggcuacugccugacgcgguggaugcucaucgaggccgagcugaagugcuucgggaacaccgccguggcgaagugcaacgagaagcacgacgaggaguucugcgacaugcugcgccucuucgacuucaacaagcaggccauccggcgccugaagaccccggcccagaugagcauccagcugaucaacaaggccgugaacgcccucaucaacgaccagcugaucaugaagaaccaccuccgggacaucaugugcauccccuacugcaacuacuccaaguacugguaccugaaccacaccgucacgggcaagaccagccugccccgcugcuggcugguguccaacgggagcuaccucaacgagacccacuucuccgacgacaucgagcagcaggcggacaacaugaucaccgagcugcugcagaaggaguacauggaccggcagggcaagacgccgcucggccugguggaccuguucgucuucagcaccuccuucuaccucaucagcaucuuccugcaccugaucaagauccccacccaccgccacaucaccgggaagcccugccccaagccgcaccggcugaaccacaugggcaucugcuccugcgggcucuacaagcaccccggcgugcccgugaaguggaagcgcugaggacuaguuauaagacugacuagcccgaugggccucccaacgggcccuccuccccuccuugcaccgagauuaauaaaaaaaaaaaaaaaaaaaaaaaaaaaaaaaaaaaaaaaaaaaaaaaaaaaaaaaaaaaaaaaaugcaucccccccccccccccccccccccccccccccaaaggcucuuuucagagccaccagaauu

SEQ ID NO: 7332 - RNA, 1690 nt, Artificial Sequence
  mRNA product Design i-3 comprising derived and/or modified sequence from LASV(ISTH2010-NIG-2012;Clade II)__AIT17482__GPCstabilized (opt1)
gggagaaagcuuaccaugggccagaucaucaccuucuuccaggaggugccccacgucaucgaggaggugaugaacaucgugcugaucgcccucagccugcuggccauccucaaggggaucuacaacgucgcgaccugcggccuguucgggcugguguccuuccuccugcugugcggccgcagcugcuccacgaccuacaaggggguguacgagcuccagacccuggagcuggacauggccagccucaacaugaccaugccgcuguccugcacgaagaacaacagccaccacuacaucauggucggcaacgagaccggccuggagcucacccugaccaacacguccaucaucaaccacaaguucugcaaccugagcgacgcccacaagaagaaccucuacgaccacgcccugauguccaucaucagcaccuuccaccuguccauccccaacuucaaccaguacgaggccaugagcugcgacuucaacgggggcaagaucuccgugcaguacaaccucagccacgcguacgccguggacgccgccaaccacugcgggaccaucgcgaacggcguccugcagaccuucaugcggauggccuggggcggguccuacaucgcccuggacagcggcugcggguccugggacugcaucaugacgagcuaccaguaccucaucauccagaacaucaccugggaggaccacugccaguucucccgccccagccccaucggcuaccuggggcugcucagccagcggacccgcgacaucuacaucucccggcgccggcgcggcaccuucacguggacccugagcgacuccgagggcaacgagacccccgggggcuacugccugacccgguggaugcucaucgaggccgagcugaagugcuucgggaacacggccguggcgaagugcaacgagaagcacgacgaggaguucugcgacaugcugcgccucuucgacuucaacaagcaggccauccggcgccugaagaccccggcccagaugagcauccagcugaucaacaaggccgugaacgcccucaucaacgaccagcugaucaugaagaaccaccuccgggacaucaugugcauccccuacugcaacuacuccaaguacugguaccugaaccacaccgucaccggcaagacgagccugccccgcugcuggcugguguccaacgggagcuaccucaacgagacccacuucuccgacgacaucgagcagcaggcggacaacaugaucaccgagcugcugcagaaggaguacaucgaccggcagggcaagaccccgcucggccugguggaccuguucgucuucagcacguccuucuaccucaucagcaucuuccugcaccuggugaagauccccacccaccgccacguggucgggaagcccugccccaagccgcaccggcugaaccacaugggcaucugcuccugcgggcucuacaagcaccccggcgugcccgugaaguggaagcgcugaggacuaguuauaagacugacuagcccgaugggccucccaacgggcccuccuccccuccuugcaccgagauuaauaaaaaaaaaaaaaaaaaaaaaaaaaaaaaaaaaaaaaaaaaaaaaaaaaaaaaaaaaaaaaaaaugcaucccccccccccccccccccccccccccccccaaaggcucuuuucagagccaccagaauu

SEQ ID NO: 7333 - RNA, 1690 nt, Artificial Sequence
  mRNA product Design i-3 comprising derived and/or modified sequence from LASV(Lassa virus/H.sapiens-wt/NGA/2015/ISTH_0543;Clade II)__AVO03639__GPCstabilized (opt1)
gggagaaagcuuaccaugggccagaucaucaccuucuuccaggaggugccccacgucaucgaggaggugaugaacaucgugcugaucgcccucagccugcuggccauccucaaggggaucuacaacgucgcgaccugcggccuguucgggcugguguccuuccuccugcugugcggccgcagcugcuccacgaccuacaaggggguguacgagcuccagacccuggagcuggacauggccaaccucaacaugaccaugccgcugagcugcacgaagaacaacucccaccacuacaucauggucggcaacgagaccggccuggagcucacccugaccaacacgagcaucaucaaccacaaguucugcaaccuguccgacgcccacaagaagaaccucuacgaccacgcccugaugagcaucaucuccaccuuccaccugagcauccccaacuucaaccaguacgaggccauguccugcgacuucaacgggggcaagaucagcgugcaguacaaccucucccacaccuacgcgguggacgccgccaaccacugcgggaccaucgccaacggcguccugcagacguucaugcggauggcguggggcgggagcuacaucgcccuggacuccggcugcgggagcugggacugcaucaugaccuccuaccaguaccucgugauccagaacaccaccugggaggaccacugccaguucagccgccccucccccaucggcuaccuggggcugcucagccagcggacgcgcgacaucuacaucagccggcgccggcgcggcaccuucaccuggacccuguccgacagcgagggcaacgagacgcccgggggcuacugccugacccgguggaugcucaucgaggccgagcugaagugcuucgggaacaccgccguggccaagugcaacgagaagcacgacgaggaguucugcgacaugcugcgccucuucgacuucaacaagcaggcgauccggcgccugaagaccccggcccagauguccauccagcugaucaacaaggccgucaacgcccucaucaacgaccagcugaucaugaagaaccaccuccgggacaucaugugcauccccuacugcaacuacagcaaguacugguaccugaaccacacggugaccggcaagaccucccugccccgcugcuggcuggugagcaacggguccuaccucaacgagacccacuucagcgacgacaucgagcagcaggccgacaacaugaucacggagcugcugcagaaggaguacaucgaccggcagggcaagaccccgcucggccuggucgaccuguucguguucuccaccagcuucuaccucaucuccaucuuccugcaccuggugaagauccccacccaccgccacaucacggggaagcccugccccaagccgcaccggcugaaccacaugggcaucugcagcugcgggcucuacaagcaccccggcguccccgugaaguggaagcgcugaggacuaguuauaagacugacuagcccgaugggccucccaacgggcccuccuccccuccuugcaccgagauuaauaaaaaaaaaaaaaaaaaaaaaaaaaaaaaaaaaaaaaaaaaaaaaaaaaaaaaaaaaaaaaaaaugcaucccccccccccccccccccccccccccccccaaaggcucuuuucagagccaccagaauu

SEQ ID NO: 7334 - RNA, 1690 nt, Artificial Sequence
  mRNA product Design i-3 comprising derived and/or modified sequence from LASV(Lassa virus/H.sapiens-wt/NGA/2016/ISTH_0009;Clade II)__AVO03571__GPCstabilized (opt1)
gggagaaagcuuaccaugggccagaucaucaccuucuuccaggaggugccccacgucaucgaggaggugaugaacaucgugcugaucgcccucagccugcuggccauccucaaggggaucuacaacgucgcgaccugcggccugcuggggcucguguccuuccugcugcucugcggccgcagcugcuccacgaccuacaaggggguguacgagcugcagacccuggagcucgacauggccagccugaacaugaccaugccgcuguccugcacgaagaacaacagccaccacuacaucauggucggcaacgagaccggccucgagcugacccugaccaacacguccaucaucaaccacaaguucugcaaccucagcgacgcccacaagaagaaccuguacgaccacgcccugauguccaucaucagcaccuuccaccucuccauccccaacuucaaccaguacgaggccaugagcugcgacuucaacgggggccggaucuccgugcaguacaaccugagccacuccuacgcgguggacgccgccaaccacugcgggaccaucgccaacggcguccugcagaccuucaugcgcauggcguggggcgggagcuacaucgcccucgacuccggcugcgggagcugggacugcaucaugacguccuaccaguaccugaucauccagaacaccaccugggaggaccacugccaguucagccggcccagccccaucggcuaccuggggcuccugucccagcgcacccgggacaucuacaucagccgccggcgccggggcacguucaccuggacccuguccgacagcgagggcaacgagacccccgggggcuacugccucacgcgcuggaugcugaucgaggccgagcugaagugcuucgggaacaccgccguggccaagugcaacgagaagcacgacgaggaguucugcgacaugcuccggcuguucgacuucaacaagcaggcgauccgccggcugaagaccccggcccagauguccauccagcucaucaacaaggccgugaacgcccugaucaacgaccagcugaucaugaagaaccaccuccgcgacaucaugugcauccccuacugcaacuacagcaaguacugguaccugaaccacaccgucacgggcaagaccucccugccccggugcuggcucgugagcaacggguccuaccugaacgagacccacuucagcgacgacaucgagcagcaggccgacaacaugaucaccgagcugcuccagaaggaguacaucgaccgccagggcaagacgccgcugggccugguggaccucuucgucuucuccaccagcuucuaccugaucuccaucuuccugcaccuggugaagauccccacccaccggcacaucaccgggaagcccugccccaagccgcaccgccucaaccacaugggcaucugcagcugcgggcuguacaaccaccccggcgugcccgucaaguggaagcggugaggacuaguuauaagacugacuagcccgaugggccucccaacgggcccuccuccccuccuugcaccgagauuaauaaaaaaaaaaaaaaaaaaaaaaaaaaaaaaaaaaaaaaaaaaaaaaaaaaaaaaaaaaaaaaaaugcaucccccccccccccccccccccccccccccccaaaggcucuuuucagagccaccagaauu

SEQ ID NO: 7335 - RNA, 1690 nt, Artificial Sequence
  mRNA product Design i-3 comprising derived and/or modified sequence from LASV(Lassa virus/H.sapiens-wt/NGA/2016/ISTH_0017;Clade II)__AVO03567__GPCstabilized (opt1)
gggagaaagcuuaccaugggccagaucaucaccuucuuccaggaggugccccacgucaucgaggaggugaugaacaucgugcugaucgcccucagccugcuggccauccucaaggggaucuacaacgucgcgaccugcggccuguucgggcugguguccuuccuccugcugugcggccgcagcugcuccacgaccuacaaggggguguacgagcuccagacccuggagcuggacauggccagccucaacaugaccaugccgcuguccugcacgaagaacaacagccaccacuacaucauggucggcaacgagaccggccuggagcucacccugaccaacacguccaucaucaaccacaaguucugcaaccugagcgacgcccacaagaagaaccucuacgaccacgcccugauguccaucaucagcaccuuccaccuguccauccccaacuucaaccaguacgaggccaugagcugcgacuucaacgggggcaagaucuccgugcaguacaaccucagccacaccuacgcgaucgacgccgccaaccacugcgggaccaucgccaacggcgugcugcagacguucaugcggauggcguggggcggguccuacaucgcccuggacagcggcugcggguccugggacugcaucaugaccagcuaccaguaccucaucauccagaacaccaccugggaggaccacugccaguucucccgccccagccccaucggcuaccuggggcugcucagccagcggacgcgcgacaucuacaucucccggcgccggcgcggcaccuucaccuggacccugagcgacuccgagggcaacgagacgcccgggggcuacugccugacccgguggaugcucaucgaggccgagcugaagugcuucgggaacaccgccgucgccaagugcaacgagaagcacgacgaggaguucugcgacaugcugcgccucuucgacuucaacaagcaggcgauccggcgccugaagaccccggcccagaugagcauccagcugaucaacaaggccgugaacgcccucaucaacgaccagcugaucaugaagaaccaccuccgggacaucaugugcauccccuacugcaacuacuccaaguacugguaccugaaccacacggugaccggcaagaccagccugccccgcugcuggcuggucuccaacgggagcuaccucaacgagacccacuucuccgacgacaucgagcagcaggccgacaacaugaucacggagcugcugcagaaggaguacauggaccggcagggcaagaccccgcucggccugguggaccuguucguguucagcaccuccuucuaccucaucagcaucuuccugcaccugguccgcauccccacccaccggcacgugaucgggaagcccugccccaagccgcaccgccugaaccacaugggcaucugcuccugcgggcucuacaagcaccccggcgugcccgucaaguggaagcggugaggacuaguuauaagacugacuagcccgaugggccucccaacgggcccuccuccccuccuugcaccgagauuaauaaaaaaaaaaaaaaaaaaaaaaaaaaaaaaaaaaaaaaaaaaaaaaaaaaaaaaaaaaaaaaaaugcaucccccccccccccccccccccccccccccccaaaggcucuuuucagagccaccagaauu

SEQ ID NO: 7336 - RNA, 1690 nt, Artificial Sequence
  mRNA product Design i-3 comprising derived and/or modified sequence from LASV(Lassa virus/H.sapiens-wt/NGA/2018/ISTH_0959;Clade II)__AVV65099__GPCstabilized (opt1)
gggagaaagcuuaccaugggccagaucaucaccuucuuccaggaggugccccacgucaucgaggaggugaugaacaucgugcugaucgcccucagccugcuggccauccucaaggggaucuacaacgucgugaccugcggccuguucgggcugguguccuuccuccugcugugcggccgcagcugcuccacgaccuacaagggggucuacgagcuccagacccuggagcuggacauggcgagccucaacaugaccaugccgcuguccugcacgaagaacaacagccaccacuacaucauggugggcaacgagaccggccuggagcucacccugaccaacacguccaucaucaaccacaaguucugcaaccugagcgacgcccacaagaagaaccucuacgaccacgcccugauguccaucaucagcaccuuccaccuguccauccccaacuucaaccaguacgaggccaugagcugcgacuucaacgggggcaagaucuccgugcaguacaaccucagccacgccuacgcgaucgacgccgccaaccacugcgggaccaucgccaacggcguccugcagaccuucaugcggauggcguggggcggguccuacaucgcccuggacagcggcugcggguccugggacugcaucaugacgagcuaccaguaccucaucauccagaacaccaccugggaggaccacugccaguucucccgccccagccccaucggcuaccuggggcugcucagccagcggacccgcgacaucuacaucucccggcgccggcgcggcacguucaccuggacccugagcgacuccgagggcaacgagacccccgggggcuacugccugacgcgguggaugcucaucgaggccgagcugaagugcuucgggaacaccgccguggccaagugcaacgagaagcacgacgaggaguucugcgacaugcugcgccucuucgacuucaacaagcaggcgauccggcgccugaagaccccggcccagaugagcauccagcugaucaacaaggccgugaacgcccucaucaacgaccagcugaucaugaagaaccaccuccgggacaucaugugcauccccuacugcaacuacuccaaguacugguaccugaaccacaccgucacgggcaagaccagccugccccgcugcuggcugguguccaacgggagcuaccucaacgagacccacuucuccgacgacaucgagcagcaggccgacaacaugaucaccgagcugcugcagaaggaguacaucgaccggcagggcaagacgccgcucggccugguggaccuguucgucuucagcaccuccuucuaccucaucagcaucuuccugcaccuggugaagauccccacccaccgccacgugaucgggaagcccugccccaagccgcaccggcugaaccacaugggcaucugcuccugcgggcucuacaagcaccccggcguccccgugaaguggaagcgcugaggacuaguuauaagacugacuagcccgaugggccucccaacgggcccuccuccccuccuugcaccgagauuaauaaaaaaaaaaaaaaaaaaaaaaaaaaaaaaaaaaaaaaaaaaaaaaaaaaaaaaaaaaaaaaaaugcaucccccccccccccccccccccccccccccccaaaggcucuuuucagagccaccagaauu

SEQ ID NO: 7337 - RNA, 1690 nt, Artificial Sequence
  mRNA product Design i-3 comprising derived and/or modified sequence from LASV(LASV003-NIG-2008;Clade II)__AIT17580__GPCstabilized (opt1)
gggagaaagcuuaccaugggccagaucaucaccuucuuccaggaggugccccacgucaucgaggaggugaugaacaucgugcugaucgcccucagccugcuggccauccucaaggggaucuacaacgucgcgaccugcggccuguucgggcugguguccuuccuccugcugugcggccgcagcugcuccacgaccuacaaggggguguacgagcuccagacccuggagcuggacauggccagccucaacaugaccaugccgcuguccugcacgaagaacaacagccaccacuacaucauggucggcaacgagaccggccuggagcucacccugaccaacacguccaucaucaaccacaaguucugcaaccugagcgacgcccacaagaagaaccucuacgaccacgcccugauguccaucaucagcaccuuccaccuguccauccccaacuucaaccaguacgaggccaugagcugcgacuucaacgggggcaagaucuccgugcaguacaaccucagccacaccuacgcgguggacgccgccaaccacugcgggaccaucgccaacggcguccugcagacguucaugcggauggcguggggcggguccuacaucgcccuggacagcggcugcggguccugggacugcaucaugaccagcuaccaguaccucaucauccagaacaccaccugggaggaccacugccaguucucccgccccagccccaucggcuaccuggggcugcucagccagcggacgcgcgacaucuacaucucccggcgccggcgcggcaccuucaccuggacccugagcgacuccgagagcaacgagacgccgggcggguacugccugacccgguggaugcucaucgaggccgagcugaagugcuucggcaacaccgccguggccaagugcaacgagaagcacgacgaggaguucugcgacaugcugcgccucuucgacuucaacaagcaggcgauccggcgccugaaggcccccgcccagauguccauccagcugaucaacaaggccgugaacgcccucaucaacgaccagcugaucaugaagaaccaccuccgggacaucaugugcauccccuacugcaacuacagcaaguacugguaccugaaccacaccgucacggggcgcaccucccugccccggugcuggcuggugagcaacggcuccuaccucaacgagacccacuucagcgacgacaucgagcagcaggcggacaacaugaucaccgagcugcugcagaaggaguacauggaccgccaggggaagacgccgcucggccugguggaccuguucgucuucuccaccagcuucuaccucaucuccaucuuccugcaccuggugaagauccccacccaccggcacgugaucggcaagcccugccccaagccgcaccgccugaaccacauggggaucugcagcugcggccucuacaagcaccccgggguccccgugaaguggaagcggugaggacuaguuauaagacugacuagcccgaugggccucccaacgggcccuccuccccuccuugcaccgagauuaauaaaaaaaaaaaaaaaaaaaaaaaaaaaaaaaaaaaaaaaaaaaaaaaaaaaaaaaaaaaaaaaaugcaucccccccccccccccccccccccccccccccaaaggcucuuuucagagccaccagaauu

SEQ ID NO: 7338 - RNA, 1690 nt, Artificial Sequence
  mRNA product Design i-3 comprising derived and/or modified sequence from LASV(LASV035-NIG-2009;Clade II)__AIT17588__GPCstabilized (opt1)
gggagaaagcuuaccaugggccagaucaucaccuucuuccaggaggugccccacgucaucgaggaggugaugaacaucgugcugaucgcccucagccugcuggccauccucaaggggaucuacaacgucgcgaccugcggccuguucgggcugguguccuuccuccugcugugcggccgcagcugcuccacgaccuacaaggggguguacgagcuccagacccuggagcuggacauggccagccucaacaugaccaugccgcuguccugcacgaagaacaacagccaccacuacaucauggucggcaacgagaccggccuggagcucacccugaccaacacguccaucaucaaccacaaguucugcaaccugagcgacgcccacaagaagaaccucuacgaccacgcccugauguccaucaucagcaccuuccaccuguccauccccaacuucaaccaguacgaggccaugagcugcgacuucaacgggggcaagaucuccgugcaguacaaccucagccacgcguacgccguggacgccgccaaccacugcgggaccaucgcgaacggcguccugcagaccuucaugcggauggccuggggcggguccuacaucgcccuggacagcggcugcggguccugggacugcaucaugacgagcuaccaguaccucaucauccagaacaccaccugggaggaccacugccaguucucccgccccagccccaucggcuaccuggggcugcucagccagcggacccgcgacaucuacaucucccggcgccggcgcggcacguucaccuggacccugagcgacuccgagggcaacgagacccccgggggcuacugccugacgcgguggaugcucaucgaggccgagcugaagugcuucgggaacaccgccguggcgaagugcaacgagaagcacgacgaggaguucugcgacaugcugcgccucuucgacuucaacaagcaggccauccggcgccugaaggccccggcccagaugagcauccagcugaucaacaaggccgugaacgcgcucaucaacgaccagcugaucaugaagaaccaccuccgggacaucaugugcauccccuacugcaacuacuccaaguacugguaccugaaccacaccgucaccggcaagacgagccugccccgcugcuggcugguguccaacgggagcuaccucaacgagacccacuucuccgacgacaucgagcagcaggccgacaacaugaucaccgagcugcugcagaaggaguacaucgaccggcagggcaagaccccgcucggccugguggaccuguucgucuucagcacguccuucuaccucaucagcaucuuccugcaccuggugaagauccccacccaccgccacgugaucgggaagcccugccccaagccgcaccggcugaaccacaugggcaucugcuccugcgggcucuacaagcaccccggcguccccgugaaguggaagcgcugaggacuaguuauaagacugacuagcccgaugggccucccaacgggcccuccuccccuccuugcaccgagauuaauaaaaaaaaaaaaaaaaaaaaaaaaaaaaaaaaaaaaaaaaaaaaaaaaaaaaaaaaaaaaaaaaugcaucccccccccccccccccccccccccccccccaaaggcucuuuucagagccaccagaauu

SEQ ID NO: 7339 - RNA, 1690 nt, Artificial Sequence
  mRNA product Design i-3 comprising derived and/or modified sequence from LASV(LASV1000-NIG-2009;Clade II)__AIT17782__GPCstabilized (opt1)
gggagaaagcuuaccaugggccagaucaucaccuucuuccaggaggugccccacgucaucgaggaggugaugaacaucgugcugaucgcccucagccugcuggccauccucaaggggaucuacaacgucgcgaccugcggccuguucgggcugguguccuuccuccugcugugcggccgcagcugcuccacgaccuacaaggggguguacgagcuccagacccuggagcuggacauggccagccucaacaugaccaugccgcuguccugcacgaagaacaacagccaccacuacaucauggucggcaacgagaccggccuggagcucacccugaccaacacguccaucaucaaccacaaguucugcaaccugagcgacgcccacaagaagaaccucuacgaccacgcccugauguccaucaucagcaccuuccaccuguccauccccaacuucaaccaguacgaggccaugagcugcgacuucaacgggggcaagaucuccgugcaguacaaccucagccacaccuacgcgguggacgccgccaaccacugcgggaccaucgccaacggcguccugcagacguucaugcggauggcguggggcggguccuacaucgcccuggacagcggcugcggguccugggacugcaucaugaccagcuaccaguaccucaucauccagaacaccaccugggaggaccacugccaguucucccgccccagccccaucggcuaccuggggcugcucagccagcggacgcgcgacaucuacaucucccggcgccggcgcggcaccuucaccuggacccugagcgacuccgagggcaacgagacgcccgggggcuacugccugacccgguggaugcucaucgaggccgagcugaagugcuucgggaacaccgccguggccaagugcaacgagaagcacgacgaggaguucugcgacaugcugcgccucuucgacuucaacaagcaggcgaucaagcggcugaagaccccggcccagaugagcauccagcugaucaacaaggccgugaacgcccucaucaacgaccagcugaucaugaagaaccaccuccgcgacaucaugugcauccccuacugcaacuacuccaaguacugguaccugaaccacacggucaccggcaagaccagccugccccggugcuggcugguguccaacgggagcuaccucaacgagacccacuucuccgacgacaucgagcagcaggccgacaacaugaucacggagcugcugcagaaggaguacaucgaccgccagggcaagaccccgcucggccugguggaccuguucgucuucagcaccuccuucuaccucaucagcaucuuccugcaccuggugaagauccccacccaccggcacguggucgggaagcccugccccaagccgcaccgccugaaccacaugggcaucugcuccugcgggcucuacaagcaccccggcgugcccgugaaguggaagcggugaggacuaguuauaagacugacuagcccgaugggccucccaacgggcccuccuccccuccuugcaccgagauuaauaaaaaaaaaaaaaaaaaaaaaaaaaaaaaaaaaaaaaaaaaaaaaaaaaaaaaaaaaaaaaaaaugcaucccccccccccccccccccccccccccccccaaaggcucuuuucagagccaccagaauu

SEQ ID NO: 7340 - RNA, 1690 nt, Artificial Sequence
  mRNA product Design i-3 comprising derived and/or modified sequence from LASV(LASV221-NIG-2010;Clade II)__AIT17624__GPCstabilized (opt1)
gggagaaagcuuaccaugggccagaucaucaccuucuuccaggaggugccccacgucaucgaggaggugaugaacaucgugcugaucgcccucagccugcuggccauccucaaggggaucuacaacgucgcgaccugcggccuguucgggcugguguccuuccuccugcugugcggccgcagcugcuccacgaccuacaaggggguguacgagcuccagacccuggagcuggacauggccagccucaacaugaccaugccgcuguccugcacgaagaacaacagccaccacuacaucauggucggcaacgagaccggccuggagcucacccugaccaacacguccaucaucaaccacaaguucugcaaccugagcgacgcccacaagaagaaccucuacgaccacgcccugauguccaucaucagcaccuuccaccuguccauccccaacuucaaccaguacgaggccaugagcugcgacuucaacgggggcaagaucuccgugcaguacaaccucagccacaccuacgcgaucgacgccgccaaccacugcgggaccaucgccaacggcgugcugcagacguucaugcggauggcguggggcggguccuacaucgcccuggacagcggcugcggguccugggacugcaucaugaccagcuaccaguaccucaucauccagaacaccaccugggaggaccacugccaguucucccgccccagccccaucggcuaccuggggcugcucagccagcggacgcgcgacaucuacaucucccggcgccggcgcggcaccuucaccuggacccugagcgacuccgagggcaacgagacgcccgggggcuacugccugacccgguggaugcucaucgaggccgagcugaagugcuucgggaacaccgccgucgccaagugcaacgagaagcacgacgaggaguucugcgacaugcugcgccucuucgacuucaacaagcaggcgauccggcgccugaagaccccggcccagaugagcauccagcugaucaacaaggccgugaacgcccucaucaacgaccagcugaucaugaagaaccaccuccgggacaucaugugcauccccuacugcaacuacuccaaguacugguaccugaaccacacggugaccggcaagaccagccugccccgcugcuggcuggucuccaacgggagcuaccucaacgagacccacuucuccgacgacaucgagcagcaggccgacaacaugaucacggagaugcugcagaaggaguacauggaccggcagggcaagaccccgcugggccucguggaccuguucguguucagcaccuccuucuaccugaucagcaucuuccuccaccuggucaagauccccacccaccgccacgugaucgggaagcccugccccaagccgcaccggcugaaccacaugggcaucugcuccugcgggcuguacaagcaccccggcgugcccgucaaguggaagcgcugaggacuaguuauaagacugacuagcccgaugggccucccaacgggcccuccuccccuccuugcaccgagauuaauaaaaaaaaaaaaaaaaaaaaaaaaaaaaaaaaaaaaaaaaaaaaaaaaaaaaaaaaaaaaaaaaugcaucccccccccccccccccccccccccccccccaaaggcucuuuucagagccaccagaauu

SEQ ID NO: 7341 - RNA, 1690 nt, Artificial Sequence
  mRNA product Design i-3 comprising derived and/or modified sequence from LASV(LASV237-NIG-2010;Clade II)__AIT17638__GPCstabilized (opt1)
gggagaaagcuuaccaugggccagaucaucaccuucuuccaggaggugccccacgucaucgaggaggugaugaacaucgugcugaucgcccucagccugcuggccauccucaaggggaucuacaacgucgcgaccugcggccuguucgggcugguguccuuccuccugcugugcggccgcagcugcuccacgaccuacaaggggguguacgagcuccagacccuggagcuggacauggccagccucaacaugaccaugccgcuguccugcacgaagaacaacagccaccacuacaucauggucggcaacgagaccggccuggagcucacccugaccaacacguccaucaucaaccacaaguucugcaaccugagcgacgcccacaagaaggaccucuacgaccacgcccugauguccaucaucagcaccuuccaccuguccauccccaacuucaaccaguacgaggccaugagcugcgacuucaacgggggcaagaucuccgugcaguacaaccucagccacaccuacgcgguggacgccgccaaccacugcgggaccaucgccaacggcguccugcagacguucaugcggauggcguggggcggguccuacaucgcccuggacagcggcugcggguccugggacugcaucaugaccagcuaccaguaccucaucauccagaacaccaccugggaggaccacugccaguucucccgccccagccccaucggcuaccuggggcugcucagccagcggacgcgcgacaucuacaucucccggcgccggcgcggcaccuucaccuggacccugagcgacuccgagggcaacgagacgcccgggggcuacugccugacccgguggaugcucaucgaggccgagcugaagugcuucgggaacaccgccguggccaagugcaacgagaagcacgacgaggaguucugcgacaugcugcgccucuucgacuucaacaagcaggcgauccggcgccugaagaccccggcccagaugagcauccagcugaucaacaaggccgugaacgcccucaucaacgaccagcugaucaugaagaaccaccuccgggacaucaugugcauccccuacugcaacuacuccaaguacugguaccugaaccacacggucaccggcaagaccagccugccccgcugcuggcugguguccaacgggagcuaccucaacgagacccacuucuccgacgacaucgagcagcaggccgacaacaugaucacggagcugcugcagaaggaguacauggaccggcagggcaagaccccgcucggccugguggaccuguucgucuucagcaccuccuucuaccucaucagcaucuuccugcaccugaucaagauccccacccaccgccacaucacggggaagcccugccccaagccgcaccggcugaaccacaugggcaucugcuccugcgggcucuacaagcaccccggcgugcccgugaaguggaagcgcugaggacuaguuauaagacugacuagcccgaugggccucccaacgggcccuccuccccuccuugcaccgagauuaauaaaaaaaaaaaaaaaaaaaaaaaaaaaaaaaaaaaaaaaaaaaaaaaaaaaaaaaaaaaaaaaaugcaucccccccccccccccccccccccccccccccaaaggcucuuuucagagccaccagaauu

SEQ ID NO: 7342 - RNA, 1690 nt, Artificial Sequence
  mRNA product Design i-3 comprising derived and/or modified sequence from LASV(LASV253-NIG-2011;Clade II)__AIT17670__GPCstabilized (opt1)
gggagaaagcuuaccaugggccagaucaucaccuucuuccaggaggugccccacgucaucgaggaggugaugaacaucgugcugaucgcccucagccugcuggccauccucaaggggaucuacaacgucgcgaccugcggccuguucgggcugguguccuuccuccugcugugcggccgcagcugcuccacgaccuacaaggggguguacgagcuccagacccuggagcuggacauggccagccucaacaugaccaugccgcuguccugcacgaagaacaacagccaccacuacaucauggucggcaacgagaccggccuggagcucacccugaccaacacguccaucaucaaccacaaguucugcaaccugagcgacgcccacaagaagaaccucuacgaccacgcccugauguccaucaucagcaccuuccaccuguccauccccaacuucaaccaguacgaggccaugagcugcgacuucaacgggggcaagaucuccgugcaguacaaccucagccacaccuacgcgguggacgccgccaaccacugcgggaccaucgccaacggcguccugcagacguucaugcggauggcguggggcggguccuacaucgcccuggacagcggcugcggguccugggacugcaucaugaccagcuaccaguaccucaucauccagaacaccaccugggaggaccacugccaguucucccgccccagccccaucggcuaccuggggcugcucagccagcggacgcgcgacaucuacaucucccggcgccggcgcggcaccuucaccuggacccugagcgacuccgagggcaacgagacgcccgggggcuacugccugacccgguggaugcucaucgaggccgagcugaagugcuucgggaacaccgccguggccaagugcaacgagaagcacgacgaggaguucugcgacaugcugcgccucuucgacuucaacaagcaggcgauccggcgccugaaggccccggcccagaugagcauccagcugaucaacaaggccgugaacgcccucaucaacgaccagcugaucaugaagaaccaccuccgggacaucaugugcauccccuacugcaacuacuccaaguacugguaccugaaccacaccgucacgggccgcaccagccugccccggugcuggcugguguccaacgggagcuaccucaacgagacccacuucuccgacgacaucgagcagcaggcggacaacaugaucaccgagcugcugcagaaggaguacaucgaccgccagggcaagacgccgcucggccugguggaccuguucgucuucagcaccuccuucuaccucaucagcaucuuccugcaccuggugaagauccccacccaccggcacaucaucgggaagcccugccccaagccgcaccgccugaaccacaugggcaucugcuccugcgggcucuacaagcaccccggcgugcccgucaaguggaagcggugaggacuaguuauaagacugacuagcccgaugggccucccaacgggcccuccuccccuccuugcaccgagauuaauaaaaaaaaaaaaaaaaaaaaaaaaaaaaaaaaaaaaaaaaaaaaaaaaaaaaaaaaaaaaaaaaugcaucccccccccccccccccccccccccccccccaaaggcucuuuucagagccaccagaauu

SEQ ID NO: 7343 - RNA, 1690 nt, Artificial Sequence
  mRNA product Design i-3 comprising derived and/or modified sequence from LASV(LASV254-NIG-2011;Clade II)__AIT17674__GPCstabilized (opt1)
gggagaaagcuuaccaugggccagaucaucaccuucuuccaggaggugccccacgucaucgaggaggugaugaacaucgugcugaucgcccucagccugcuggccauccucaaggggaucuacaacgucgcgaccugcggccuguucgggcugguguccuuccuccugcugugcggccgcagcugcuccacgaccuacaaggggguguacgagcuccagacccuggagcuggacaugaccaaccucaacaugacgaugccgcugagcugcaccaagaacaacucccaccacuacaucauggucggcaacgagaccggccuggagcucacccugacgaacaccagcaucaucaaccacaaguucugcaaccuguccgacgcccacaagaagaaccucuacaaccacgcccugaugagcaucaucuccaccuuccaccugagcauccccaacuucaaccaguacgaggccauguccugcgacuucaacgggggcaagaucagcgugcaguacaaccucucccacagcuacgccguggacgcggccaaccacugcgggaccaucgccaacggcguccugcagacguucaugcggauggccuggggcggguccuacaucgcgcuggacagcggcugcgggaacugggacugcaucaugaccuccuaccaguaccucaucauccagaacaccaccugggaggaccacugccaguucagccgccccucccccaucggcuaccuggggcugcucagccagcggacgcgcgacaucuacaucagccggcgccggcgcggcaccuucaccuggacccuguccgacagcgagggcaacgagacgcccgggggcuacugccugacccgguggaugcucaucgaggccgagcugaagugcuucgggaacaccgccguggccaagugcaacgagaagcacgacgaggaguucugcgacaugcugcgccucuucgacuucaacaagcaggccauccggcgccugaagaccccggcgcaggccaacauccagcugaucaacaaggccgugaacgcccucaucaacgaccagcugaucaugaagaaccaccuccgggacaucaugugcauccccuacugcaacuacuccaaguacugguaccugaaccacacggucaccggcaagaccagccugccccgcugcuggcugguguccaacgggagcuaccucaacgagacccacuucuccgacgacaucgagcagcaggccgacaacaugaucacggagcugcugcagaaggaguacauggaccggcagggcaagaccccgcucggccugguggaccuguucgucuucagcaccuccuucuaccucaucagcaucuuccugcaccuggugaagauccccacccaccgccacgugaucgggaagcccugccccaagccgcaccggcugaaccacaugggcaucugcuccugcgggcucuacaagcaccccggcguccccgugaaguggaagcgcugaggacuaguuauaagacugacuagcccgaugggccucccaacgggcccuccuccccuccuugcaccgagauuaauaaaaaaaaaaaaaaaaaaaaaaaaaaaaaaaaaaaaaaaaaaaaaaaaaaaaaaaaaaaaaaaaugcaucccccccccccccccccccccccccccccccaaaggcucuuuucagagccaccagaauu

SEQ ID NO: 7344 - RNA, 1690 nt, Artificial Sequence
  mRNA product Design i-3 comprising derived and/or modified sequence from LASV(Nig08-A19;Clade III)__ADU56618__GPCstabilized (opt1)
gggagaaagcuuaccaugggccagaucgugaccuucuuccaggaggucccccacgugaucgaggaggugaugaacaucguccugaucgcccucagcauccuggccauccugaaggggcucuacaacaucgcgaccugcggccugaucgggcuggugacguuccuccugcuguccggccgcagcugcuccaugaccuacaaggggguguacgagcuccagacccuggagcugaacaugaacacccucaacaugacgaugccgcugagcugcaccaagaacaacucccaccacuacaucauggucggcaacgagaccggccuggagcucacccugacgaacaccagccugcuccaccacaaguucugcaaccuguccgacgcccacaagaagaaccuguacgaccacacccucaugagcaucaucuccaccuuccaccugagcauccccaacuucaaccaguacgaggccauguccugcgacuucaacgggggcaagaucacggugcaguacaaccugagccacuccuacgccaucgacgccgcgaaccacugcgggaccguggccaacggcguccuccagaccuucaugcggauggccuggggcgggagcuacaucgcccuggacuccggcugcgggaagugggacugcaucaugaccagcuaccaguaccugaucauccagaacacgaccugggaggaccacugccaguucucccgccccagccccaucggcuaccucgggcugcugucccagcggacccgcgacaucuacaucagccggcgccggcgcggcaccuucacguggacccucagcgacuccgagggcaacgagacccccgggggcuacugccugacccgguggaugcugaucgaggcggagcucaagugcuucgggaacacggccguggccaagugcaacgagaagcacgacgaggaguucugcgacaugcugcgccuguucgacuucaacaagcaggccauccggcgccucaaggccccggcgcagaugagcauccagcugaucaacaaggccgugaacgcccugaucaacgaccagcucaucaugaagaaccaccuccgggacaucaugugcauccccuacugcaacuacuccaaguacugguaccugaaccacaccagcaccggccgcaccucccugccccggugcuggcuggucagcaacggguccuaccugaacgagacgcacuucagcgacgacaucgagcagcaggccgacaacaugaucaccgagaugcuccagaaggaguaccuggaccgccagggcaagaccccgcugggccucguggaccuguucguguucuccaccagcuucuaccugaucuccaucuuccugcaccucgucaagauccccacgcaccggcacaucguggggaagcccugccccaagccgcaccgccugaaccacaugggcaucugcagcugcgggcuguacaagcagcccggcgugcccguccgguggaagcgcugaggacuaguuauaagacugacuagcccgaugggccucccaacgggcccuccuccccuccuugcaccgagauuaauaaaaaaaaaaaaaaaaaaaaaaaaaaaaaaaaaaaaaaaaaaaaaaaaaaaaaaaaaaaaaaaaugcaucccccccccccccccccccccccccccccccaaaggcucuuuucagagccaccagaauu

SEQ ID NO: 7345 - RNA, 1693 nt, Artificial Sequence
  mRNA product Design i-3 comprising derived and/or modified sequence from LASV(G1180-SLE-2010;Clade IV)__AIT17168__GPCstabilized (opt1)
gggagaaagcuuaccaugggccagaucgugaccuucuuccaggaggucccccacgugaucgaggaggugaugaacaucguccugaucgcccucagcauccuggccgugcugaaggggcucuacaacuucgcgaccugcggccugguggggcugcucacguuccugcugcucugcggccgcuccugcaccgccagccgguacaagggggucuacgagcugcagacccuggagcucaacauggagacccugaacaugacgaugccgcuguccugcaccaagaacaacagccaccacuacaucauggugggcaacgagaccggccucgagcugacccugacgaacaccuccaucaucaaccacaaguucugcaaccucagcgacgcccacaagaagaaccuguacgaccacgcccugauguccaucaucagcaccuuccaccucuccauccccaacuucaaccaguacgaggccaugagcugcgacuucaacgggggcaagaucuccgugcaguacaaccugagccacuccuacgcgggggacgccgccaaccacugcggcaccgucgccaacggggugcugcagacguucaugcgcauggcguggggcggcagcuacaucgcccucgacuccgggugcggcagcugggacugcaucaugaccuccuaccaguaccugaucauccagaacaccaccugggaggaccacugccaguucagccggcccucccccaucggguaccugggccuccugagccagcgcacgcgggacaucuacaucagccgccggcgccggggcaccuucaccuggacccuguccgacagcgaggggaaggacacgccgggcggguacugccucacccgcuggaugcugaucgaggccgagcugaagugcuucggcaacaccgccguggccaagugcaacgagaagcacgacgaggaguucugcgacaugcuccggcuguucgacuucaacaagcaggcgauccagcgccugaaggcccccgcccagauguccauccagcucaucaacaaggccgucaacgcccugaucaacgaccagcugaucaugaagaaccaccuccgggacaucaugugcauccccuacugcaacuacagcaaguacugguaccugaaccacaccacgaccgggaagaccucccugcccaagugcuggcucgugagcaacggcuccuaccugaacgagacccacuucagcgacgacaucgagcagcaggcggacaacaugaucacggagaugcugcagaaggaguacauggagcgccagggcaagaccccgcucgggcugguggaccuguucgucuucuccaccagcuucuaccucaucuccaucuuccugcaccuggugaagauccccacccaccggcacaucgugggcaagagcugccccaagccccaccgccugaaccacauggggaucugcuccugcggccucuacaagcagccggggguccccgugaaguggaagcggugaggacuaguuauaagacugacuagcccgaugggccucccaacgggcccuccuccccuccuugcaccgagauuaauaaaaaaaaaaaaaaaaaaaaaaaaaaaaaaaaaaaaaaaaaaaaaaaaaaaaaaaaaaaaaaaaugcaucccccccccccccccccccccccccccccccaaaggcucuuuucagagccaccagaauu

SEQ ID NO: 7346 - RNA, 1693 nt, Artificial Sequence
  mRNA product Design i-3 comprising derived and/or modified sequence from LASV(G1442-SLE-2011;Clade IV)__AIT17180__GPCstabilized (opt1)
gggagaaagcuuaccaugggccagaucgugaccuucuuccaggaggucccccacgugaucgaggaggugaugaacaucguccugaucgcccucagcauccuggccgugcugaaggggcucuacaacguggcgaccugcggccugaucgggcuggucacguuccuccugcugugcggccgcuccugcaccaccacccucuacaaggggguguacgagcugcagacgcuggagcucaacauggagacccugaacaugaccaugccgcugagcugcaccaagaacaacucccaccacuacauccgggugggcaacgagacgggccucgagcugacccugaccaacaccagcaucaucaaccacaaguucugcaaccucuccgacgcccacaagaagaaccuguacgaccacgcccugaugagcaucaucuccacguuccaccucagcauccccaacuucaaccaguacgaggccauguccugcgacuucaacgggggcaagaucagcguccaguacaaccugucccacagcuacgccggggacgcggccaaccacugcggcaccguggccaacggggugcugcagaccuucaugcgcauggccuggggcggcuccuacaucgcgcucgacagcgggugcggcaacugggacugcaucaugaccuccuaccaguaccugaucauccagaacacgaccugggacgaccacugccaguucagccggcccucccccaucggguaccugggccuccugagccagcgcacccgggacgucuacaucucccgccggcgccggggcaccuucacguggacccugagcgacagcgaggggaaggacaccccgggcggguacugccucacccgcuggaugcugaucgaggccgagcugaagugcuucggcaacacggccguggccaagugcaacgagaagcacgacgaggaguucugcgacaugcuccggcuguucgacuucaacaagcaggccauccagcgccugaaggcgcccgcccagauguccauccagcucaucaacaaggccgugaacgcccugaucaacgaccagcugaucaugaagaaccaccuccgggacaucaugugcauccccuacugcaacuacagcaaguacugguaccugaacaacaccgccaccgggaagaccucccugcccaagugcuggcucaucagcaacggcuccuaccugaacgagacgcacuucagcgacgacaucgagcaggaggcggacaacaugaucaccgagaugcugcagaaggaguacauggagcgccagggcaagaccccgcucgggcuggucgaccuguucguguucuccaccagcuucuaccucaucuccaucuuccugcaccuggugaagauccccacgcaccggcacaucgucggcaagagcugccccaagccccaccgccugaaccacauggggaucugcuccugcggccucuacaagcagccgggggugcccgugcgguggaagcgcugaggacuaguuauaagacugacuagcccgaugggccucccaacgggcccuccuccccuccuugcaccgagauuaauaaaaaaaaaaaaaaaaaaaaaaaaaaaaaaaaaaaaaaaaaaaaaaaaaaaaaaaaaaaaaaaaugcaucccccccccccccccccccccccccccccccaaaggcucuuuucagagccaccagaauu

SEQ ID NO: 7347 - RNA, 1693 nt, Artificial Sequence
  mRNA product Design i-3 comprising derived and/or modified sequence from LASV(G3010-SLE-2013;Clade IV)__AIT17344__GPCstabilized (opt1)
gggagaaagcuuaccaugggccagaucgugaccuucuuccaggaggucccccacgugaucgaggaggugaugaacaucguccugaucgcccucagcauccuggccgugcugaaggggcucuacaacuucgcgaccugcggccugguggggcuggucacguuccuccugcugugcggccgcuccugcaccaccagccucuacaaggggguguacgagcugcagacccuggagcucaacauggagacgcugaacaugaccaugccgcuguccugcaccaagaacaacagccaccacuacaucauggugggcaacgagaccggccucgagcugacgcugaccaacaccuccaucaucaaccacaaguucugcaaccucagcgacgcccacaagaagaaccuguacaaccacgcccugauguccaucaucagcaccuuccaccucuccauccccaacuucaaccaguacgaggccaugagcugcgacuucaacgggggcaagaucuccguccaguacaaccugagccacuccuacgccggggacgcggccagccacugcggcacgguggccaacggggugcugcagaccuucaugcggauggccuggggcggcuccuacaucgcgcucgacagcgggugcggcaagugggacugcaucaugaccuccuaccaguaccugaucauccagaacaccacgugggaggaccacugccaguucagccgccccucccccaucggguaccugggccuccugagccagcggacccgcgacaucuacaucagccggcgccggcgcggcaccuucaccuggacgcuguccgacagcgaggggaaggacaccccgggcggguacugccucacccgguggaugcugaucgaggccgagcugaagugcuucggcaacaccgccgucgccaagugcaacgagaagcacgacgaggaguucugcgacaugcuccgccuguucgacuucaacaagcaggccauccagcggcugaagacgcccgcgcagauguccauccagcucaucaacaaggccgugaacgcccugaucaacgaccagcugaucaugaagaaccaccuccgcgacaucaugugcauccccuacugcaacuacagcaaguacugguaccugaaccacaccaccaccgggaagacgucccugcccaagugcuggcucgugagcaacggcuccuaccugaacgagacccacuucagcgacgacaucgagcagcaggccgacaacaugaucaccgagaugcugcagaaggaguacauggagcggcagggcaagaccccgcucgggcuggucgaccuguucguguucuccacgagcuucuaccucaucuccaucuuccugcaccuggugaagauccccacccaccgccacaucgucggcaagagcugccccaagccccaccggcugaaccacauggggaucugcuccugcggccucuacaagcagccgggggugcccgugcgcuggaagcggugaggacuaguuauaagacugacuagcccgaugggccucccaacgggcccuccuccccuccuugcaccgagauuaauaaaaaaaaaaaaaaaaaaaaaaaaaaaaaaaaaaaaaaaaaaaaaaaaaaaaaaaaaaaaaaaaugcaucccccccccccccccccccccccccccccccaaaggcucuuuucagagccaccagaauu

SEQ ID NO: 7348 - RNA, 1693 nt, Artificial Sequence
  mRNA product Design i-3 comprising derived and/or modified sequence from LASV(G502-SLE-2009;Clade IV)__AIT17126__GPCstabilized (opt1)
gggagaaagcuuaccaugggccagaucgugaccuucuuccaggaggucccccacgugaucgaggaggugaugaacaucguccugaucgcccucagcauccuggccgugcugaaggggcucuacaacuucgcgaccugcggccugguggggcugcucacguuccugcugcucugcggccgcuccugcaccaccgggcuguacaagggcgucuacgagcugcagacccucgagcugaacauggagacgcugaacaugaccaugccgcucagcugcaccaagaacaacucccaccacuacaucauggugggcaacgagaccgggcuggagcugacgcucaccaacaccagcaucaucaaccacaaguucugcaaccuguccgacgcccacaagaagaaccuguacgaccacgcccucaugagcaucaucuccaccuuccaccugagcauccccaacuucaaccaguacgaggccauguccugcgacuucaacggcgggaagaucagcgugcaguacaaccugucccacagcuacgccggcgacgcggccgaccacugcgggacggucgccaacggcgugcuccagaccuucaugcggauggccuggggcggguccuacaucgcgcuggacagcggcugcgggcgcugggacugcaucaugaccuccuaccaguaccugaucauccagaacaccacgugggaggaccacugccaguucagccggcccucccccaucggcuaccucggccugcugagccagcgcacccgggacaucuacaucucccgccggcgccgggggaccuucaccuggacgcucagcgacagcgagggcaaggacacccccgggggcuacugccugacccgcuggaugcugaucgaggccgagcucaagugcuucgggaacaccgccguggccaagugcaacgagaagcacgacgaggaguucugcgacaugcugcggcuguucgacuucaacaagcaggccauccagcgccucaaggcgccggcccagauguccauccagcugaucaacaaggccgucaacgcccugaucaacgaccagcucgugaugaagaaccaccuccgggacaucaugugcauccccuacugcaacuacagccgcuacugguaccugaaccacacgaccaccggccggaccucccugcccaagugcuggcuggugagcaacggcuccuaccugaacgagacgcacuucagcgacgacaucgagcagcaggccgacaacaugaucaccgagaugcuccagaaggaguacauggagcgccaggggaagaccccgcugggccuggucgaccucuucguguucuccaccagcuucuaccugaucuccaucuuccugcaccuggugaagauccccacgcaccggcacaucgucggcaagagcugccccaagccccaccgccucaaccacauggggaucugcuccugcgggcuguacaagcagccgggcgugcccgugaaguggaagcggugaggacuaguuauaagacugacuagcccgaugggccucccaacgggcccuccuccccuccuugcaccgagauuaauaaaaaaaaaaaaaaaaaaaaaaaaaaaaaaaaaaaaaaaaaaaaaaaaaaaaaaaaaaaaaaaaugcaucccccccccccccccccccccccccccccccaaaggcucuuuucagagccaccagaauu

SEQ ID NO: 7349 - RNA, 1693 nt, Artificial Sequence
  mRNA product Design i-3 comprising derived and/or modified sequence from LASV(G733-SLE-2010;Clade IV)__AIT17154__GPCstabilized (opt1)
gggagaaagcuuaccaugggccagaucgugaccuucuuccaggaggucccccacgugaucgaggaggugaugaacaucguccugaucgcccucagcauccuggccgugcugaaggggcucuacaacuucgcgaccugcggcaucguggggcuggucuccuuccugcuccugugcggccgcagcugcacgaccucccuguacaaggggguguacgagcuccagacccuggagcugaacauggagacccucaacaugacgaugccgcugagcugcaccaagaacaacucccaccacuacaucauggugggcaacgagaccggccuggagcucacccugacgaacaccagcaucaucaaccacaaguucugcaaccuguccgacgcccacaagaagaaccucuacgaccacgcccugaugagcaucaucuccaccuuccaccugagcauccccaacuucaaccaguacgaggccauguccugcgacuucaacgggggcaagaucagcguccaguacaaccucucccacagcuacgccggggacgcggccaaccacugcggcaccaucgccaacggggugcugcagacguucaugcggauggccuggggcggcuccuacaucgcgcuggacagcgggugcgaccgcugggacugcaucaugaccuccuaccaguaccucaucauccagaacaccaccugggaggaccacugccaguucagccggcccucccccaucggcuaccuggggcugcucagccagcgcacgcgggacaucuacaucagccgccggcgccggggcaccuucaccuggacccuguccgacagcgagggcaaggacacgcccgggggcuacugccugacccgcuggaugcucaucgaggccgagcugaagugcuucgggaacaccgccguggccaagugcaacgagaagcacgacgaggaguucugcgacaugcugcggcuguucgacuucaacaagcaggccauccagcgccugaaggcgccggcccagauguccauccagcugaucaacaaggccgucaacgcccucaucaacgaccagcugaucaugaagaaccaccuccgggacaucaugugcauccccuacugcaacuacagcaaguacugguaccucaaccacaccacgaccggcaagaccucccugcccaagugcuggcuggugagcaacggguccuaccucaacgagacccacuucagcgacgacaucgagcagcaggccgacaacaugaucacggagaugcugcagaaggaguacauggagcgccagggcaagaccccgcugggccucguggaccuguucgucuucuccaccagcuucuaccugaucuccaucuuccuccaccuggugaagauccccacccaccggcacguggucggcaagagcugccccaagccccaccgccugaaccacauggggaucugcuccugcgggcuguacggccagccgggggugcccgugaaguggaagcggugaggacuaguuauaagacugacuagcccgaugggccucccaacgggcccuccuccccuccuugcaccgagauuaauaaaaaaaaaaaaaaaaaaaaaaaaaaaaaaaaaaaaaaaaaaaaaaaaaaaaaaaaaaaaaaaaugcaucccccccccccccccccccccccccccccccaaaggcucuuuucagagccaccagaauu

SEQ ID NO: 7350 - RNA, 1693 nt, Artificial Sequence
  mRNA product Design i-3 comprising derived and/or modified sequence from MOPV/LASV reassortant(IGS-1;Clade IV)__AFY05576__GPCstabilized (opt1)
gggagaaagcuuaccaugggccagaucgugaccuucuuccaggaggucccccacgugaucgaggaggugaugaacaucguccugaucgcccucagcgugcuggccgugcugaaggggcucuacaacuucgcgaccugcggccuggucgggcuggugacguuccuccugcugugcggccgcuccugcaccaccagccucuacaaggggguguacgagcugcagacccuggagcucaacauggagacgcugaacaugaccaugccgcuguccugcaccaagaacaacagccaccacuacaucauggucggcaacgagaccggccucgagcugacgcugaccaacaccuccaucaucaaccacaaguucugcaaccucagcgacgcccacaagaagaaccuguacgaccacgcccugauguccaucaucagcaccuuccaccucuccauccccaacuucaaccaguacgaggccaugagcugcgacuucaacgggggcaagaucuccgugcaguacaaccugagccacuccuacgccggggacgcggccaaccacugcggcacgguggccaacgggguccugcagaccuucaugcggauggccuggggcggcagcuacaucgcgcucgacuccgggugcggcaacugggacugcaucaugaccagcuaccaguaccugaucauccagaacaccacgugggaggaccacugccaguucucccgccccagccccaucggguaccugggccuccugucccagcggacccgcgacaucuacaucagccggcgccggcgcggcaccuucaccuggacgcugagcgacuccgagggggaggacaccccgggcggguacugccucacccgguggaugcugaucgaggccgagcugaagugcuucggcaacaccgccguggccaagugcaacgagaagcacgacgaggaguucugcgacaugcuccgccuguucgacuucaacaagcaggccauccagcggcugaaggcgcccgcccagaugagcauccagcucaucaacaaggccgugaacgcccugaucaacgaccagcugaucaugaagaaccaccuccgcgacaucaugugcauccccuacugcaacuacuccaaguacugguaccugaaccacacgaccaccgggcggaccagccugcccaagugcuggcucgucuccaacggcagcuaccugaacgagacgcacuucuccgacgacaucgagcagcaggccgacaacaugaucaccgagaugcugcagaaggaguacauggagcgccagggcaagaccccgcucgggcugguggaccuguucguguucagcaccuccuucuaccucaucagcaucuuccugcaccuggucaagauccccacgcaccggcacaucgugggcaaguccugccccaagccccaccgccugaaccacauggggaucugcagcugcggccucuacaagcagccgggggugcccgucaaguggaagcggugaggacuaguuauaagacugacuagcccgaugggccucccaacgggcccuccuccccuccuugcaccgagauuaauaaaaaaaaaaaaaaaaaaaaaaaaaaaaaaaaaaaaaaaaaaaaaaaaaaaaaaaaaaaaaaaaugcaucccccccccccccccccccccccccccccccaaaggcucuuuucagagccaccagaauu

SEQ ID NO: 7351 - RNA, 1693 nt, Artificial Sequence
  mRNA product Design i-3 comprising derived and/or modified sequence from LASV(LM765-SLE-2012;Clade IV)__AIT17814__GPCstabilized (opt1)
gggagaaagcuuaccaugggccagaucgugaccuucuuccaggaggucccccacgugaucgaggaggugaugaacaucguccugaucgcccucagcauccuggccgugcugaaggggcucuacaacuucgcgaccugcggccugguggggcuggucacguuccuccugcugugcggccgcuccugcaccaccagccucuacaaggggguguacgagcugcagacccuggagcucaacauggagacgcugaacaugaccaugccgcuguccugcaccaagaacaacagccaccacuacaucauggugggcaacgagaccggccucgagcugacgcugaccaacaccuccaucaucgaccacaaguucugcaaccucagcgacgcccaccggaagaaccuguacgaccacgcccugauguccaucaucagcaccuuccaccucuccauccccaacuucaaccaguacgaggccaugagcugcgacuucaacgggggcaagaucuccguccaguacaaccugagccacuccuacgccaaggacgcggccgaccacugcgggacgguggccaacggcgugcugcagaccuucaugcgcauggccuggggcgggagcuacaucgcgcucgacuccggcugcgggcggugggacugcaucaugaccagcuaccaguaccugaucauccagaacaccacgugggaggaccacugccaguucucccgccccagccccaucggcuaccuggggcuccugucccagcggacccgcgacaucuacaucagccggcgccggcgcggcaccuucaccuggacgcugagcgacuccgagggcaaggacacccccgggggcuacugccucacccgguggaugcugaucgaggccgagcugaagugcuucgggaacaccgccgucgccaagugcaacgagaagcacgacgaggaguucugcgacaugcuccgccuguucgacuucaacaagcaggccauccagcggcugaaggcgccggcccagaugagcauccagcucaucaacaaggccgugaacgcccugaucaacgaccagcugaucaugaagaaccaccuccgcgacaucaugugcauccccuacugcaacuacuccaaguacugguaccugaaccacacgaccaccggcaagaccagccugcccaagugcuggcucguguccaacgggagcuaccugaacgagacgcacuucuccgacgacaucgagcagcaggccgacaacaugaucaccgagaugcugcagaaggaguacauggagcggcagggcaagaccccgcucggccuggucgaccuguucguguucagcaccuccuucuaccucaucagcaucuuccugcaccuggugaagauccccacgcaccgccacaucgucgggaagcccugccccaagccgcaccggcugaaccacaugggcaucugcuccugcgggcucuacaagcagcccggcgugcccgugaaguggaagcgcugaggacuaguuauaagacugacuagcccgaugggccucccaacgggcccuccuccccuccuugcaccgagauuaauaaaaaaaaaaaaaaaaaaaaaaaaaaaaaaaaaaaaaaaaaaaaaaaaaaaaaaaaaaaaaaaaugcaucccccccccccccccccccccccccccccccaaaggcucuuuucagagccaccagaauu

SEQ ID NO: 7352 - RNA, 1693 nt, Artificial Sequence
  mRNA product Design i-3 comprising derived and/or modified sequence from LASV(LM776-SLE-2012;Clade IV)__AIT17824__GPCstabilized (opt1)
gggagaaagcuuaccaugggccagaucgugaccuucuuccaggaggucccccacgugaucgaggaggugaugaacaucguccugaucgcccucagcauccuggccgugcugaaggggcucuacaacuucgcgaccugcggccugguggggcuggucacguuccuccugcugugcggccgcuccugcaccaccagcguguacaaggggguguacgagcuccagacccuggagcugaacauggagacgcucaacaugaccaugccgcuguccugcaccaagaacaacagccaccacuacaucauggucggcaacgagaccggccuggagcucacgcugaccaacaccuccaucaucaaccacaaguucugcaaccugagcgacgcccacaagaagaaccucuacgaccacgcccugauguccaucaucagcaccuuccaccuguccauccccaacuucaaccaguacgaggccaugagcugcgacuucaacgggggcaagaucuccgugcaguacaaccucagccacuccuacgccggggacgcggccaaccacugcggcacgguggccaacgggguccugcagaccuucaugcggauggccuggggcggcagcuacaucgcgcuggacuccgggugcggcaagugggacugcaucaugaccagcuaccaguaccucaucauccagaacaccacgugggaggaccacugccaguucucccgccccagccccaucggguaccugggccugcucucccagcggacccgcgacaucuacaucagccggcgccggcgcggcaccuucaccuggacgcugagcgacuccgaggggaaggacaccccgggcggguacugccugacccgguggaugcucaucgaggccgagcugaagugcuucggcaacaccgccguggccaagugcaacgagaagcacgacgaggaguucugcgacaugcugcgccucuucgacuucaacaagcaggccauccagcggcugaaggcgcccgcccagaugagcauccagcugaucaacaaggccgugaacgcccucaucaacgaccagcugaucaugaagaaccaccuccgcgacaucaugugcauccccuacugcaacuacuccaaguacugguaccugaaccacacgaccaccgggaagaccagccugcccaagugcuggcuggucuccaacggcagcuaccucaacgagacgcacuucuccgacgacaucgagcagcaggccgacaacaugaucaccgagaugcugcagaaggaguacauggagcggcagggcaagaccccgcuggggcucguggaccuguucguguucagcaccuccuucuaccugaucagcaucuuccuccaccuggucaagauccccacgcaccgccacaucgugggcaaguccugccccaagccccaccggcugaaccacauggggaucugcagcugcggccuguacaagcagccgggggugcccguccgcuggaagcggugaggacuaguuauaagacugacuagcccgaugggccucccaacgggcccuccuccccuccuugcaccgagauuaauaaaaaaaaaaaaaaaaaaaaaaaaaaaaaaaaaaaaaaaaaaaaaaaaaaaaaaaaaaaaaaaaugcaucccccccccccccccccccccccccccccccaaaggcucuuuucagagccaccagaauu

SEQ ID NO: 7353 - RNA, 1693 nt, Artificial Sequence
  mRNA product Design i-3 comprising derived and/or modified sequence from LASV(Mad39;Clade IV)__ANH09722__GPCstabilized (opt1)
gggagaaagcuuaccaugggccagaucgugaccuucuuccaggaggucccccacgugaucgaggaggugaugaacaucguccugaucgcccucagcauccuggccgugcugaaggggcucuacaacguggcgaccugcggccugaucgggcuggucacguuccuccugcugugcggccgcuccugcaccaccacccucuacaaggggguguacgagcugcaggcccuggagcucaacauggagacgcugaacaugaccaugccgcugagcugcaccaagaacaacucccaccacuacauccgggugggcaacgagaccggccucgagcugacgcugaccaacaccagccucaucaaccacaaguucugcaaccuguccgacgcccacaagaagaaccuguacgaccacgcccucaugagcaucaucuccaccuuccaccugagcauccccaacuucaaccaguacgaggccauguccugcgacuucaacgacgggaagaucagcguccaguacaaccugucccacacguacgcgggcgacaccgccaaccacugcgggaccguggccaacggcgugcuccagaccuucaugcgcauggccuggggcgggagcuacaucgcgcuggacuccggcugcgggggcugggacugcaucaugacgagcuaccaguaccugaucauccagaacaccaccugggaggaccacugccaguucucccggcccagccccaucggguaccucggccugcugucccagcgcacccgggacaucuacaucagccgccggcgccggggcacguucaccuggacccucuccgacagcgaggggaaggacaccccgggcggguacugccugacgcgcuggaugcugaucgaggccgagcucaagugcuucggcaacaccgccgucgccaagugcaacgagaagcacgacgaggaguucugcgacaugcugcggcuguucgacuucaacaagcaggccauccagcgccucaaggcgcccgcccagaugagcauccagcugaucaacaaggccgugaacgcccugaucaacgaccagcucaucaugaagaaccaccuccgggacaucaugugcauccccuacugcaacuacuccaaguacugguaccugaaccacaccgugaccgggaagacgagccugcccaagugcuggcuggucuccaacggcagcuaccugaacgagacccacuucuccgacgacaucgagcagcaggccgacaacaugaucaccgagaugcuccagaaggaguacauggagcgccagggcaagaccccgcuggggcugguggaccucuucguguucagcacguccuucuaccugaucagcaucuuccugcaccuggucaagauccccacccaccggcacguggugggcaagcccugccccaagccgcaccgccucaaccacauggggaucugcuccugcggcuucuacaagcagcccgggguccccgugcgguggaagcgcugaggacuaguuauaagacugacuagcccgaugggccucccaacgggcccuccuccccuccuugcaccgagauuaauaaaaaaaaaaaaaaaaaaaaaaaaaaaaaaaaaaaaaaaaaaaaaaaaaaaaaaaaaaaaaaaaugcaucccccccccccccccccccccccccccccccaaaggcucuuuucagagccaccagaauu

SEQ ID NO: 7354 - RNA, 1693 nt, Artificial Sequence
  mRNA product Design i-3 comprising derived and/or modified sequence from LASV(Z0947-SLE-2011;Clade IV)__AIT17840__GPCstabilized (opt1)
gggagaaagcuuaccaugggccagaucgugaccuucuuccaggaggucccccacgugaucgaggaggugaugaacaucguccugaucgcccucagcauccuggccgugcugaaggggcucuacaacuucgcgaccugcggccugguggggcuggucacguuccuccugcugugcggccgcuccugcaccaucagccucuacaaggggguguacgagcugcagacccuggagcucaacauggagacccugaacaugacgaugccgcuguccugcaccaagaacaacagccaccacuacaucauggugggcaacgagaccggccucgagcugacccugacgaacaccuccaucaucaaccacaaguucugcaaccucagcgacgcccacaagaagaaccuguacgaccacgcccugauguccaucaucagcaccuuccaccucuccauccccaacuucaaccaguacgaggccaugagcugcgacuucaacgggggcaagaucuccguccaguacaaccugagccacuccuacgccggggacgcggccaaccacugcggcaccguggccaacggggugcugcagacguucaugcggauggccuggggcggcagcuacaucgcgcucgacuccgggugcgaccgcugggacugcaucaugaccagcuaccaguaccugaucauccagaacaccaccugggaggaccacugccaguucucccggcccagccccaucggcuaccuggggcuccugucccagcgcacgcgggacaucuacaucagccgccggcgccggggcaccuucaccuggacccugagcgacuccgagggcaaggacacgcccgggggcuacugccucacccgcuggaugcugaucgaggccgagcugaagugcuucgggaacaccgccgucgccaagugcaacgagaagcacgacgaggaguucugcgacaugcuccggcuguucgacuucaacaagcaggccauccagcgccugaaggcgccggcccagaugagcauccagcucaucaacaaggccgugaacgcccugaucaacgaccagcugaucaugaagaaccaccuccgggacaucaugugcauccccuacugcaacuacuccaaguacugguaccugaaccacaccacgaccggcaagaccagccugcccaagugcuggcucguguccaacgggagcuaccugaacgagacccacuucuccgacgacaucgagcagcaggccgacaacaugaucacggagaugcugcagaaggaguacauggagcgccagggcaagaccccgcucggccuggucgaccuguucguguucagcaccuccuucuaccucaucagcaucuuccugcaccuggugaagauccccacccaccggcacaucgucgggaagcccugccccaagccgcaccgccugaaccacaugggcaucugcuccugcgggcucuacaagcagcccggcgugcccgugaaguggaagcggugaggacuaguuauaagacugacuagcccgaugggccucccaacgggcccuccuccccuccuugcaccgagauuaauaaaaaaaaaaaaaaaaaaaaaaaaaaaaaaaaaaaaaaaaaaaaaaaaaaaaaaaaaaaaaaaaugcaucccccccccccccccccccccccccccccccaaaggcucuuuucagagccaccagaauu

SEQ ID NO: 7355 - RNA, 1693 nt, Artificial Sequence
  mRNA product Design i-3 comprising derived and/or modified sequence from LASV(Josiah;Clade IV)__NP_694870__GPCstabilized (opt2)
gggagaaagcuuaccaugggccagaucgucaccuucuuccaggaggucccccacgucaucgaggaggucaugaacaucguccucaucgcccucuccguccucgccguccucaagggccucuacaacuucgccaccugcggccucgucggccucgucaccuuccuccuccucugcggccgcuccugcaccaccucccucuacaagggcgucuacgagcuccagacccucgagcucaacauggagacccucaacaugaccaugccccucuccugcaccaagaacaacucccaccacuacaucauggucggcaacgagaccggccucgagcucacccucaccaacaccuccaucaucaaccacaaguucugcaaccucuccgacgcccacaagaagaaccucuacgaccacgcccucauguccaucaucuccaccuuccaccucuccauccccaacuucaaccaguacgaggccauguccugcgacuucaacggcggcaagaucuccguccaguacaaccucucccacuccuacgccggcgacgccgccaaccacugcggcaccgucgccaacggcguccuccagaccuucaugcgcauggccuggggcggcuccuacaucgcccucgacuccggcugcggcaacugggacugcaucaugaccuccuaccaguaccucaucauccagaacaccaccugggaggaccacugccaguucucccgccccucccccaucggcuaccucggccuccucucccagcgcacccgcgacaucuacaucucccgccgccgccggggcaccuucaccuggacccucuccgacuccgagggcaaggacacccccggcggcuacugccucacccgcuggaugcucaucgaggccgagcucaagugcuucggcaacaccgccgucgccaagugcaacgagaagcacgacgaggaguucugcgacaugcuccgccucuucgacuucaacaagcaggccauccagcgccucaaggcccccgcccagauguccauccagcucaucaacaaggccgucaacgcccucaucaacgaccagcucaucaugaagaaccaccuccgcgacaucaugugcauccccuacugcaacuacuccaaguacugguaccucaaccacaccaccaccggccgcaccucccuccccaagugcuggcucgucuccaacggcuccuaccucaacgagacccacuucuccgacgacaucgagcagcaggccgacaacaugaucaccgagaugcuccagaaggaguacauggagcgccagggcaagaccccccucggccucgucgaccucuucgucuucuccaccuccuucuaccucaucuccaucuuccuccaccucgucaagauccccacccaccgccacaucgucggcaaguccugccccaagccccaccgccucaaccacaugggcaucugcuccugcggccucuacaagcagcccggcguccccgucaaguggaagcgcugaggacuaguuauaagacugacuagcccgaugggccucccaacgggcccuccuccccuccuugcaccgagauuaauaaaaaaaaaaaaaaaaaaaaaaaaaaaaaaaaaaaaaaaaaaaaaaaaaaaaaaaaaaaaaaaaugcaucccccccccccccccccccccccccccccccaaaggcucuuuucagagccaccagaauu

SEQ ID NO: 7356 - RNA, 1690 nt, Artificial Sequence
  mRNA product Design i-3 comprising derived and/or modified sequence from LASV(LP;Clade I)__AAF86701__GPCstabilized (opt2)
gggagaaagcuuaccaugggccagaucaucaccuucuuccaggaggucccccacgucaucgaggaggucaugaacaucguccucaucgcccucucccuccucgccauccucaagggccucuacaacaucgccaccugcggcaucaucggccucgucgccuuccucuuccucugcggcaaguccugcucccucacccucaagggcggcuacgagcuccagacccucgagcucaacauggagacccucaacaugaccaugccccucuccugcaccaagaacuccucccaccacuacauccgcgucggcaacgagaccggccucgagcucacccucaccaacaccuccaucaucaaccacaaguucugcaaccucuccgacgcccacaagaagaaccucuacgaccacgcccucauguccaucaucuccaccuuccaccucuccauccccaacuucaaccaguacgaggccauguccugcgacuucaacggcggcaagaucuccguccaguacaaccucucccacuccuacgccggcgacgccgccgagcacugcggcaccgucgccaacggcguccuccagaccuucaugcgcauggccuggggcggccgcuacaucgcccucgacuccggcugcggcaacugggacugcaucaugaccuccuaccaguaccucaucauccagaacaccaccugggaggaccacugccaguucucccgccccucccccaucggcuaccucggccuccucucccagcgcacccgcgacaucuacaucucccgccgccgccggggcaccuucaccuggacccucuccgacuccgagggcaacgagacccccggcggcuacugccucacccgcuggaugcucaucgaggccgagcucaagugcuucggcaacaccgccgucgccaagugcaacgagaagcacgacgaggaguucugcgacaugcuccgccucuucgacuucaacaagcaggccauccgccgccucaaggcccccgcccagauguccauccagcucaucaacaaggccgucaacgcccucaucaacgaccagcucaucaugaagaaccaccuccgcgacaucaugugcauccccuacugcaacuacuccaaguacugguaccucaaccacaccuccuccggccgcaccucccuccccaagugcuggcucaucuccaacggcuccuaccucaacgagacccaguucuccgacgacaucgagcagcaggccgacaacaugaucaccgagaugcuccagaaggaguacaucgagcgccagggcaagaccccccucggccucgucgacaucuucaucuucuccaccuccuucuaccucaucuccaucuuccuccaccucaucaagauccccacccaccgccacaucgucggcaagcccugccccaagccccaccgccucaaccacaugggcgucugcuccugcggccucuacaagcaccccggcguccccaccaaguggaagcgcugaggacuaguuauaagacugacuagcccgaugggccucccaacgggcccuccuccccuccuugcaccgagauuaauaaaaaaaaaaaaaaaaaaaaaaaaaaaaaaaaaaaaaaaaaaaaaaaaaaaaaaaaaaaaaaaaugcaucccccccccccccccccccccccccccccccaaaggcucuuuucagagccaccagaauu

SEQ ID NO: 7357 - RNA, 1690 nt, Artificial Sequence
  mRNA product Design i-3 comprising derived and/or modified sequence from LASV(803213;Clade II)__AAF86703__GPCstabilized (opt2)
gggagaaagcuuaccaugggccagaucaucaccuucuuccaggaggucccccacgucaucgaggaggucaugaacaucguccucaucgcccucucccuccucgccauccucaagggcaucuacaacgucgccaccugcggccucuucggccucaucuccuuccuccuccucugcggccgcuccugcuccgucaccuacaagggcgucuacgagcuccagacccucgagcucaacauggccaaccucaacaugaccaugccccucuccugcaccaagaacaacucccaccacuacaucauggucggcaacgagaccggccucgagcucacccucaccaacaccuccaucaucaaccacaaguucugcaaccucuccgacgcccacaagaagaaccucuacgaccacgcccucauguccaucaucuccaccuuccaccucuccauccccaacuucaaccaguacgaggccauguccugcgacuucaacggcggcaagaucuccguccaguacaaccucucccacuccuucgccgucgacgccgccaaccacugcggcaccaucgccaacggcguccuccagaccuucaugcgcauggccuggggcggcuccuacaucgcccucgacuccggcugcggcaacugggacugcaucaugaccuccuaccaguaccucaucauccagaacaccaccugggaggaccacugccaguucucccgccccucccccaucggcuaccucggccuccucucccagcgcacccgcgacaucuacaucucccgccgccgccggggcaccuucaccuggacccucuccgacuccgagggcaacgaggcccccggcggcuacugccucacccgcuggaugcucaucgaggccgagcucaagugcuucggcaacaccgccgucgccaagugcaacgagaagcacgacgaggaguucugcgacaugcuccgccucuucgacuucaacaagcaggccaucaagcgccucaagacccccgcccagauguccauccagcucaucaacaaggccgucaacgcccucaucaacgaccagcucaucaugaagaaccaccuccgcgacaucaugugcauccccuacugcaacuacucccgcuacugguaccucaaccacaccgucaccggcaagaccucccucccccgcugcuggcucgucuccaacggcuccuaccucaacgagacccacuucuccgacgacaucgagcagcaggccgacaacaugaucaccgagaugcuccagaaggaguacauggaccgccagggcaagaccccccucggccucgucgaccucuucgucuucuccaccuccuucuaccucaucuccaucuuccuccaccucgucaagauccccacccaccgccacaucgucggcaagcccugccccaagccccaccgccucaaccacaugggcaucugcuccugcggccucuacaagcaccccggcguccccgucaaguggaagcgcugaggacuaguuauaagacugacuagcccgaugggccucccaacgggcccuccuccccuccuugcaccgagauuaauaaaaaaaaaaaaaaaaaaaaaaaaaaaaaaaaaaaaaaaaaaaaaaaaaaaaaaaaaaaaaaaaugcaucccccccccccccccccccccccccccccccaaaggcucuuuucagagccaccagaauu

SEQ ID NO: 7358 - RNA, 1690 nt, Artificial Sequence
  mRNA product Design i-3 comprising derived and/or modified sequence from LASV(GA391;Clade III)__CAA36645__GPCstabilized (opt2)
gggagaaagcuuaccaugggccagaucgucaccuucuuccaggaggucccccacgucaucgaggaggucaugaacaucguccucaucgcccucuccauccucgccauccucaagggccucuacaacgucgccaccugcggccucaucggccucgucaccuuccuccuccucuccggccgcuccugcucccucaucuacaagggcaccuacgagcuccagacccucgagcucaacauggagacccucaacaugaccaugccccucuccugcaccaagaacaacucccaccacuacauccgcgucggcaacgagaccggccucgagcucacccucaccaacaccuccauccucaaccacaaguucugcaaccucuccgacgcccacaagcgcaaccucuacgaccacucccucauguccaucaucuccaccuuccaccucuccauccccaacuucaaccaguacgaggccauguccugcgacuucaacggcggcaagaucaccguccaguacaaccucucccacuccuucgccgucgacgccgccggccacugcggcacccucgccaacggcguccuccagaccuucaugcgcauggccuggggcggcuccuacaucgcccucgacuccggcugcggcaacugggacugcaucaugaccuccuaccaguaccucaucauccagaacaccaccugggacgaccacugccaguucucccgccccucccccaucggcuaccucggccuccucucccagcgcacccgcgacaucuacaucucccgccgccgccggggcaccuucaccuggacccucuccgacuccgagggcaacgagacccccggcggcuacugccucacccgcuggaugcucaucgaggccgagcucaagugcuucggcaacaccgccgucgccaagugcaacgagaagcacgacgaggaguucugcgacaugcuccgccucuucgacuucaacaagcaggccauccgccgccucaagacccccgcccagauguccauccagcucaucaacaaggccgucaacgcccucaucaacgaccagcucaucaugaagaaccaccuccgcgacaucaugugcauccccuacugcaacuacucccgcuacugguaccucaaccacaccuccaccggcaagaccucccucccccgcugcuggcucaucuccaacggcuccuaccucaacgagaccaaguucuccgacgacaucgagcagcaggccgacaacaugaucaccgagaugcuccagaaggaguacaucgaccgccagggcaagaccccccucggccucgucgaccucuucgucuucuccaccuccuucuaccucaucuccaucuuccuccaccucgucaagauccccacccaccgccacaucgucggcaagcccugccccaagccccaccgccucaaccacaugggcaucugcuccugcggccucuacaagcagcccggcguccccguccgcuggaagcgcugaggacuaguuauaagacugacuagcccgaugggccucccaacgggcccuccuccccuccuugcaccgagauuaauaaaaaaaaaaaaaaaaaaaaaaaaaaaaaaaaaaaaaaaaaaaaaaaaaaaaaaaaaaaaaaaaugcaucccccccccccccccccccccccccccccccaaaggcucuuuucagagccaccagaauu

SEQ ID NO: 7359 - RNA, 1693 nt, Artificial Sequence
  mRNA product Design i-3 comprising derived and/or modified sequence from LASV(AV;Clade V)__CCA30314__GPCstabilized (opt2)
gggagaaagcuuaccaugggccagaucgucaccuucuuccaggaggucccccacgucaucgaggaggucaugaacaucguccucaucgcccucuccauccucgccguccucaagggccucuacaacaucgccaccugcggccucaucggccucaucaccuuccuccuccucugcggccgcuccugcuccuccaaccucuacaagggcgucuacgagcuccagucccucgaccucaacauggagacccucaacaugaccaugccccucuccugcaccaagaacaacucccaccacuacauccgcgucggcaacgacaccggccucgagcucacccucaccaacaccuccauccucaaccacaaguucugcaaccucuccgacgcccacaagaaggaccucuacgaccacgcccucauguccaucaucuccaccuuccaccucuccauccccaacuucaaccaguacgaggccauguccugcgacuucaacggcggcaagaucuccguccaguacaaccucucccacuccuacgccaucgacgccgccaaccacugcggcaccgucgccaacggcauccuccagaccuucaugcgcauggccuggggcggcuccuacaucgcccucgacuccggcugcggcaacugggacugcaucaugaccuccuaccaguaccucaucauccagaacaccaccugggagaaccacugccaguucucccgccccucccccaucggcuaccucggccuccucucccagcgcacccgcgacaucuacaucucccgccgccgccggggcaccuucaccuggacccucuccgacuccgagggcaacgccacccccggcggcuacugccucacccgcuggaugcucaucgaggccgagcucaagugcuucggcaacaccgccgucgccaagugcaacgagaagcacgacgaggaguucugcgacaugcuccgccucuucgacuucaacaagcaggccaucucccgccucaagucccccgcccagauguccauccagcucaucaacaaggccgucaacgcccucaucaacgaccagcucaucaugaagaaccaccuccgcgacaucaugugcauccccuacugcaacuacuccaaguacugguaccucaaccacaccaucaccggcaagaccucccuccccaagugcuggcucgucuccaacggcuccuaccucaacgagacccacuucuccgacgacaucgagcagcaggccgacaacaugaucaccgagaugcuccagaaggaguacauggagcgccagggcaagaccccccucggccucgucgaccucuucgucuucuccaccuccuucuaccucaucuccaucuuccuccgccucgucaagauccccacccaccgccacaucgucggcaagcccugccccaagccccaccgccucaaccacaugggcaucugcuccugcggccucuacaagcagcccggcguccccguccgcuggaagcgcugaggacuaguuauaagacugacuagcccgaugggccucccaacgggcccuccuccccuccuugcaccgagauuaauaaaaaaaaaaaaaaaaaaaaaaaaaaaaaaaaaaaaaaaaaaaaaaaaaaaaaaaaaaaaaaaaugcaucccccccccccccccccccccccccccccccaaaggcucuuuucagagccaccagaauu

SEQ ID NO: 7360 - RNA, 1690 nt, Artificial Sequence
  mRNA product Design i-3 comprising derived and/or modified sequence from LASV(Togo/2016/7082;Clade VI)__AMR44577__GPCstabilized (opt2)
gggagaaagcuuaccaugggccagaucaucaccuucuuccaggaggucccccacgucaucgaggaggucaugaacaucguccucaucgcccucucccuccucgccauccucaagggcgucuacaacgucgccaccugcggcaucaucggccucgucaccuuccucuuccucugcggccgcuccugcucccucaucuacaagggcuccuacgagcuccagacccucgagcucaacauggagacccucaacaugaccaugccccucuccugcaccaagaacuccucccaccacuacauccgcgucggcaacgagaccggccucgagcucacccucaccaacaccuccaucaucaaccacaaguucugcaaccucuccgacgcccacaagcgcaaccucuacgaccacgcccucauguccauccucuccaccuuccaccucuccauccccaacuucaaccaguacgaggccauguccugcgacuucaacggcggcaagaucuccguccaguacaaccucucccacgccuacgccgucgacgccgccgagcacugcggcaccgucgccaacggcguccuccagaccuucaugcgcauggccuggggcggcuccuacaucgcccucgacuccggcugcggcaacugggacugcaucaugaccuccuaccaguaccucaucauccagaacaccaccugggaggaccacugccaguucucccgccccucccccaucggcuaccucggccuccucucccagcgcacccgcgacaucuacaucucccgccgccgccggggcaccuucaccuggacccucuccgacuccgagggcaacgagacccccggcggcuacugccucacccgcuggaugcucaucgaggccgagcucaagugcuucggcaacaccgccgucgccaagugcaacgagaagcacgacgaggaguucugcgacaugcuccgccucuucgacuucaacaagcaggccauccagcgccucaagucccccgcccagauguccauccagcucaucaacaaggccgucaacgcccucaucaacgaccagcucaucaugaagaaccaccuccgcgacaugaugugcauccccuacugcaacuacuccaaguacugguaccucaaccacaccuccuccggccgcaccucccuccccaagugcuggcucgucuccaacggcuccuaccucaacgagacccacuucuccgacgacaucgagcagcaggccgacaacaugaucaccgagaugcuccagaaggaguacaucgaccgccagggcaagaccccccucggccucgucgaccucuucgucuucuccaccuccuucuaccucaucuccaucuuccuccaccucaucaagauccccacccaccgccacaucgucggcaagcccugccccaagccccaccgccucaaccacaugggcaucugcuccugcggccucuacaagcagcccggcguccccacccgcuggaagcgcugaggacuaguuauaagacugacuagcccgaugggccucccaacgggcccuccuccccuccuugcaccgagauuaauaaaaaaaaaaaaaaaaaaaaaaaaaaaaaaaaaaaaaaaaaaaaaaaaaaaaaaaaaaaaaaaaugcaucccccccccccccccccccccccccccccccaaaggcucuuuucagagccaccagaauu

SEQ ID NO: 7361 - RNA, 1690 nt, Artificial Sequence
  mRNA product Design i-3 comprising derived and/or modified sequence from LASV(KAK-428;Clade n.d. (VII))__ANH09740__GPCstabilized (opt2)
gggagaaagcuuaccaugggccagaucgucaccuucuuccaggaggucccccacgucaucgaggaggucaugaacaucguccucaucgcccucucccuccucgccauccucaagggccucuacaacuucgccaccugcggcgucaucggccucaucaccuuccuccuccucugcggccgcuccugcuccgccaccuacaagggccaguacgagcuccagacccucgagcucaacauggagucccucaacaugaccaugccccucuccugcaccaagaacaacucccaccacuacauccgcgccggcaacaacaccggccucgagcucacccucaccaacaccuccaucaucucccacaaguucugcaaccucuccgacgcccacaagaagaaccucuacgaccacacccucauguccaucaucaccaccuuccaccucuccauccccaacuucaaccaguacgaggccauguccugcgacuucaacggcggcaagaucuccauccaguacaaccucucccacuccuacgccggcgacgccgcccagcacugcggcaccgucgccaacggcguccuccagaccuucaugcgcauggccuggggcggcuccuaccucgcccucgacuccggcugccgcggcugggacugcaucaucuccuccuaccaguaccucaucauccagaacaccaccugggacgaccacugccaguucucccgccccucccccaucggcuaccucggcuucgucucccagaagacccgcgacaucuacaucucccgccgccgccggggcaccuucaccuggacccucuccgacuccgagggccacgacaugcccggcggcuacugccucacccgcuggaugcucaucgaggccgaccucaagugcuucggcaacaccgccgucgccaagugcaacgagaagcacgacgaggaguucugcgacauguggcgccucuucgacuucaacaagcaggccauccagcgccucaaggcccccgcccagaugaacauccagcucaucaacaaggccgucaacgcccucaucaacgaccagcucaugaugaagaaccaccuccgcgacaucaugugcauccccuacugcaacuacuccaaguucugguaccucaacaacaccaccaccggccgcaccucccucccccgcugcuggcucaucuccaacggcuccuaccucaacgagacccacuucuccgacgacaucgagcagcaggccgacaacaugaucaccgagaugcuccagaaggaguacauggaccgccagggcaagaccccccucggccucgucgaccucuucgucuucuccaccuccuucuaccucaucaccaucuuccuccaccucgucaagauccccacccaccgccacaucgucggcaagcccugccccaagccccaccgccucaaccacaugggcaucugcuccugcggccucuacaagcagcccggcguccccguccgcuggaagcgcugaggacuaguuauaagacugacuagcccgaugggccucccaacgggcccuccuccccuccuugcaccgagauuaauaaaaaaaaaaaaaaaaaaaaaaaaaaaaaaaaaaaaaaaaaaaaaaaaaaaaaaaaaaaaaaaaugcaucccccccccccccccccccccccccccccccaaaggcucuuuucagagccaccagaauu

SEQ ID NO: 7362 - RNA, 1690 nt, Artificial Sequence; identical to SEQ ID NO: 7356
  mRNA product Design i-3 comprising derived and/or modified sequence from LASV(Pinneo-NIG-1969;Clade I)__AIT17836__GPCstabilized (opt2)

SEQ ID NO: 7363 - RNA, 1690 nt, Artificial Sequence
  mRNA product Design i-3 comprising derived and/or modified sequence from LASV(ISTH0009-NIG-2011;Clade II)__AIT17404__GPCstabilized (opt2)
gggagaaagcuuaccaugggccagaucaucaccuucuuccaggaggucccccacgucaucgaggaggucaugaacaucguccucaucgcccucucccuccucgccauccucaagggcaucuacaacgucgccaccugcggccucuucggccucgucuccuuccuccuccucugcggccgcuccugcuccaccaccuacaagggcgucuacgagcuccagacccucgagcucgacauggccucccucaacaugaccaugccccucuccugcaccaagaacaacucccaccacuacaucauggucggcaacgagaccggccucgagcucacccucaccaacaccuccaucaucaaccacaaguucugcaaccucuccgacgcccacaagaagaaccucuacgaccacgcccucauguccaucaucuccaccuuccaccucuccauccccaacuucaaccaguacgaggccauguccugcgacuucaacggcggcaagaucuccguccaguacaaccucucccacgccuacgccgucgacgccgccaaccacugcggcaccaucgccaacggcguccuccagaccuucaugcgcauggccuggggcggcuccuacaucgcccucgacuccggcugcggcuccugggacugcaucaugaccuccuaccaguaccucaucauccagaacaccaccugggaggaccacugccaguucucccgccccucccccaucggcuaccucggccuccucucccagcgcacccgcgacaucuacaucucccgccgccgccggggcaccuucaccuggacccucuccgacuccgagggcaacgagacccccggcggcuacugccucacccgcuggaugcucaucgaggccgagcucaagugcuucggcaacaccgccgucgccaagugcaacgagaagcacgacgaggaguucugcgacaugcuccgccucuucgacuucaacaagcaggccauccgccgccucaagacccccgcccagauguccauccagcucaucaacaaggccgucaacgcccucaucaacgaccagcucaucaugaagaaccaccuccgcgacaucaugugcauccccuacugcaacuacuccaaguacugguaccucaaccacaccgucaccggcaagaccucccucccccgcugcuggcucgucuccaacggcuccuaccucaacgagacccacuucuccgacgacaucgagcagcaggccgacaacaugaucaccgagcuccuccagaaggaguacauggaccgccagggcaagaccccccucggccucgucgaccucuucgucuucuccaccuccuucuaccucaucuccaucuuccuccaccucaucaagauccccacccaccgccacaucaccggcaagcccugccccaagccccaccgccucaaccacaugggcaucugcuccugcggccucuacaagcaccccggcguccccgucaaguggaagcgcugaggacuaguuauaagacugacuagcccgaugggccucccaacgggcccuccuccccuccuugcaccgagauuaauaaaaaaaaaaaaaaaaaaaaaaaaaaaaaaaaaaaaaaaaaaaaaaaaaaaaaaaaaaaaaaaaugcaucccccccccccccccccccccccccccccccaaaggcucuuuucagagccaccagaauu

SEQ ID NO: 7364 - RNA, 1690 nt, Artificial Sequence
  mRNA product Design i-3 comprising derived and/or modified sequence from LASV(ISTH2010-NIG-2012;Clade II)__AIT17482__GPCstabilized (opt2)
gggagaaagcuuaccaugggccagaucaucaccuucuuccaggaggucccccacgucaucgaggaggucaugaacaucguccucaucgcccucucccuccucgccauccucaagggcaucuacaacgucgccaccugcggccucuucggccucgucuccuuccuccuccucugcggccgcuccugcuccaccaccuacaagggcgucuacgagcuccagacccucgagcucgacauggccucccucaacaugaccaugccccucuccugcaccaagaacaacucccaccacuacaucauggucggcaacgagaccggccucgagcucacccucaccaacaccuccaucaucaaccacaaguucugcaaccucuccgacgcccacaagaagaaccucuacgaccacgcccucauguccaucaucuccaccuuccaccucuccauccccaacuucaaccaguacgaggccauguccugcgacuucaacggcggcaagaucuccguccaguacaaccucucccacgccuacgccgucgacgccgccaaccacugcggcaccaucgccaacggcguccuccagaccuucaugcgcauggccuggggcggcuccuacaucgcccucgacuccggcugcggcuccugggacugcaucaugaccuccuaccaguaccucaucauccagaacaucaccugggaggaccacugccaguucucccgccccucccccaucggcuaccucggccuccucucccagcgcacccgcgacaucuacaucucccgccgccgccggggcaccuucaccuggacccucuccgacuccgagggcaacgagacccccggcggcuacugccucacccgcuggaugcucaucgaggccgagcucaagugcuucggcaacaccgccgucgccaagugcaacgagaagcacgacgaggaguucugcgacaugcuccgccucuucgacuucaacaagcaggccauccgccgccucaagacccccgcccagauguccauccagcucaucaacaaggccgucaacgcccucaucaacgaccagcucaucaugaagaaccaccuccgcgacaucaugugcauccccuacugcaacuacuccaaguacugguaccucaaccacaccgucaccggcaagaccucccucccccgcugcuggcucgucuccaacggcuccuaccucaacgagacccacuucuccgacgacaucgagcagcaggccgacaacaugaucaccgagcuccuccagaaggaguacaucgaccgccagggcaagaccccccucggccucgucgaccucuucgucuucuccaccuccuucuaccucaucuccaucuuccuccaccucgucaagauccccacccaccgccacgucgucggcaagcccugccccaagccccaccgccucaaccacaugggcaucugcuccugcggccucuacaagcaccccggcguccccgucaaguggaagcgcugaggacuaguuauaagacugacuagcccgaugggccucccaacgggcccuccuccccuccuugcaccgagauuaauaaaaaaaaaaaaaaaaaaaaaaaaaaaaaaaaaaaaaaaaaaaaaaaaaaaaaaaaaaaaaaaaugcaucccccccccccccccccccccccccccccccaaaggcucuuuucagagccaccagaauu

SEQ ID NO: 7365 - RNA, 1690 nt, Artificial Sequence
  mRNA product Design i-3 comprising derived and/or modified sequence from LASV(Lassa virus/H.sapiens-wt/NGA/2015/ISTH_0543;Clade II)__AVO03639__GPCstabilized (opt2)
gggagaaagcuuaccaugggccagaucaucaccuucuuccaggaggucccccacgucaucgaggaggucaugaacaucguccucaucgcccucucccuccucgccauccucaagggcaucuacaacgucgccaccugcggccucuucggccucgucuccuuccuccuccucugcggccgcuccugcuccaccaccuacaagggcgucuacgagcuccagacccucgagcucgacauggccaaccucaacaugaccaugccccucuccugcaccaagaacaacucccaccacuacaucauggucggcaacgagaccggccucgagcucacccucaccaacaccuccaucaucaaccacaaguucugcaaccucuccgacgcccacaagaagaaccucuacgaccacgcccucauguccaucaucuccaccuuccaccucuccauccccaacuucaaccaguacgaggccauguccugcgacuucaacggcggcaagaucuccguccaguacaaccucucccacaccuacgccgucgacgccgccaaccacugcggcaccaucgccaacggcguccuccagaccuucaugcgcauggccuggggcggcuccuacaucgcccucgacuccggcugcggcuccugggacugcaucaugaccuccuaccaguaccucgucauccagaacaccaccugggaggaccacugccaguucucccgccccucccccaucggcuaccucggccuccucucccagcgcacccgcgacaucuacaucucccgccgccgccggggcaccuucaccuggacccucuccgacuccgagggcaacgagacccccggcggcuacugccucacccgcuggaugcucaucgaggccgagcucaagugcuucggcaacaccgccgucgccaagugcaacgagaagcacgacgaggaguucugcgacaugcuccgccucuucgacuucaacaagcaggccauccgccgccucaagacccccgcccagauguccauccagcucaucaacaaggccgucaacgcccucaucaacgaccagcucaucaugaagaaccaccuccgcgacaucaugugcauccccuacugcaacuacuccaaguacugguaccucaaccacaccgucaccggcaagaccucccucccccgcugcuggcucgucuccaacggcuccuaccucaacgagacccacuucuccgacgacaucgagcagcaggccgacaacaugaucaccgagcuccuccagaaggaguacaucgaccgccagggcaagaccccccucggccucgucgaccucuucgucuucuccaccuccuucuaccucaucuccaucuuccuccaccucgucaagauccccacccaccgccacaucaccggcaagcccugccccaagccccaccgccucaaccacaugggcaucugcuccugcggccucuacaagcaccccggcguccccgucaaguggaagcgcugaggacuaguuauaagacugacuagcccgaugggccucccaacgggcccuccuccccuccuugcaccgagauuaauaaaaaaaaaaaaaaaaaaaaaaaaaaaaaaaaaaaaaaaaaaaaaaaaaaaaaaaaaaaaaaaaugcaucccccccccccccccccccccccccccccccaaaggcucuuuucagagccaccagaauu

SEQ ID NO: 7366 - RNA, 1690 nt, Artificial Sequence
  mRNA product Design i-3 comprising derived and/or modified sequence from LASV(Lassa virus/H.sapiens-wt/NGA/2016/ISTH_0009;Clade II)__AVO03571__GPCstabilized (opt2)
gggagaaagcuuaccaugggccagaucaucaccuucuuccaggaggucccccacgucaucgaggaggucaugaacaucguccucaucgcccucucccuccucgccauccucaagggcaucuacaacgucgccaccugcggccuccucggccucgucuccuuccuccuccucugcggccgcuccugcuccaccaccuacaagggcgucuacgagcuccagacccucgagcucgacauggccucccucaacaugaccaugccccucuccugcaccaagaacaacucccaccacuacaucauggucggcaacgagaccggccucgagcucacccucaccaacaccuccaucaucaaccacaaguucugcaaccucuccgacgcccacaagaagaaccucuacgaccacgcccucauguccaucaucuccaccuuccaccucuccauccccaacuucaaccaguacgaggccauguccugcgacuucaacggcggccgcaucuccguccaguacaaccucucccacuccuacgccgucgacgccgccaaccacugcggcaccaucgccaacggcguccuccagaccuucaugcgcauggccuggggcggcuccuacaucgcccucgacuccggcugcggcuccugggacugcaucaugaccuccuaccaguaccucaucauccagaacaccaccugggaggaccacugccaguucucccgccccucccccaucggcuaccucggccuccucucccagcgcacccgcgacaucuacaucucccgccgccgccggggcaccuucaccuggacccucuccgacuccgagggcaacgagacccccggcggcuacugccucacccgcuggaugcucaucgaggccgagcucaagugcuucggcaacaccgccgucgccaagugcaacgagaagcacgacgaggaguucugcgacaugcuccgccucuucgacuucaacaagcaggccauccgccgccucaagacccccgcccagauguccauccagcucaucaacaaggccgucaacgcccucaucaacgaccagcucaucaugaagaaccaccuccgcgacaucaugugcauccccuacugcaacuacuccaaguacugguaccucaaccacaccgucaccggcaagaccucccucccccgcugcuggcucgucuccaacggcuccuaccucaacgagacccacuucuccgacgacaucgagcagcaggccgacaacaugaucaccgagcuccuccagaaggaguacaucgaccgccagggcaagaccccccucggccucgucgaccucuucgucuucuccaccuccuucuaccucaucuccaucuuccuccaccucgucaagauccccacccaccgccacaucaccggcaagcccugccccaagccccaccgccucaaccacaugggcaucugcuccugcggccucuacaaccaccccggcguccccgucaaguggaagcgcugaggacuaguuauaagacugacuagcccgaugggccucccaacgggcccuccuccccuccuugcaccgagauuaauaaaaaaaaaaaaaaaaaaaaaaaaaaaaaaaaaaaaaaaaaaaaaaaaaaaaaaaaaaaaaaaaugcaucccccccccccccccccccccccccccccccaaaggcucuuuucagagccaccagaauu

SEQ ID NO: 7367 - RNA, 1690 nt, Artificial Sequence
  mRNA product Design i-3 comprising derived and/or modified sequence from LASV(Lassa virus/H.sapiens-wt/NGA/2016/ISTH_0017;Clade II)__AVO03567__GPCstabilized (opt2)
gggagaaagcuuaccaugggccagaucaucaccuucuuccaggaggucccccacgucaucgaggaggucaugaacaucguccucaucgcccucucccuccucgccauccucaagggcaucuacaacgucgccaccugcggccucuucggccucgucuccuuccuccuccucugcggccgcuccugcuccaccaccuacaagggcgucuacgagcuccagacccucgagcucgacauggccucccucaacaugaccaugccccucuccugcaccaagaacaacucccaccacuacaucauggucggcaacgagaccggccucgagcucacccucaccaacaccuccaucaucaaccacaaguucugcaaccucuccgacgcccacaagaagaaccucuacgaccacgcccucauguccaucaucuccaccuuccaccucuccauccccaacuucaaccaguacgaggccauguccugcgacuucaacggcggcaagaucuccguccaguacaaccucucccacaccuacgccaucgacgccgccaaccacugcggcaccaucgccaacggcguccuccagaccuucaugcgcauggccuggggcggcuccuacaucgcccucgacuccggcugcggcuccugggacugcaucaugaccuccuaccaguaccucaucauccagaacaccaccugggaggaccacugccaguucucccgccccucccccaucggcuaccucggccuccucucccagcgcacccgcgacaucuacaucucccgccgccgccggggcaccuucaccuggacccucuccgacuccgagggcaacgagacccccggcggcuacugccucacccgcuggaugcucaucgaggccgagcucaagugcuucggcaacaccgccgucgccaagugcaacgagaagcacgacgaggaguucugcgacaugcuccgccucuucgacuucaacaagcaggccauccgccgccucaagacccccgcccagauguccauccagcucaucaacaaggccgucaacgcccucaucaacgaccagcucaucaugaagaaccaccuccgcgacaucaugugcauccccuacugcaacuacuccaaguacugguaccucaaccacaccgucaccggcaagaccucccucccccgcugcuggcucgucuccaacggcuccuaccucaacgagacccacuucuccgacgacaucgagcagcaggccgacaacaugaucaccgagcuccuccagaaggaguacauggaccgccagggcaagaccccccucggccucgucgaccucuucgucuucuccaccuccuucuaccucaucuccaucuuccuccaccucguccgcauccccacccaccgccacgucaucggcaagcccugccccaagccccaccgccucaaccacaugggcaucugcuccugcggccucuacaagcaccccggcguccccgucaaguggaagcgcugaggacuaguuauaagacugacuagcccgaugggccucccaacgggcccuccuccccuccuugcaccgagauuaauaaaaaaaaaaaaaaaaaaaaaaaaaaaaaaaaaaaaaaaaaaaaaaaaaaaaaaaaaaaaaaaaugcaucccccccccccccccccccccccccccccccaaaggcucuuuucagagccaccagaauu

SEQ ID NO: 7368 - RNA, 1690 nt, Artificial Sequence
  mRNA product Design i-3 comprising derived and/or modified sequence from LASV(Lassa virus/H.sapiens-wt/NGA/2018/ISTH_0959;Clade II)__AVV65099__GPCstabilized (opt2)
gggagaaagcuuaccaugggccagaucaucaccuucuuccaggaggucccccacgucaucgaggaggucaugaacaucguccucaucgcccucucccuccucgccauccucaagggcaucuacaacgucgucaccugcggccucuucggccucgucuccuuccuccuccucugcggccgcuccugcuccaccaccuacaagggcgucuacgagcuccagacccucgagcucgacauggccucccucaacaugaccaugccccucuccugcaccaagaacaacucccaccacuacaucauggucggcaacgagaccggccucgagcucacccucaccaacaccuccaucaucaaccacaaguucugcaaccucuccgacgcccacaagaagaaccucuacgaccacgcccucauguccaucaucuccaccuuccaccucuccauccccaacuucaaccaguacgaggccauguccugcgacuucaacggcggcaagaucuccguccaguacaaccucucccacgccuacgccaucgacgccgccaaccacugcggcaccaucgccaacggcguccuccagaccuucaugcgcauggccuggggcggcuccuacaucgcccucgacuccggcugcggcuccugggacugcaucaugaccuccuaccaguaccucaucauccagaacaccaccugggaggaccacugccaguucucccgccccucccccaucggcuaccucggccuccucucccagcgcacccgcgacaucuacaucucccgccgccgccggggcaccuucaccuggacccucuccgacuccgagggcaacgagacccccggcggcuacugccucacccgcuggaugcucaucgaggccgagcucaagugcuucggcaacaccgccgucgccaagugcaacgagaagcacgacgaggaguucugcgacaugcuccgccucuucgacuucaacaagcaggccauccgccgccucaagacccccgcccagauguccauccagcucaucaacaaggccgucaacgcccucaucaacgaccagcucaucaugaagaaccaccuccgcgacaucaugugcauccccuacugcaacuacuccaaguacugguaccucaaccacaccgucaccggcaagaccucccucccccgcugcuggcucgucuccaacggcuccuaccucaacgagacccacuucuccgacgacaucgagcagcaggccgacaacaugaucaccgagcuccuccagaaggaguacaucgaccgccagggcaagaccccccucggccucgucgaccucuucgucuucuccaccuccuucuaccucaucuccaucuuccuccaccucgucaagauccccacccaccgccacgucaucggcaagcccugccccaagccccaccgccucaaccacaugggcaucugcuccugcggccucuacaagcaccccggcguccccgucaaguggaagcgcugaggacuaguuauaagacugacuagcccgaugggccucccaacgggcccuccuccccuccuugcaccgagauuaauaaaaaaaaaaaaaaaaaaaaaaaaaaaaaaaaaaaaaaaaaaaaaaaaaaaaaaaaaaaaaaaaugcaucccccccccccccccccccccccccccccccaaaggcucuuuucagagccaccagaauu

SEQ ID NO: 7369 - RNA, 1690 nt, Artificial Sequence
  mRNA product Design i-3 comprising derived and/or modified sequence from LASV(LASV003-NIG-2008;Clade II)__AIT17580__GPCstabilized (opt2)
gggagaaagcuuaccaugggccagaucaucaccuucuuccaggaggucccccacgucaucgaggaggucaugaacaucguccucaucgcccucucccuccucgccauccucaagggcaucuacaacgucgccaccugcggccucuucggccucgucuccuuccuccuccucugcggccgcuccugcuccaccaccuacaagggcgucuacgagcuccagacccucgagcucgacauggccucccucaacaugaccaugccccucuccugcaccaagaacaacucccaccacuacaucauggucggcaacgagaccggccucgagcucacccucaccaacaccuccaucaucaaccacaaguucugcaaccucuccgacgcccacaagaagaaccucuacgaccacgcccucauguccaucaucuccaccuuccaccucuccauccccaacuucaaccaguacgaggccauguccugcgacuucaacggcggcaagaucuccguccaguacaaccucucccacaccuacgccgucgacgccgccaaccacugcggcaccaucgccaacggcguccuccagaccuucaugcgcauggccuggggcggcuccuacaucgcccucgacuccggcugcggcuccugggacugcaucaugaccuccuaccaguaccucaucauccagaacaccaccugggaggaccacugccaguucucccgccccucccccaucggcuaccucggccuccucucccagcgcacccgcgacaucuacaucucccgccgccgccggggcaccuucaccuggacccucuccgacuccgaguccaacgagacccccggcggcuacugccucacccgcuggaugcucaucgaggccgagcucaagugcuucggcaacaccgccgucgccaagugcaacgagaagcacgacgaggaguucugcgacaugcuccgccucuucgacuucaacaagcaggccauccgccgccucaaggcccccgcccagauguccauccagcucaucaacaaggccgucaacgcccucaucaacgaccagcucaucaugaagaaccaccuccgcgacaucaugugcauccccuacugcaacuacuccaaguacugguaccucaaccacaccgucaccggccgcaccucccucccccgcugcuggcucgucuccaacggcuccuaccucaacgagacccacuucuccgacgacaucgagcagcaggccgacaacaugaucaccgagcuccuccagaaggaguacauggaccgccagggcaagaccccccucggccucgucgaccucuucgucuucuccaccuccuucuaccucaucuccaucuuccuccaccucgucaagauccccacccaccgccacgucaucggcaagcccugccccaagccccaccgccucaaccacaugggcaucugcuccugcggccucuacaagcaccccggcguccccgucaaguggaagcgcugaggacuaguuauaagacugacuagcccgaugggccucccaacgggcccuccuccccuccuugcaccgagauuaauaaaaaaaaaaaaaaaaaaaaaaaaaaaaaaaaaaaaaaaaaaaaaaaaaaaaaaaaaaaaaaaaugcaucccccccccccccccccccccccccccccccaaaggcucuuuucagagccaccagaauu

SEQ ID NO: 7370 - RNA, 1690 nt, Artificial Sequence
  mRNA product Design i-3 comprising derived and/or modified sequence from LASV(LASV035-NIG-2009;Clade II)__AIT17588__GPCstabilized (opt2)
gggagaaagcuuaccaugggccagaucaucaccuucuuccaggaggucccccacgucaucgaggaggucaugaacaucguccucaucgcccucucccuccucgccauccucaagggcaucuacaacgucgccaccugcggccucuucggccucgucuccuuccuccuccucugcggccgcuccugcuccaccaccuacaagggcgucuacgagcuccagacccucgagcucgacauggccucccucaacaugaccaugccccucuccugcaccaagaacaacucccaccacuacaucauggucggcaacgagaccggccucgagcucacccucaccaacaccuccaucaucaaccacaaguucugcaaccucuccgacgcccacaagaagaaccucuacgaccacgcccucauguccaucaucuccaccuuccaccucuccauccccaacuucaaccaguacgaggccauguccugcgacuucaacggcggcaagaucuccguccaguacaaccucucccacgccuacgccgucgacgccgccaaccacugcggcaccaucgccaacggcguccuccagaccuucaugcgcauggccuggggcggcuccuacaucgcccucgacuccggcugcggcuccugggacugcaucaugaccuccuaccaguaccucaucauccagaacaccaccugggaggaccacugccaguucucccgccccucccccaucggcuaccucggccuccucucccagcgcacccgcgacaucuacaucucccgccgccgccggggcaccuucaccuggacccucuccgacuccgagggcaacgagacccccggcggcuacugccucacccgcuggaugcucaucgaggccgagcucaagugcuucggcaacaccgccgucgccaagugcaacgagaagcacgacgaggaguucugcgacaugcuccgccucuucgacuucaacaagcaggccauccgccgccucaaggcccccgcccagauguccauccagcucaucaacaaggccgucaacgcccucaucaacgaccagcucaucaugaagaaccaccuccgcgacaucaugugcauccccuacugcaacuacuccaaguacugguaccucaaccacaccgucaccggcaagaccucccucccccgcugcuggcucgucuccaacggcuccuaccucaacgagacccacuucuccgacgacaucgagcagcaggccgacaacaugaucaccgagcuccuccagaaggaguacaucgaccgccagggcaagaccccccucggccucgucgaccucuucgucuucuccaccuccuucuaccucaucuccaucuuccuccaccucgucaagauccccacccaccgccacgucaucggcaagcccugccccaagccccaccgccucaaccacaugggcaucugcuccugcggccucuacaagcaccccggcguccccgucaaguggaagcgcugaggacuaguuauaagacugacuagcccgaugggccucccaacgggcccuccuccccuccuugcaccgagauuaauaaaaaaaaaaaaaaaaaaaaaaaaaaaaaaaaaaaaaaaaaaaaaaaaaaaaaaaaaaaaaaaaugcaucccccccccccccccccccccccccccccccaaaggcucuuuucagagccaccagaauu

SEQ ID NO: 7371 - RNA, 1690 nt, Artificial Sequence
  mRNA product Design i-3 comprising derived and/or modified sequence from LASV(LASV1000-NIG-2009;Clade II)__AIT17782__GPCstabilized (opt2)
gggagaaagcuuaccaugggccagaucaucaccuucuuccaggaggucccccacgucaucgaggaggucaugaacaucguccucaucgcccucucccuccucgccauccucaagggcaucuacaacgucgccaccugcggccucuucggccucgucuccuuccuccuccucugcggccgcuccugcuccaccaccuacaagggcgucuacgagcuccagacccucgagcucgacauggccucccucaacaugaccaugccccucuccugcaccaagaacaacucccaccacuacaucauggucggcaacgagaccggccucgagcucacccucaccaacaccuccaucaucaaccacaaguucugcaaccucuccgacgcccacaagaagaaccucuacgaccacgcccucauguccaucaucuccaccuuccaccucuccauccccaacuucaaccaguacgaggccauguccugcgacuucaacggcggcaagaucuccguccaguacaaccucucccacaccuacgccgucgacgccgccaaccacugcggcaccaucgccaacggcguccuccagaccuucaugcgcauggccuggggcggcuccuacaucgcccucgacuccggcugcggcuccugggacugcaucaugaccuccuaccaguaccucaucauccagaacaccaccugggaggaccacugccaguucucccgccccucccccaucggcuaccucggccuccucucccagcgcacccgcgacaucuacaucucccgccgccgccggggcaccuucaccuggacccucuccgacuccgagggcaacgagacccccggcggcuacugccucacccgcuggaugcucaucgaggccgagcucaagugcuucggcaacaccgccgucgccaagugcaacgagaagcacgacgaggaguucugcgacaugcuccgccucuucgacuucaacaagcaggccaucaagcgccucaagacccccgcccagauguccauccagcucaucaacaaggccgucaacgcccucaucaacgaccagcucaucaugaagaaccaccuccgcgacaucaugugcauccccuacugcaacuacuccaaguacugguaccucaaccacaccgucaccggcaagaccucccucccccgcugcuggcucgucuccaacggcuccuaccucaacgagacccacuucuccgacgacaucgagcagcaggccgacaacaugaucaccgagcuccuccagaaggaguacaucgaccgccagggcaagaccccccucggccucgucgaccucuucgucuucuccaccuccuucuaccucaucuccaucuuccuccaccucgucaagauccccacccaccgccacgucgucggcaagcccugccccaagccccaccgccucaaccacaugggcaucugcuccugcggccucuacaagcaccccggcguccccgucaaguggaagcgcugaggacuaguuauaagacugacuagcccgaugggccucccaacgggcccuccuccccuccuugcaccgagauuaauaaaaaaaaaaaaaaaaaaaaaaaaaaaaaaaaaaaaaaaaaaaaaaaaaaaaaaaaaaaaaaaaugcaucccccccccccccccccccccccccccccccaaaggcucuuuucagagccaccagaauu

SEQ ID NO: 7372 - RNA, 1690 nt, Artificial Sequence
  mRNA product Design i-3 comprising derived and/or modified sequence from LASV(LASV221-NIG-2010;Clade II)__AIT17624__GPCstabilized (opt2)
gggagaaagcuuaccaugggccagaucaucaccuucuuccaggaggucccccacgucaucgaggaggucaugaacaucguccucaucgcccucucccuccucgccauccucaagggcaucuacaacgucgccaccugcggccucuucggccucgucuccuuccuccuccucugcggccgcuccugcuccaccaccuacaagggcgucuacgagcuccagacccucgagcucgacauggccucccucaacaugaccaugccccucuccugcaccaagaacaacucccaccacuacaucauggucggcaacgagaccggccucgagcucacccucaccaacaccuccaucaucaaccacaaguucugcaaccucuccgacgcccacaagaagaaccucuacgaccacgcccucauguccaucaucuccaccuuccaccucuccauccccaacuucaaccaguacgaggccauguccugcgacuucaacggcggcaagaucuccguccaguacaaccucucccacaccuacgccaucgacgccgccaaccacugcggcaccaucgccaacggcguccuccagaccuucaugcgcauggccuggggcggcuccuacaucgcccucgacuccggcugcggcuccugggacugcaucaugaccuccuaccaguaccucaucauccagaacaccaccugggaggaccacugccaguucucccgccccucccccaucggcuaccucggccuccucucccagcgcacccgcgacaucuacaucucccgccgccgccggggcaccuucaccuggacccucuccgacuccgagggcaacgagacccccggcggcuacugccucacccgcuggaugcucaucgaggccgagcucaagugcuucggcaacaccgccgucgccaagugcaacgagaagcacgacgaggaguucugcgacaugcuccgccucuucgacuucaacaagcaggccauccgccgccucaagacccccgcccagauguccauccagcucaucaacaaggccgucaacgcccucaucaacgaccagcucaucaugaagaaccaccuccgcgacaucaugugcauccccuacugcaacuacuccaaguacugguaccucaaccacaccgucaccggcaagaccucccucccccgcugcuggcucgucuccaacggcuccuaccucaacgagacccacuucuccgacgacaucgagcagcaggccgacaacaugaucaccgagaugcuccagaaggaguacauggaccgccagggcaagaccccccucggccucgucgaccucuucgucuucuccaccuccuucuaccucaucuccaucuuccuccaccucgucaagauccccacccaccgccacgucaucggcaagcccugccccaagccccaccgccucaaccacaugggcaucugcuccugcggccucuacaagcaccccggcguccccgucaaguggaagcgcugaggacuaguuauaagacugacuagcccgaugggccucccaacgggcccuccuccccuccuugcaccgagauuaauaaaaaaaaaaaaaaaaaaaaaaaaaaaaaaaaaaaaaaaaaaaaaaaaaaaaaaaaaaaaaaaaugcaucccccccccccccccccccccccccccccccaaaggcucuuuucagagccaccagaauu

SEQ ID NO: 7373 - RNA, 1690 nt, Artificial Sequence
  mRNA product Design i-3 comprising derived and/or modified sequence from LASV(LASV237-NIG-2010;Clade II)__AIT17638__GPCstabilized (opt2)
gggagaaagcuuaccaugggccagaucaucaccuucuuccaggaggucccccacgucaucgaggaggucaugaacaucguccucaucgcccucucccuccucgccauccucaagggcaucuacaacgucgccaccugcggccucuucggccucgucuccuuccuccuccucugcggccgcuccugcuccaccaccuacaagggcgucuacgagcuccagacccucgagcucgacauggccucccucaacaugaccaugccccucuccugcaccaagaacaacucccaccacuacaucauggucggcaacgagaccggccucgagcucacccucaccaacaccuccaucaucaaccacaaguucugcaaccucuccgacgcccacaagaaggaccucuacgaccacgcccucauguccaucaucuccaccuuccaccucuccauccccaacuucaaccaguacgaggccauguccugcgacuucaacggcggcaagaucuccguccaguacaaccucucccacaccuacgccgucgacgccgccaaccacugcggcaccaucgccaacggcguccuccagaccuucaugcgcauggccuggggcggcuccuacaucgcccucgacuccggcugcggcuccugggacugcaucaugaccuccuaccaguaccucaucauccagaacaccaccugggaggaccacugccaguucucccgccccucccccaucggcuaccucggccuccucucccagcgcacccgcgacaucuacaucucccgccgccgccggggcaccuucaccuggacccucuccgacuccgagggcaacgagacccccggcggcuacugccucacccgcuggaugcucaucgaggccgagcucaagugcuucggcaacaccgccgucgccaagugcaacgagaagcacgacgaggaguucugcgacaugcuccgccucuucgacuucaacaagcaggccauccgccgccucaagacccccgcccagauguccauccagcucaucaacaaggccgucaacgcccucaucaacgaccagcucaucaugaagaaccaccuccgcgacaucaugugcauccccuacugcaacuacuccaaguacugguaccucaaccacaccgucaccggcaagaccucccucccccgcugcuggcucgucuccaacggcuccuaccucaacgagacccacuucuccgacgacaucgagcagcaggccgacaacaugaucaccgagcuccuccagaaggaguacauggaccgccagggcaagaccccccucggccucgucgaccucuucgucuucuccaccuccuucuaccucaucuccaucuuccuccaccucaucaagauccccacccaccgccacaucaccggcaagcccugccccaagccccaccgccucaaccacaugggcaucugcuccugcggccucuacaagcaccccggcguccccgucaaguggaagcgcugaggacuaguuauaagacugacuagcccgaugggccucccaacgggcccuccuccccuccuugcaccgagauuaauaaaaaaaaaaaaaaaaaaaaaaaaaaaaaaaaaaaaaaaaaaaaaaaaaaaaaaaaaaaaaaaaugcaucccccccccccccccccccccccccccccccaaaggcucuuuucagagccaccagaauu

SEQ ID NO: 7374 - RNA, 1690 nt, Artificial Sequence
  mRNA product Design i-3 comprising derived and/or modified sequence from LASV(LASV253-NIG-2011;Clade II)__AIT17670__GPCstabilized (opt2)
gggagaaagcuuaccaugggccagaucaucaccuucuuccaggaggucccccacgucaucgaggaggucaugaacaucguccucaucgcccucucccuccucgccauccucaagggcaucuacaacgucgccaccugcggccucuucggccucgucuccuuccuccuccucugcggccgcuccugcuccaccaccuacaagggcgucuacgagcuccagacccucgagcucgacauggccucccucaacaugaccaugccccucuccugcaccaagaacaacucccaccacuacaucauggucggcaacgagaccggccucgagcucacccucaccaacaccuccaucaucaaccacaaguucugcaaccucuccgacgcccacaagaagaaccucuacgaccacgcccucauguccaucaucuccaccuuccaccucuccauccccaacuucaaccaguacgaggccauguccugcgacuucaacggcggcaagaucuccguccaguacaaccucucccacaccuacgccgucgacgccgccaaccacugcggcaccaucgccaacggcguccuccagaccuucaugcgcauggccuggggcggcuccuacaucgcccucgacuccggcugcggcuccugggacugcaucaugaccuccuaccaguaccucaucauccagaacaccaccugggaggaccacugccaguucucccgccccucccccaucggcuaccucggccuccucucccagcgcacccgcgacaucuacaucucccgccgccgccggggcaccuucaccuggacccucuccgacuccgagggcaacgagacccccggcggcuacugccucacccgcuggaugcucaucgaggccgagcucaagugcuucggcaacaccgccgucgccaagugcaacgagaagcacgacgaggaguucugcgacaugcuccgccucuucgacuucaacaagcaggccauccgccgccucaaggcccccgcccagauguccauccagcucaucaacaaggccgucaacgcccucaucaacgaccagcucaucaugaagaaccaccuccgcgacaucaugugcauccccuacugcaacuacuccaaguacugguaccucaaccacaccgucaccggccgcaccucccucccccgcugcuggcucgucuccaacggcuccuaccucaacgagacccacuucuccgacgacaucgagcagcaggccgacaacaugaucaccgagcuccuccagaaggaguacaucgaccgccagggcaagaccccccucggccucgucgaccucuucgucuucuccaccuccuucuaccucaucuccaucuuccuccaccucgucaagauccccacccaccgccacaucaucggcaagcccugccccaagccccaccgccucaaccacaugggcaucugcuccugcggccucuacaagcaccccggcguccccgucaaguggaagcgcugaggacuaguuauaagacugacuagcccgaugggccucccaacgggcccuccuccccuccuugcaccgagauuaauaaaaaaaaaaaaaaaaaaaaaaaaaaaaaaaaaaaaaaaaaaaaaaaaaaaaaaaaaaaaaaaaugcaucccccccccccccccccccccccccccccccaaaggcucuuuucagagccaccagaauu

SEQ ID NO: 7375 - RNA, 1690 nt, Artificial Sequence
  mRNA product Design i-3 comprising derived and/or modified sequence from LASV(LASV254-NIG-2011;Clade II)__AIT17674__GPCstabilized (opt2)
gggagaaagcuuaccaugggccagaucaucaccuucuuccaggaggucccccacgucaucgaggaggucaugaacaucguccucaucgcccucucccuccucgccauccucaagggcaucuacaacgucgccaccugcggccucuucggccucgucuccuuccuccuccucugcggccgcuccugcuccaccaccuacaagggcgucuacgagcuccagacccucgagcucgacaugaccaaccucaacaugaccaugccccucuccugcaccaagaacaacucccaccacuacaucauggucggcaacgagaccggccucgagcucacccucaccaacaccuccaucaucaaccacaaguucugcaaccucuccgacgcccacaagaagaaccucuacaaccacgcccucauguccaucaucuccaccuuccaccucuccauccccaacuucaaccaguacgaggccauguccugcgacuucaacggcggcaagaucuccguccaguacaaccucucccacuccuacgccgucgacgccgccaaccacugcggcaccaucgccaacggcguccuccagaccuucaugcgcauggccuggggcggcuccuacaucgcccucgacuccggcugcggcaacugggacugcaucaugaccuccuaccaguaccucaucauccagaacaccaccugggaggaccacugccaguucucccgccccucccccaucggcuaccucggccuccucucccagcgcacccgcgacaucuacaucucccgccgccgccggggcaccuucaccuggacccucuccgacuccgagggcaacgagacccccggcggcuacugccucacccgcuggaugcucaucgaggccgagcucaagugcuucggcaacaccgccgucgccaagugcaacgagaagcacgacgaggaguucugcgacaugcuccgccucuucgacuucaacaagcaggccauccgccgccucaagacccccgcccaggccaacauccagcucaucaacaaggccgucaacgcccucaucaacgaccagcucaucaugaagaaccaccuccgcgacaucaugugcauccccuacugcaacuacuccaaguacugguaccucaaccacaccgucaccggcaagaccucccucccccgcugcuggcucgucuccaacggcuccuaccucaacgagacccacuucuccgacgacaucgagcagcaggccgacaacaugaucaccgagcuccuccagaaggaguacauggaccgccagggcaagaccccccucggccucgucgaccucuucgucuucuccaccuccuucuaccucaucuccaucuuccuccaccucgucaagauccccacccaccgccacgucaucggcaagcccugccccaagccccaccgccucaaccacaugggcaucugcuccugcggccucuacaagcaccccggcguccccgucaaguggaagcgcugaggacuaguuauaagacugacuagcccgaugggccucccaacgggcccuccuccccuccuugcaccgagauuaauaaaaaaaaaaaaaaaaaaaaaaaaaaaaaaaaaaaaaaaaaaaaaaaaaaaaaaaaaaaaaaaaugcaucccccccccccccccccccccccccccccccaaaggcucuuuucagagccaccagaauu

SEQ ID NO: 7376 - RNA, 1690 nt, Artificial Sequence
  mRNA product Design i-3 comprising derived and/or modified sequence from LASV(Nig08-A19;Clade III)__ADU56618__GPCstabilized (opt2)
gggagaaagcuuaccaugggccagaucgucaccuucuuccaggaggucccccacgucaucgaggaggucaugaacaucguccucaucgcccucuccauccucgccauccucaagggccucuacaacaucgccaccugcggccucaucggccucgucaccuuccuccuccucuccggccgcuccugcuccaugaccuacaagggcgucuacgagcuccagacccucgagcucaacaugaacacccucaacaugaccaugccccucuccugcaccaagaacaacucccaccacuacaucauggucggcaacgagaccggccucgagcucacccucaccaacaccucccuccuccaccacaaguucugcaaccucuccgacgcccacaagaagaaccucuacgaccacacccucauguccaucaucuccaccuuccaccucuccauccccaacuucaaccaguacgaggccauguccugcgacuucaacggcggcaagaucaccguccaguacaaccucucccacuccuacgccaucgacgccgccaaccacugcggcaccgucgccaacggcguccuccagaccuucaugcgcauggccuggggcggcuccuacaucgcccucgacuccggcugcggcaagugggacugcaucaugaccuccuaccaguaccucaucauccagaacaccaccugggaggaccacugccaguucucccgccccucccccaucggcuaccucggccuccucucccagcgcacccgcgacaucuacaucucccgccgccgccggggcaccuucaccuggacccucuccgacuccgagggcaacgagacccccggcggcuacugccucacccgcuggaugcucaucgaggccgagcucaagugcuucggcaacaccgccgucgccaagugcaacgagaagcacgacgaggaguucugcgacaugcuccgccucuucgacuucaacaagcaggccauccgccgccucaaggcccccgcccagauguccauccagcucaucaacaaggccgucaacgcccucaucaacgaccagcucaucaugaagaaccaccuccgcgacaucaugugcauccccuacugcaacuacuccaaguacugguaccucaaccacaccuccaccggccgcaccucccucccccgcugcuggcucgucuccaacggcuccuaccucaacgagacccacuucuccgacgacaucgagcagcaggccgacaacaugaucaccgagaugcuccagaaggaguaccucgaccgccagggcaagaccccccucggccucgucgaccucuucgucuucuccaccuccuucuaccucaucuccaucuuccuccaccucgucaagauccccacccaccgccacaucgucggcaagcccugccccaagccccaccgccucaaccacaugggcaucugcuccugcggccucuacaagcagcccggcguccccguccgcuggaagcgcugaggacuaguuauaagacugacuagcccgaugggccucccaacgggcccuccuccccuccuugcaccgagauuaauaaaaaaaaaaaaaaaaaaaaaaaaaaaaaaaaaaaaaaaaaaaaaaaaaaaaaaaaaaaaaaaaugcaucccccccccccccccccccccccccccccccaaaggcucuuuucagagccaccagaauu

SEQ ID NO: 7377 - RNA, 1693 nt, Artificial Sequence
  mRNA product Design i-3 comprising derived and/or modified sequence from LASV(G1180-SLE-2010;Clade IV)__AIT17168__GPCstabilized (opt2)
gggagaaagcuuaccaugggccagaucgucaccuucuuccaggaggucccccacgucaucgaggaggucaugaacaucguccucaucgcccucuccauccucgccguccucaagggccucuacaacuucgccaccugcggccucgucggccuccucaccuuccuccuccucugcggccgcuccugcaccgccucccgcuacaagggcgucuacgagcuccagacccucgagcucaacauggagacccucaacaugaccaugccccucuccugcaccaagaacaacucccaccacuacaucauggucggcaacgagaccggccucgagcucacccucaccaacaccuccaucaucaaccacaaguucugcaaccucuccgacgcccacaagaagaaccucuacgaccacgcccucauguccaucaucuccaccuuccaccucuccauccccaacuucaaccaguacgaggccauguccugcgacuucaacggcggcaagaucuccguccaguacaaccucucccacuccuacgccggcgacgccgccaaccacugcggcaccgucgccaacggcguccuccagaccuucaugcgcauggccuggggcggcuccuacaucgcccucgacuccggcugcggcuccugggacugcaucaugaccuccuaccaguaccucaucauccagaacaccaccugggaggaccacugccaguucucccgccccucccccaucggcuaccucggccuccucucccagcgcacccgcgacaucuacaucucccgccgccgccggggcaccuucaccuggacccucuccgacuccgagggcaaggacacccccggcggcuacugccucacccgcuggaugcucaucgaggccgagcucaagugcuucggcaacaccgccgucgccaagugcaacgagaagcacgacgaggaguucugcgacaugcuccgccucuucgacuucaacaagcaggccauccagcgccucaaggcccccgcccagauguccauccagcucaucaacaaggccgucaacgcccucaucaacgaccagcucaucaugaagaaccaccuccgcgacaucaugugcauccccuacugcaacuacuccaaguacugguaccucaaccacaccaccaccggcaagaccucccuccccaagugcuggcucgucuccaacggcuccuaccucaacgagacccacuucuccgacgacaucgagcagcaggccgacaacaugaucaccgagaugcuccagaaggaguacauggagcgccagggcaagaccccccucggccucgucgaccucuucgucuucuccaccuccuucuaccucaucuccaucuuccuccaccucgucaagauccccacccaccgccacaucgucggcaaguccugccccaagccccaccgccucaaccacaugggcaucugcuccugcggccucuacaagcagcccggcguccccgucaaguggaagcgcugaggacuaguuauaagacugacuagcccgaugggccucccaacgggcccuccuccccuccuugcaccgagauuaauaaaaaaaaaaaaaaaaaaaaaaaaaaaaaaaaaaaaaaaaaaaaaaaaaaaaaaaaaaaaaaaaugcaucccccccccccccccccccccccccccccccaaaggcucuuuucagagccaccagaauu

SEQ ID NO: 7378 - RNA, 1693 nt, Artificial Sequence
  mRNA product Design i-3 comprising derived and/or modified sequence from LASV(G1442-SLE-2011;Clade IV)__AIT17180__GPCstabilized (opt2)
gggagaaagcuuaccaugggccagaucgucaccuucuuccaggaggucccccacgucaucgaggaggucaugaacaucguccucaucgcccucuccauccucgccguccucaagggccucuacaacgucgccaccugcggccucaucggccucgucaccuuccuccuccucugcggccgcuccugcaccaccacccucuacaagggcgucuacgagcuccagacccucgagcucaacauggagacccucaacaugaccaugccccucuccugcaccaagaacaacucccaccacuacauccgcgucggcaacgagaccggccucgagcucacccucaccaacaccuccaucaucaaccacaaguucugcaaccucuccgacgcccacaagaagaaccucuacgaccacgcccucauguccaucaucuccaccuuccaccucuccauccccaacuucaaccaguacgaggccauguccugcgacuucaacggcggcaagaucuccguccaguacaaccucucccacuccuacgccggcgacgccgccaaccacugcggcaccgucgccaacggcguccuccagaccuucaugcgcauggccuggggcggcuccuacaucgcccucgacuccggcugcggcaacugggacugcaucaugaccuccuaccaguaccucaucauccagaacaccaccugggacgaccacugccaguucucccgccccucccccaucggcuaccucggccuccucucccagcgcacccgcgacgucuacaucucccgccgccgccggggcaccuucaccuggacccucuccgacuccgagggcaaggacacccccggcggcuacugccucacccgcuggaugcucaucgaggccgagcucaagugcuucggcaacaccgccgucgccaagugcaacgagaagcacgacgaggaguucugcgacaugcuccgccucuucgacuucaacaagcaggccauccagcgccucaaggcccccgcccagauguccauccagcucaucaacaaggccgucaacgcccucaucaacgaccagcucaucaugaagaaccaccuccgcgacaucaugugcauccccuacugcaacuacuccaaguacugguaccucaacaacaccgccaccggcaagaccucccuccccaagugcuggcucaucuccaacggcuccuaccucaacgagacccacuucuccgacgacaucgagcaggaggccgacaacaugaucaccgagaugcuccagaaggaguacauggagcgccagggcaagaccccccucggccucgucgaccucuucgucuucuccaccuccuucuaccucaucuccaucuuccuccaccucgucaagauccccacccaccgccacaucgucggcaaguccugccccaagccccaccgccucaaccacaugggcaucugcuccugcggccucuacaagcagcccggcguccccguccgcuggaagcgcugaggacuaguuauaagacugacuagcccgaugggccucccaacgggcccuccuccccuccuugcaccgagauuaauaaaaaaaaaaaaaaaaaaaaaaaaaaaaaaaaaaaaaaaaaaaaaaaaaaaaaaaaaaaaaaaaugcaucccccccccccccccccccccccccccccccaaaggcucuuuucagagccaccagaauu

SEQ ID NO: 7379 - RNA, 1693 nt, Artificial Sequence
  mRNA product Design i-3 comprising derived and/or modified sequence from LASV(G3010-SLE-2013;Clade IV)__AIT17344__GPCstabilized (opt2)
gggagaaagcuuaccaugggccagaucgucaccuucuuccaggaggucccccacgucaucgaggaggucaugaacaucguccucaucgcccucuccauccucgccguccucaagggccucuacaacuucgccaccugcggccucgucggccucgucaccuuccuccuccucugcggccgcuccugcaccaccucccucuacaagggcgucuacgagcuccagacccucgagcucaacauggagacccucaacaugaccaugccccucuccugcaccaagaacaacucccaccacuacaucauggucggcaacgagaccggccucgagcucacccucaccaacaccuccaucaucaaccacaaguucugcaaccucuccgacgcccacaagaagaaccucuacaaccacgcccucauguccaucaucuccaccuuccaccucuccauccccaacuucaaccaguacgaggccauguccugcgacuucaacggcggcaagaucuccguccaguacaaccucucccacuccuacgccggcgacgccgccucccacugcggcaccgucgccaacggcguccuccagaccuucaugcgcauggccuggggcggcuccuacaucgcccucgacuccggcugcggcaagugggacugcaucaugaccuccuaccaguaccucaucauccagaacaccaccugggaggaccacugccaguucucccgccccucccccaucggcuaccucggccuccucucccagcgcacccgcgacaucuacaucucccgccgccgccggggcaccuucaccuggacccucuccgacuccgagggcaaggacacccccggcggcuacugccucacccgcuggaugcucaucgaggccgagcucaagugcuucggcaacaccgccgucgccaagugcaacgagaagcacgacgaggaguucugcgacaugcuccgccucuucgacuucaacaagcaggccauccagcgccucaagacccccgcccagauguccauccagcucaucaacaaggccgucaacgcccucaucaacgaccagcucaucaugaagaaccaccuccgcgacaucaugugcauccccuacugcaacuacuccaaguacugguaccucaaccacaccaccaccggcaagaccucccuccccaagugcuggcucgucuccaacggcuccuaccucaacgagacccacuucuccgacgacaucgagcagcaggccgacaacaugaucaccgagaugcuccagaaggaguacauggagcgccagggcaagaccccccucggccucgucgaccucuucgucuucuccaccuccuucuaccucaucuccaucuuccuccaccucgucaagauccccacccaccgccacaucgucggcaaguccugccccaagccccaccgccucaaccacaugggcaucugcuccugcggccucuacaagcagcccggcguccccguccgcuggaagcgcugaggacuaguuauaagacugacuagcccgaugggccucccaacgggcccuccuccccuccuugcaccgagauuaauaaaaaaaaaaaaaaaaaaaaaaaaaaaaaaaaaaaaaaaaaaaaaaaaaaaaaaaaaaaaaaaaugcaucccccccccccccccccccccccccccccccaaaggcucuuuucagagccaccagaauu

SEQ ID NO: 7380 - RNA, 1693 nt, Artificial Sequence
  mRNA product Design i-3 comprising derived and/or modified sequence from LASV(G502-SLE-2009;Clade IV)__AIT17126__GPCstabilized (opt2)
gggagaaagcuuaccaugggccagaucgucaccuucuuccaggaggucccccacgucaucgaggaggucaugaacaucguccucaucgcccucuccauccucgccguccucaagggccucuacaacuucgccaccugcggccucgucggccuccucaccuuccuccuccucugcggccgcuccugcaccaccggccucuacaagggcgucuacgagcuccagacccucgagcucaacauggagacccucaacaugaccaugccccucuccugcaccaagaacaacucccaccacuacaucauggucggcaacgagaccggccucgagcucacccucaccaacaccuccaucaucaaccacaaguucugcaaccucuccgacgcccacaagaagaaccucuacgaccacgcccucauguccaucaucuccaccuuccaccucuccauccccaacuucaaccaguacgaggccauguccugcgacuucaacggcggcaagaucuccguccaguacaaccucucccacuccuacgccggcgacgccgccgaccacugcggcaccgucgccaacggcguccuccagaccuucaugcgcauggccuggggcggcuccuacaucgcccucgacuccggcugcggccgcugggacugcaucaugaccuccuaccaguaccucaucauccagaacaccaccugggaggaccacugccaguucucccgccccucccccaucggcuaccucggccuccucucccagcgcacccgcgacaucuacaucucccgccgccgccggggcaccuucaccuggacccucuccgacuccgagggcaaggacacccccggcggcuacugccucacccgcuggaugcucaucgaggccgagcucaagugcuucggcaacaccgccgucgccaagugcaacgagaagcacgacgaggaguucugcgacaugcuccgccucuucgacuucaacaagcaggccauccagcgccucaaggcccccgcccagauguccauccagcucaucaacaaggccgucaacgcccucaucaacgaccagcucgucaugaagaaccaccuccgcgacaucaugugcauccccuacugcaacuacucccgcuacugguaccucaaccacaccaccaccggccgcaccucccuccccaagugcuggcucgucuccaacggcuccuaccucaacgagacccacuucuccgacgacaucgagcagcaggccgacaacaugaucaccgagaugcuccagaaggaguacauggagcgccagggcaagaccccccucggccucgucgaccucuucgucuucuccaccuccuucuaccucaucuccaucuuccuccaccucgucaagauccccacccaccgccacaucgucggcaaguccugccccaagccccaccgccucaaccacaugggcaucugcuccugcggccucuacaagcagcccggcguccccgucaaguggaagcgcugaggacuaguuauaagacugacuagcccgaugggccucccaacgggcccuccuccccuccuugcaccgagauuaauaaaaaaaaaaaaaaaaaaaaaaaaaaaaaaaaaaaaaaaaaaaaaaaaaaaaaaaaaaaaaaaaugcaucccccccccccccccccccccccccccccccaaaggcucuuuucagagccaccagaauu

SEQ ID NO: 7381 - RNA, 1693 nt, Artificial Sequence
  mRNA product Design i-3 comprising derived and/or modified sequence from LASV(G733-SLE-2010;Clade IV)__AIT17154__GPCstabilized (opt2)
gggagaaagcuuaccaugggccagaucgucaccuucuuccaggaggucccccacgucaucgaggaggucaugaacaucguccucaucgcccucuccauccucgccguccucaagggccucuacaacuucgccaccugcggcaucgucggccucgucuccuuccuccuccucugcggccgcuccugcaccaccucccucuacaagggcgucuacgagcuccagacccucgagcucaacauggagacccucaacaugaccaugccccucuccugcaccaagaacaacucccaccacuacaucauggucggcaacgagaccggccucgagcucacccucaccaacaccuccaucaucaaccacaaguucugcaaccucuccgacgcccacaagaagaaccucuacgaccacgcccucauguccaucaucuccaccuuccaccucuccauccccaacuucaaccaguacgaggccauguccugcgacuucaacggcggcaagaucuccguccaguacaaccucucccacuccuacgccggcgacgccgccaaccacugcggcaccaucgccaacggcguccuccagaccuucaugcgcauggccuggggcggcuccuacaucgcccucgacuccggcugcgaccgcugggacugcaucaugaccuccuaccaguaccucaucauccagaacaccaccugggaggaccacugccaguucucccgccccucccccaucggcuaccucggccuccucucccagcgcacccgcgacaucuacaucucccgccgccgccggggcaccuucaccuggacccucuccgacuccgagggcaaggacacccccggcggcuacugccucacccgcuggaugcucaucgaggccgagcucaagugcuucggcaacaccgccgucgccaagugcaacgagaagcacgacgaggaguucugcgacaugcuccgccucuucgacuucaacaagcaggccauccagcgccucaaggcccccgcccagauguccauccagcucaucaacaaggccgucaacgcccucaucaacgaccagcucaucaugaagaaccaccuccgcgacaucaugugcauccccuacugcaacuacuccaaguacugguaccucaaccacaccaccaccggcaagaccucccuccccaagugcuggcucgucuccaacggcuccuaccucaacgagacccacuucuccgacgacaucgagcagcaggccgacaacaugaucaccgagaugcuccagaaggaguacauggagcgccagggcaagaccccccucggccucgucgaccucuucgucuucuccaccuccuucuaccucaucuccaucuuccuccaccucgucaagauccccacccaccgccacgucgucggcaaguccugccccaagccccaccgccucaaccacaugggcaucugcuccugcggccucuacggccagcccggcguccccgucaaguggaagcgcugaggacuaguuauaagacugacuagcccgaugggccucccaacgggcccuccuccccuccuugcaccgagauuaauaaaaaaaaaaaaaaaaaaaaaaaaaaaaaaaaaaaaaaaaaaaaaaaaaaaaaaaaaaaaaaaaugcaucccccccccccccccccccccccccccccccaaaggcucuuuucagagccaccagaauu

SEQ ID NO: 7382 - RNA, 1693 nt, Artificial Sequence
  mRNA product Design i-3 comprising derived and/or modified sequence from MOPV/LASV reassortant(IGS-1;Clade IV)__AFY05576__GPCstabilized (opt2)
gggagaaagcuuaccaugggccagaucgucaccuucuuccaggaggucccccacgucaucgaggaggucaugaacaucguccucaucgcccucuccguccucgccguccucaagggccucuacaacuucgccaccugcggccucgucggccucgucaccuuccuccuccucugcggccgcuccugcaccaccucccucuacaagggcgucuacgagcuccagacccucgagcucaacauggagacccucaacaugaccaugccccucuccugcaccaagaacaacucccaccacuacaucauggucggcaacgagaccggccucgagcucacccucaccaacaccuccaucaucaaccacaaguucugcaaccucuccgacgcccacaagaagaaccucuacgaccacgcccucauguccaucaucuccaccuuccaccucuccauccccaacuucaaccaguacgaggccauguccugcgacuucaacggcggcaagaucuccguccaguacaaccucucccacuccuacgccggcgacgccgccaaccacugcggcaccgucgccaacggcguccuccagaccuucaugcgcauggccuggggcggcuccuacaucgcccucgacuccggcugcggcaacugggacugcaucaugaccuccuaccaguaccucaucauccagaacaccaccugggaggaccacugccaguucucccgccccucccccaucggcuaccucggccuccucucccagcgcacccgcgacaucuacaucucccgccgccgccggggcaccuucaccuggacccucuccgacuccgagggcgaggacacccccggcggcuacugccucacccgcuggaugcucaucgaggccgagcucaagugcuucggcaacaccgccgucgccaagugcaacgagaagcacgacgaggaguucugcgacaugcuccgccucuucgacuucaacaagcaggccauccagcgccucaaggcccccgcccagauguccauccagcucaucaacaaggccgucaacgcccucaucaacgaccagcucaucaugaagaaccaccuccgcgacaucaugugcauccccuacugcaacuacuccaaguacugguaccucaaccacaccaccaccggccgcaccucccuccccaagugcuggcucgucuccaacggcuccuaccucaacgagacccacuucuccgacgacaucgagcagcaggccgacaacaugaucaccgagaugcuccagaaggaguacauggagcgccagggcaagaccccccucggccucgucgaccucuucgucuucuccaccuccuucuaccucaucuccaucuuccuccaccucgucaagauccccacccaccgccacaucgucggcaaguccugccccaagccccaccgccucaaccacaugggcaucugcuccugcggccucuacaagcagcccggcguccccgucaaguggaagcgcugaggacuaguuauaagacugacuagcccgaugggccucccaacgggcccuccuccccuccuugcaccgagauuaauaaaaaaaaaaaaaaaaaaaaaaaaaaaaaaaaaaaaaaaaaaaaaaaaaaaaaaaaaaaaaaaaugcaucccccccccccccccccccccccccccccccaaaggcucuuuucagagccaccagaauu

SEQ ID NO: 7383 - RNA, 1693 nt, Artificial Sequence
  mRNA product Design i-3 comprising derived and/or modified sequence from LASV(LM765-SLE-2012;Clade IV)__AIT17814__GPCstabilized (opt2)
gggagaaagcuuaccaugggccagaucgucaccuucuuccaggaggucccccacgucaucgaggaggucaugaacaucguccucaucgcccucuccauccucgccguccucaagggccucuacaacuucgccaccugcggccucgucggccucgucaccuuccuccuccucugcggccgcuccugcaccaccucccucuacaagggcgucuacgagcuccagacccucgagcucaacauggagacccucaacaugaccaugccccucuccugcaccaagaacaacucccaccacuacaucauggucggcaacgagaccggccucgagcucacccucaccaacaccuccaucaucgaccacaaguucugcaaccucuccgacgcccaccgcaagaaccucuacgaccacgcccucauguccaucaucuccaccuuccaccucuccauccccaacuucaaccaguacgaggccauguccugcgacuucaacggcggcaagaucuccguccaguacaaccucucccacuccuacgccaaggacgccgccgaccacugcggcaccgucgccaacggcguccuccagaccuucaugcgcauggccuggggcggcuccuacaucgcccucgacuccggcugcggccgcugggacugcaucaugaccuccuaccaguaccucaucauccagaacaccaccugggaggaccacugccaguucucccgccccucccccaucggcuaccucggccuccucucccagcgcacccgcgacaucuacaucucccgccgccgccggggcaccuucaccuggacccucuccgacuccgagggcaaggacacccccggcggcuacugccucacccgcuggaugcucaucgaggccgagcucaagugcuucggcaacaccgccgucgccaagugcaacgagaagcacgacgaggaguucugcgacaugcuccgccucuucgacuucaacaagcaggccauccagcgccucaaggcccccgcccagauguccauccagcucaucaacaaggccgucaacgcccucaucaacgaccagcucaucaugaagaaccaccuccgcgacaucaugugcauccccuacugcaacuacuccaaguacugguaccucaaccacaccaccaccggcaagaccucccuccccaagugcuggcucgucuccaacggcuccuaccucaacgagacccacuucuccgacgacaucgagcagcaggccgacaacaugaucaccgagaugcuccagaaggaguacauggagcgccagggcaagaccccccucggccucgucgaccucuucgucuucuccaccuccuucuaccucaucuccaucuuccuccaccucgucaagauccccacccaccgccacaucgucggcaagcccugccccaagccccaccgccucaaccacaugggcaucugcuccugcggccucuacaagcagcccggcguccccgucaaguggaagcgcugaggacuaguuauaagacugacuagcccgaugggccucccaacgggcccuccuccccuccuugcaccgagauuaauaaaaaaaaaaaaaaaaaaaaaaaaaaaaaaaaaaaaaaaaaaaaaaaaaaaaaaaaaaaaaaaaugcaucccccccccccccccccccccccccccccccaaaggcucuuuucagagccaccagaauu

SEQ ID NO: 7384 - RNA, 1693 nt, Artificial Sequence
  mRNA product Design i-3 comprising derived and/or modified sequence from LASV(LM776-SLE-2012;Clade IV)__AIT17824__GPCstabilized (opt2)
gggagaaagcuuaccaugggccagaucgucaccuucuuccaggaggucccccacgucaucgaggaggucaugaacaucguccucaucgcccucuccauccucgccguccucaagggccucuacaacuucgccaccugcggccucgucggccucgucaccuuccuccuccucugcggccgcuccugcaccaccuccgucuacaagggcgucuacgagcuccagacccucgagcucaacauggagacccucaacaugaccaugccccucuccugcaccaagaacaacucccaccacuacaucauggucggcaacgagaccggccucgagcucacccucaccaacaccuccaucaucaaccacaaguucugcaaccucuccgacgcccacaagaagaaccucuacgaccacgcccucauguccaucaucuccaccuuccaccucuccauccccaacuucaaccaguacgaggccauguccugcgacuucaacggcggcaagaucuccguccaguacaaccucucccacuccuacgccggcgacgccgccaaccacugcggcaccgucgccaacggcguccuccagaccuucaugcgcauggccuggggcggcuccuacaucgcccucgacuccggcugcggcaagugggacugcaucaugaccuccuaccaguaccucaucauccagaacaccaccugggaggaccacugccaguucucccgccccucccccaucggcuaccucggccuccucucccagcgcacccgcgacaucuacaucucccgccgccgccggggcaccuucaccuggacccucuccgacuccgagggcaaggacacccccggcggcuacugccucacccgcuggaugcucaucgaggccgagcucaagugcuucggcaacaccgccgucgccaagugcaacgagaagcacgacgaggaguucugcgacaugcuccgccucuucgacuucaacaagcaggccauccagcgccucaaggcccccgcccagauguccauccagcucaucaacaaggccgucaacgcccucaucaacgaccagcucaucaugaagaaccaccuccgcgacaucaugugcauccccuacugcaacuacuccaaguacugguaccucaaccacaccaccaccggcaagaccucccuccccaagugcuggcucgucuccaacggcuccuaccucaacgagacccacuucuccgacgacaucgagcagcaggccgacaacaugaucaccgagaugcuccagaaggaguacauggagcgccagggcaagaccccccucggccucgucgaccucuucgucuucuccaccuccuucuaccucaucuccaucuuccuccaccucgucaagauccccacccaccgccacaucgucggcaaguccugccccaagccccaccgccucaaccacaugggcaucugcuccugcggccucuacaagcagcccggcguccccguccgcuggaagcgcugaggacuaguuauaagacugacuagcccgaugggccucccaacgggcccuccuccccuccuugcaccgagauuaauaaaaaaaaaaaaaaaaaaaaaaaaaaaaaaaaaaaaaaaaaaaaaaaaaaaaaaaaaaaaaaaaugcaucccccccccccccccccccccccccccccccaaaggcucuuuucagagccaccagaauu

SEQ ID NO: 7385 - RNA, 1693 nt, Artificial Sequence
  mRNA product Design i-3 comprising derived and/or modified sequence from LASV(Mad39;Clade IV)__ANH09722__GPCstabilized (opt2)
gggagaaagcuuaccaugggccagaucgucaccuucuuccaggaggucccccacgucaucgaggaggucaugaacaucguccucaucgcccucuccauccucgccguccucaagggccucuacaacgucgccaccugcggccucaucggccucgucaccuuccuccuccucugcggccgcuccugcaccaccacccucuacaagggcgucuacgagcuccaggcccucgagcucaacauggagacccucaacaugaccaugccccucuccugcaccaagaacaacucccaccacuacauccgcgucggcaacgagaccggccucgagcucacccucaccaacaccucccucaucaaccacaaguucugcaaccucuccgacgcccacaagaagaaccucuacgaccacgcccucauguccaucaucuccaccuuccaccucuccauccccaacuucaaccaguacgaggccauguccugcgacuucaacgacggcaagaucuccguccaguacaaccucucccacaccuacgccggcgacaccgccaaccacugcggcaccgucgccaacggcguccuccagaccuucaugcgcauggccuggggcggcuccuacaucgcccucgacuccggcugcggcggcugggacugcaucaugaccuccuaccaguaccucaucauccagaacaccaccugggaggaccacugccaguucucccgccccucccccaucggcuaccucggccuccucucccagcgcacccgcgacaucuacaucucccgccgccgccggggcaccuucaccuggacccucuccgacuccgagggcaaggacacccccggcggcuacugccucacccgcuggaugcucaucgaggccgagcucaagugcuucggcaacaccgccgucgccaagugcaacgagaagcacgacgaggaguucugcgacaugcuccgccucuucgacuucaacaagcaggccauccagcgccucaaggcccccgcccagauguccauccagcucaucaacaaggccgucaacgcccucaucaacgaccagcucaucaugaagaaccaccuccgcgacaucaugugcauccccuacugcaacuacuccaaguacugguaccucaaccacaccgucaccggcaagaccucccuccccaagugcuggcucgucuccaacggcuccuaccucaacgagacccacuucuccgacgacaucgagcagcaggccgacaacaugaucaccgagaugcuccagaaggaguacauggagcgccagggcaagaccccccucggccucgucgaccucuucgucuucuccaccuccuucuaccucaucuccaucuuccuccaccucgucaagauccccacccaccgccacgucgucggcaagcccugccccaagccccaccgccucaaccacaugggcaucugcuccugcggcuucuacaagcagcccggcguccccguccgcuggaagcgcugaggacuaguuauaagacugacuagcccgaugggccucccaacgggcccuccuccccuccuugcaccgagauuaauaaaaaaaaaaaaaaaaaaaaaaaaaaaaaaaaaaaaaaaaaaaaaaaaaaaaaaaaaaaaaaaaugcaucccccccccccccccccccccccccccccccaaaggcucuuuucagagccaccagaauu

SEQ ID NO: 7386 - RNA, 1693 nt, Artificial Sequence
  mRNA product Design i-3 comprising derived and/or modified sequence from LASV(Z0947-SLE-2011;Clade IV)__AIT17840__GPCstabilized (opt2)
gggagaaagcuuaccaugggccagaucgucaccuucuuccaggaggucccccacgucaucgaggaggucaugaacaucguccucaucgcccucuccauccucgccguccucaagggccucuacaacuucgccaccugcggccucgucggccucgucaccuuccuccuccucugcggccgcuccugcaccaucucccucuacaagggcgucuacgagcuccagacccucgagcucaacauggagacccucaacaugaccaugccccucuccugcaccaagaacaacucccaccacuacaucauggucggcaacgagaccggccucgagcucacccucaccaacaccuccaucaucaaccacaaguucugcaaccucuccgacgcccacaagaagaaccucuacgaccacgcccucauguccaucaucuccaccuuccaccucuccauccccaacuucaaccaguacgaggccauguccugcgacuucaacggcggcaagaucuccguccaguacaaccucucccacuccuacgccggcgacgccgccaaccacugcggcaccgucgccaacggcguccuccagaccuucaugcgcauggccuggggcggcuccuacaucgcccucgacuccggcugcgaccgcugggacugcaucaugaccuccuaccaguaccucaucauccagaacaccaccugggaggaccacugccaguucucccgccccucccccaucggcuaccucggccuccucucccagcgcacccgcgacaucuacaucucccgccgccgccggggcaccuucaccuggacccucuccgacuccgagggcaaggacacccccggcggcuacugccucacccgcuggaugcucaucgaggccgagcucaagugcuucggcaacaccgccgucgccaagugcaacgagaagcacgacgaggaguucugcgacaugcuccgccucuucgacuucaacaagcaggccauccagcgccucaaggcccccgcccagauguccauccagcucaucaacaaggccgucaacgcccucaucaacgaccagcucaucaugaagaaccaccuccgcgacaucaugugcauccccuacugcaacuacuccaaguacugguaccucaaccacaccaccaccggcaagaccucccuccccaagugcuggcucgucuccaacggcuccuaccucaacgagacccacuucuccgacgacaucgagcagcaggccgacaacaugaucaccgagaugcuccagaaggaguacauggagcgccagggcaagaccccccucggccucgucgaccucuucgucuucuccaccuccuucuaccucaucuccaucuuccuccaccucgucaagauccccacccaccgccacaucgucggcaagcccugccccaagccccaccgccucaaccacaugggcaucugcuccugcggccucuacaagcagcccggcguccccgucaaguggaagcgcugaggacuaguuauaagacugacuagcccgaugggccucccaacgggcccuccuccccuccuugcaccgagauuaauaaaaaaaaaaaaaaaaaaaaaaaaaaaaaaaaaaaaaaaaaaaaaaaaaaaaaaaaaaaaaaaaugcaucccccccccccccccccccccccccccccccaaaggcucuuuucagagccaccagaauu

SEQ ID NO: 7387 - RNA, 1693 nt, Artificial Sequence
  mRNA product Design i-3 comprising derived and/or modified sequence from LASV(Josiah;Clade IV)__NP_694870__GPCstabilized (opt3)
gggagaaagcuuaccaugggccagaucgugaccuucuuucaagaggucccccacguuauugaagaggugaugaacauaguacugaucgcccucagcgugcuugcuguccugaagggguuguacaauuucgcaacaugcggauuagugggucugguuacuuuucuacuccuguguggcagauccugcacgaccucucuuuauaaagggguguacgaacugcagacauuggagcucaacauggaaacucugaauaugaccaugccucugucauguacaaagaacaauagucaucacuauauuauggucggaaacgagaccggccucgaguuaacucugacaaauaccagcaucauuaaccauaaauucugcaaucuuuccgacgcccacaagaaaaacuuguacgaucaugcgcugaugucuaucauaucgacguuucaccuaucaaucccaaauuucaaccaguaugaagcuaugagcugugacuuuaauggugggaagauuagugugcaguacaaccucucccacucuuaugccggagaugcagccaaucauugcggcacuguagcuaacggcguucugcaaaccuucaugaggauggcauggggagggagcuacaucgcccuugacuccgguugcggcaacugggauuguauuaugacaucauaccaguaucugaucauacagaauacuaccugggaggaccacugccaguuuagucgcccgagccccauuggguacuugggacuccugucucaacgaacacgugauaucuauauuuccagaaggcgccggggcaccuucacguggacucucucagacagcgaagguaaggauacaccugggggauacugucuuacccgguggaugcugaucgaggcugaguugaaaugcuuuggcaacacugccguggcgaaguguaaugaaaaacaugacgaggaguucugcgauaugcuacgccuguuugacuucaacaagcaggcaauccagagacucaaagcccccgcucagaugaguauucaacugauaaauaaggccgucaacgcacuuaucaaugaucagcugauuaugaagaaccacuugagggacaucaugugcauaccauauugcaauuacucuaaauauugguaccucaaccacacaaccacggggcggaccucccugcccaaguguugguuagugagcaauggaucguaccugaacgaaacacauuucucugacgauauugagcagcaagcugacaauaugaucacugagaugcuacagaaagaauauauggagcgccaggguaagaccccucucggccugguggaucuuuuugucuucuccacaucauuuuacuugaucaguauuuuccugcaccucguuaaaaucccaacucaucgacacauugugggaaagagcugccccaaaccucauagacugaaccacauggggauauguuccugcggccuuuauaagcagccagguguaccggugaaguggaaaaggugaggacuaguuauaagacugacuagcccgaugggccucccaacgggcccuccuccccuccuugcaccgagauuaauaaaaaaaaaaaaaaaaaaaaaaaaaaaaaaaaaaaaaaaaaaaaaaaaaaaaaaaaaaaaaaaaugcaucccccccccccccccccccccccccccccccaaaggcucuuuucagagccaccagaauu

SEQ ID NO: 7388 - RNA, 1690 nt, Artificial Sequence
  mRNA product Design i-3 comprising derived and/or modified sequence from LASV(LP;Clade I)__AAF86701__GPCstabilized (opt3)
gggagaaagcuuaccaugggccagaucauuaccuucuuucaagaggugccccacgucauagaagagguuaugaacaucgugcugauugcccucagccuucuggcuaucuugaagggguuauacaauauugcaacaugcggaaucauaggucugguagccuuccuauuucucuguggcaaauccugcucucugacucuuaaagggggauaugaacugcagacguuggagcucaacauggaaacccugaauaugacaaugccucugucauguacuaagaacaguagccaucacuacaucagagugggcaaugagaccggucucgaguuaacacugaccaacacuuccauuaucaaucauaaguucugcaaccuuucugacgcgcacaaaaagaauuuguaugaucaugcucugaugucgauuaucucaacauuucaccuaagcauaccaaacuucaaucaguacgaagccaugaguugugacuuuaacgggggaaagauuuccguccaguauaaucucucucacagcuacgcaggcgaugccgcugagcauugcggcaccguggcaaacgggguucugcaaacguucaugaggauggccuggggaggucgguauaucgcucuugacuccggcugcgggaauugggauuguauuaugacuucauaccaguaccugaucauccagaacaccacaugggaagaccacugccaguuuagucgcccgagccccauuggauauuugggccuccugucucaacgaacucgugauauauacaucuccagaaggcgccgggguaccuucacauggacccucucagacagcgaggggaacgagacgccuggaggcuauugucuuacucgguggaugcugauugaagccgaguugaagugcuuuggcaauacagcgguggcaaaauguaacgaaaagcaugaugaggaguucugcgacaugcuacgccuguuugauuucaauaaacaggccaucagaaggcucaaggcucccgcccagaugaguauacagcugauuaacaaggcagucaaugcucuuaucaacgaccaacugaucaugaaaaaucacuugcgggauauuaugugcaucccauacugcaacuauucuaaguacugguaucucaaucacaccuccagcggacgcacuucgcugcccaaauguugguuaauuucuaacgguuccuaccugaaugagacacaguucucagacgacauagaacagcaagccgauaacaugaucaccgagaugcuacagaaggaauacauugagcgacagggcaaaacgccucucgggcugguggacaucuuuaucuucaguaccagcuuuuaucuuauuuccauauucuugcaucugaucaagauuccaacacacagacauaucguaggaaaacccugcccuaagccacacaggcucaaucauaugggcguuuguucuugcggucuguacaagcacccgggggugcccacuaaauggaagcggugaggacuaguuauaagacugacuagcccgaugggccucccaacgggcccuccuccccuccuugcaccgagauuaauaaaaaaaaaaaaaaaaaaaaaaaaaaaaaaaaaaaaaaaaaaaaaaaaaaaaaaaaaaaaaaaaugcaucccccccccccccccccccccccccccccccaaaggcucuuuucagagccaccagaauu

SEQ ID NO: 7389 - RNA, 1690 nt, Artificial Sequence
  mRNA product Design i-3 comprising derived and/or modified sequence from LASV(803213;Clade II)__AAF86703__GPCstabilized (opt3)
gggagaaagcuuaccaugggccagaucauuaccuucuuucaagaggugccccacgucauagaagagguuaugaacaucgugcugauugcccucagccuucuggcuaucuugaaggggauuuacaauguagcaacaugcggauuauucggucugaucuccuuucuacuccuguguggcagaucuugcucagugacuuauaaaggggucuacgaacuucagacgcuggaguugaacauggccaaucucaacaugaccaugccucugaguuguacaaagaauaacagccaucacuauauaauggugggaaaugaaacuggccuggagcucaccuuaacaaacaccuccaucauuaaucauaaauucugcaaccugucugacgcgcacaagaaaaaucuuuacgaucaugcuuugaugucgaucauuucaacuuuucaccugagcaucccaaacuucaaucaguaugaggccaugaguugugacuuuaacggugggaagauauccguucaguacaaucuaucucacagcuucgcaguggaugccgcuaaccauugcggaacaauugcaaacggcguccuccaaaccuuuaugaggauggccuggggcggguccuauaucgcucuggacucaggaugcgguaauugggauuguauuaugacgaguuaccaguaccuuaucauccagaacacuaccugggaagaccacugccaguucagccggccgucucccauuggcuaucugggguugcucucccaacgcacacgagauauauacaucucacguagacgccggggaacuuuuaccuggacacugagcgacagugagggcaaugaagccccugguggguauugucucaccagguggaugcuuauugaggcggagcugaaaugcuucggaaacacggcaguggccaaguguaaugaaaaacaugaugaggaauuuugcgacauguugcggcuauucgauuucaacaagcaggcuaucaaacgccugaagacucccgcccagaugucuauacagcucauuaauaaggcaguaaacgcucugaucaaugaccaacuuaucaugaaaaaccaccugagagauauuaugugcaucccauacugcaauuauuccagguacugguauuugaaccacacaguuaccggcaagacuagccucccccgguguuggcuggugucgaaugggucuuacuuaaacgaaacacauuuuuccgacgacauugagcagcaggccgauaauaugauaaccgagaugcugcaaaaagaauacauggaccgccagggaaagacgccucuaggucucgucgaucuguucguguuuucaaccaguuucuaucuuaucagcaucuuuuugcaccuggugaaaauuccaacacaucgacacaucgucggcaagcccugcccuaaaccacauagacucaaccacauggggauuuguuccugcggacuguacaagcacccgggcguucccgugaaguggaaaaggugaggacuaguuauaagacugacuagcccgaugggccucccaacgggcccuccuccccuccuugcaccgagauuaauaaaaaaaaaaaaaaaaaaaaaaaaaaaaaaaaaaaaaaaaaaaaaaaaaaaaaaaaaaaaaaaaugcaucccccccccccccccccccccccccccccccaaaggcucuuuucagagccaccagaauu

SEQ ID NO: 7390 - RNA, 1690 nt, Artificial Sequence
  mRNA product Design i-3 comprising derived and/or modified sequence from LASV(GA391;Clade III)__CAA36645__GPCstabilized (opt3)
gggagaaagcuuaccaugggccagaucgugaccuucuuucaagaggucccccacguuauugaagaggugaugaacauaguacugaucgcccucagcauucuugcuauccugaagggguuguacaauguggcaacaugcggauuaauuggucuggucacuuuccuacuccuguccggcagaucuuguucacuuaucuauaaagggacguacgaacugcagaccuuggagcucaacauggaaacacugaauaugacuaugccucugaguugcaccaagaacaauagccaucacuauauaagggugggaaacgagacaggccucgaguuaacccugacuaauacauccauccuuaaccauaaauuuuguaauuugucugacgcccacaagcggaaccuguacgaucauucgcuaaugucaauuaucagcaccuuccaccucaguauuccaaauuuuaaccaguaugaagcgauguccugcgacuucaauggugggaaaaucacgguucaguacaaccugucucacagcuuugcuguggaugccgcaggacauuguggcacucuugccaauggcguccugcaaaccuucaugcgcauggcuuggggaggguccuauauagcauuggacucagguugcggcaacugggauugcauuaugacaaguuaccaguaccucaucauucagaacacuaccugggacgaucacugucaguuuagccguccgucucccaucggguaucugggauuacugucccaaagaacaagggacaucuacauuucacggcgccgccggggcaccuucacguggacucugagcgauagugaggguaaugaaacaccugggggauauugcuugaccagauggaugcuaauagaggccgagcugaaguguuuuggcaacacugcuguggccaagugcaaugaaaaacaugacgaggaguucugugauaugcucaggcuguuugacuucaacaagcaggcgauccggcgccuuaaaacacccgcacagaugucuauucagcugaucaauaaggccguaaacgcuuugauaaaugaucaacucauuaugaaaaaccaucugcgagacaucaugugcaucccauacugcaauuauuccagauacugguauuuaaaccacaccagcacggggaagaccucgcugcccaggugcuggcuaauuucuaauggauccuaccucaacgaaacaaaguucucagacgauaucgagcagcaggccgacaauaugauuacugagaugcugcaaaaagaauacauagaucggcaggguaagaccccucuuggcuugguugaccuguuuguguucaguacuagcuuuuaucucaucuccauuuuccugcaccuugucaaaaucccaacacaccgucauaucguggggaagcccuguccuaaaccacaccgccugaaccauaugggaauuugcucuuguggcuuguacaagcagccgggugugcccgucagauggaaaaggugaggacuaguuauaagacugacuagcccgaugggccucccaacgggcccuccuccccuccuugcaccgagauuaauaaaaaaaaaaaaaaaaaaaaaaaaaaaaaaaaaaaaaaaaaaaaaaaaaaaaaaaaaaaaaaaaugcaucccccccccccccccccccccccccccccccaaaggcucuuuucagagccaccagaauu

SEQ ID NO: 7391 - RNA, 1693 nt, Artificial Sequence
  mRNA product Design i-3 comprising derived and/or modified sequence from LASV(AV;Clade V)__CCA30314__GPCstabilized (opt3)
gggagaaagcuuaccaugggccagaucgugaccuucuuucaagaggucccccacguuauugaagaggugaugaacauaguacugaucgcccucagcauucuugcugugcugaagggguuguacaauaucgcaacaugcggauuaauuggucugaucacuuuccuacuccuguguggcagauccugcagcucaaaccuuuauaaaggggucuacgaacugcagaguuuggaccucaauauggagacgcugaacaugaccaugccucugagcuguacaaagaauaacucccaucacuauauaagggugggaaaugauacuggccucgaauuaacccugacaaacaccucuauccuuaaucauaaauuuugcaacuugucggacgcccacaagaaagaucuguacgaccaugcgcuaaugucaauuaucagcacuuuccaccucaguauuccaaauuuuaaccaguaugaggcuauguccugugauuucaauggugggaagaucucuguucaguacaaccugagccacuccuaugccauagacgcagccaaucauugcggaacaguggcuaacggcauucuucaaaccuuuaugcggauggcauggggcgggucauacaucgcccuggauaguggaugcgguaacugggacuguauuaugacgagcuaccaguauuugaucauccagaauacuaccugggagaaccacugccaguucucucgaccgucccccauuggcuaccucgggcuguuaucacaacguacaagagauauauauaucagcaggcggcgccggggaacuuuuaccuggacacuuagugacucugaaggcaaugcuaccccugguggguacugucugacgcgcuggauguugauugaggccgaacuaaagugcuucggaaacacugcggucgcaaaauguaaugagaagcaugaugaggaauuuugcgacaugcugagacucuucgauuuuaacaaacaggccaucuccaggcugaagucucccgcucagaugucgauacagcuuauuaauaaagccgugaacgcacugaucaaugaccaauugaucaugaagaaccaccuccgggacauuaugugcaucccauauugcaauuacucuaaguauugguaccugaaccacacaauuaccggcaaaacuuccuuacccaaguguuggcugguaucaaaugggaguuaccuaaacgaaacacauuucagcgaugacauagagcagcaggcugauaauaugaucaccgaaaugcuccaaaaagaguauauggagcgccagggaaagacgccucugggucuuguugacuuguucguguuuuccaccucuuucuaccugauuagcaucuuucuccgacuggucaaaaucccaacacacagacauauugugggcaagcccugcccuaaaccacacaggcuuaaccauauggggauauguucaugcggacuguauaagcagccgggcgugcccguccgguggaagcguugaggacuaguuauaagacugacuagcccgaugggccucccaacgggcccuccuccccuccuugcaccgagauuaauaaaaaaaaaaaaaaaaaaaaaaaaaaaaaaaaaaaaaaaaaaaaaaaaaaaaaaaaaaaaaaaaugcaucccccccccccccccccccccccccccccccaaaggcucuuuucagagccaccagaauu

SEQ ID NO: 7392 - RNA, 1690 nt, Artificial Sequence
  mRNA product Design i-3 comprising derived and/or modified sequence from LASV(Togo/2016/7082;Clade VI)__AMR44577__GPCstabilized (opt3)
gggagaaagcuuaccaugggccagaucauuaccuucuuucaagaggugccccacgucauagaagagguuaugaacaucgugcugauugcccucagccuucuggcuaucuugaaggggguauacaauguggcaacaugcggaauuaucgguuuagucacuuuccuguuucuauguggcagauccugcucucucauauauaaagggucauacgaacugcagacgcuugagcugaacauggaaaccuugaauaugacaaugccucucaguuguacuaagaacagcucccaucacuauaucagggugggaaaugagaccggccuggagcugacacucaccaacacuucuauuaucaaucauaaauucugcaacuuaucggacgcccacaagcggaaucuguacgaucaugcgcuuaugucaauuuugagcacauuucaccugaguaucccaaacuucaaucaguaugaagcuauguccugugacuuuaacggugggaaaauaucuguucaguacaaucuaagccacgccuaugcaguggaugccgcugagcauugcggaaccgucgcaaacggcgugcuccaaacguucaugcgcauggccuggggcggguccuacauugcucuggacucaggaugcgguaauugggauuguaucaugaccaguuaccaguaucuuauuauccagaacacuacaugggaagaccacugccaguuuagccguccgucucccaucggcuaccugggguugcucucccaaagaacuagggauauuuauauaucacggcgccgccggggaaccuucacauggacccugagcgacagugagggcaacgagacgccugguggguacugucucacuagauggaugcuuaucgaagccgagcugaagugcuuuggaaauacagcgguagcaaaguguaacgaaaaacaugaugaggaguucugcgacauguugaggcuauuugauuucaauaagcaggccauucagcggcugaaaucucccgcucagauguccauccaacucauaaacaaggccguuaaugcacugauuaacgaccagcuuaucaugaaaaaucaucugcgcgauaugaugugcaucccauauugcaacuacagcaaguauugguacuugaaucacaccucgucuggccgaacuucccuccccaaguguuggcuggugucaaacgggaguuacuuaaaugagacacacuucagcgacgacauugaacagcaagcugauaacaugaucaccgagaugcugcagaaagaauauauugacagacagggaaagacgccucuaggucucgucgaucuguuuguguucuccaccucuuuuuaccuuauaagcaucuucuugcaccugauuaaaaucccaacacauaggcacaucgugggcaagcccugcccuaaaccacaucggcucaaucacauggggauuuguucaugcggacuguauaagcagccgggcguccccacucguuggaaacgcugaggacuaguuauaagacugacuagcccgaugggccucccaacgggcccuccuccccuccuugcaccgagauuaauaaaaaaaaaaaaaaaaaaaaaaaaaaaaaaaaaaaaaaaaaaaaaaaaaaaaaaaaaaaaaaaaugcaucccccccccccccccccccccccccccccccaaaggcucuuuucagagccaccagaauu

SEQ ID NO: 7393 - RNA, 1690 nt, Artificial Sequence
  mRNA product Design i-3 comprising derived and/or modified sequence from LASV(KAK-428;Clade n.d. (VII))__ANH09740__GPCstabilized (opt3)
gggagaaagcuuaccaugggccagaucgugaccuucuuucaagaggucccccacguuauugaagaggugaugaacauaguacugaucgcccucagccuucuggcuauuuugaagggguuauacaauuucgcaacaugcggagugaucggucugauuacuuuucuacuccuguguggcagauccugcucugccacguauaaagggcaguacgaacuucagacccuggaguugaacauggaaucacucaauaugacaaugccucugaguuguacuaagaacaauagccaucacuauaucagggcgggaaacaauaccggccuggagcucacauuaaccaacacuuccauaaucucucauaaauucugcaaucugucggacgcucacaagaaaaaccuuuacgaucauacauugaugucaauuaucaccacguuucaccugagcauuccaaauuucaaccaguaugaggccaugaguugugacuuuaauggugggaagaucuccauacaauacaaccuaucucacagcuaugcaggagaugccgcucagcauugcggcacugucgcaaauggcgugcuccagaccuucaugcggauggccuggggaggguccuaccuggcucuugacucagguugccgaggcugggauuguauuaucaguagcuaccaguaucugauuauccaaaacacaacuugggacgaucacugccaguuuucucguccgucccccaucggguacuugggauucguuucacagaagaccagagacauuuauauaagcaggcggcgccggggcacauuuaccuggacguuaagugauucugaaggucaugacaugccugggggauacugucugacucgcuggaugcucaucgaggccgaucuuaaaugcuucggcaacacagcgguggcaaaguguaaugaaaaacacgacgaggaguuuugcgauauguggagacuguucgacuucaacaagcaggccauucaaagguugaaagcucccgcccagaugaauauccagcuaauaaacaaggcagucaaugcucugauuaacgaccaacucaugaugaagaaucaucugcgggauaucaugugcaucccauauugcaacuacuccaaauuuugguaucuuaauaacaccacuacagggcgcaccagccugccccgauguugguugauuucgaauggaucuuaccucaacgagacgcacuucuccgacgauaucgaacagcaggccgacaauaugauuaccgagaugcugcagaaggaauacauggauagacaagguaaaacaccuuuaggccugguggaccuauuuguauucucaaccaguuuuuaucucauaacuaucuuccugcaccuuguuaagauuccaacacauaggcacaucguggggaaacccugcccuaagccacaucgguugaaccacaugggaaucuguagcugcggccuguacaaacagccggguguccccgugcguuggaagcgcugaggacuaguuauaagacugacuagcccgaugggccucccaacgggcccuccuccccuccuugcaccgagauuaauaaaaaaaaaaaaaaaaaaaaaaaaaaaaaaaaaaaaaaaaaaaaaaaaaaaaaaaaaaaaaaaaugcaucccccccccccccccccccccccccccccccaaaggcucuuuucagagccaccagaauu

SEQ ID NO: 7394 - RNA, 1690 nt, Artificial Sequence; identical to SEQ ID NO: 7388
  mRNA product Design i-3 comprising derived and/or modified sequence from LASV(Pinneo-NIG-1969;Clade I)__AIT17836__GPCstabilized (opt3)

SEQ ID NO: 7395 - RNA, 1690 nt, Artificial Sequence
  mRNA product Design i-3 comprising derived and/or modified sequence from LASV(ISTH0009-NIG-2011;Clade II)__AIT17404__GPCstabilized (opt3)
gggagaaagcuuaccaugggccagaucauuaccuucuuucaagaggugccccacgucauagaagagguuaugaacaucgugcugauugcccucagccuucuggcuaucuugaaggggauuuacaauguagcaacaugcggauuauucggucugguguccuuucuacuccuguguggcagaucuugcucaacuacguauaaaggggucuacgaacuucagacccuggaguuggacauggccagucucaacaugacaaugccucugagcuguacuaagaauaacucccaucacuauaucauggugggaaaugaaaccggccuggagcucacauuaaccaacacuucuauaaucaaucauaaauucugcaaccugucggaugcgcacaagaaaaaucuuuacgaccaugcuuugaugucaauuaucagcacauuucaccugaguauuccaaacuucaaucaguaugaggccauguccugugauuuuaacggugggaagaucucuguucaguacaaucuaagccacgcauaugccguggacgcugcaaaccauugcggaaccauagccaauggcguccuccaaacguucaugaggauggcuuggggcggguccuacauugcccuggauucaggaugcgguaguugggacuguaucaugacuagcuaccaguaucuuauuauccagaacaccacaugggaagaucacugccaguuuucucggccgucccccaucggcuaccugggguugcucucacaacgcacucgagacauuuauauaagccguagacgccggggaaccuucacauggacccugagugauucugagggcaacgaaacgccugguggguacugucucacuagguggaugcuuaucgaggcggagcugaaaugcuuuggaaauacagcaguggccaaguguaacgaaaaacaugacgaggaguucugcgauauguugcggcuauuugacuucaauaagcaggcuauucgcagacugaaaacccccgcccagauguccauccagcucauaaacaaggcaguaaaugcucugauuaacgaucaacuuaucaugaagaaucaccugagggacaucaugugcauuccauauugcaacuacagcaaauauugguacuugaaucacacuguuacaggcaagaccucgcucccccgguguuggcuggugucuaacggguccuacuuaaaugaaacgcauuucucagacgauaucgagcagcaggccgacaacaugauuaccgagcugcuacaaaaagaauauauggaucgccagggaaagacaccucucggucuggucgaccuuuuuguguucaguacuagcuuuuacuugauauccaucuuccugcaccucauuaaaaucccaacccaucgacacaucacaggcaagcccugcccuaaaccacauagacugaaucacauggggauuuguucuugcggacuuuauaagcacccgggcgugcccgucaaguggaaaaggugaggacuaguuauaagacugacuagcccgaugggccucccaacgggcccuccuccccuccuugcaccgagauuaauaaaaaaaaaaaaaaaaaaaaaaaaaaaaaaaaaaaaaaaaaaaaaaaaaaaaaaaaaaaaaaaaugcaucccccccccccccccccccccccccccccccaaaggcucuuuucagagccaccagaauu

SEQ ID NO: 7396 - RNA, 1690 nt, Artificial Sequence
  mRNA product Design i-3 comprising derived and/or modified sequence from LASV(ISTH2010-NIG-2012;Clade II)__AIT17482__GPCstabilized (opt3)
gggagaaagcuuaccaugggccagaucauuaccuucuuucaagaggugccccacgucauagaagagguuaugaacaucgugcugauugcccucagccuucuggcuaucuugaaggggauuuacaauguagcaacaugcggauuauucggucugguguccuuucuacuccuguguggcagaucuugcucaacuacguauaaaggggucuacgaacuucagacccuggaguuggacauggccagucucaacaugacaaugccucugagcuguacuaagaauaacucccaucacuauaucauggugggaaaugaaaccggccuggagcucacauuaaccaacacuucuauaaucaaucauaaauucugcaaccugucggaugcgcacaagaaaaaucuuuacgaccaugcuuugaugucaauuaucagcacauuucaccugaguauuccaaacuucaaucaguaugaggccauguccugugauuuuaacggugggaagaucucuguucaguacaaucuaagccacgcauaugccguggacgcugcaaaccauugcggaaccauagccaauggcguccuccaaacguucaugaggauggcuuggggcggguccuacauugcccuggauucaggaugcgguaguugggacuguaucaugacuagcuaccaguaucuuauuauccagaacaucaccugggaagaucacugccaguuuucucggccgucccccauuggcuaccugggguugcucucacaacgcacacgagacauauauaucagccguagacgccggggaacuuucaccuggacacugagugauucugagggcaacgaaaccccugguggguacugucucacgagguggaugcuuauugaggcggagcugaaaugcuuuggaaauacugcaguggccaaguguaacgaaaaacaugacgaggaguucugcgauauguugcggcuauuugacuucaauaagcaggcuauccgcagacugaaaacacccgcccagauguccauacagcucauuaacaaggcaguaaaugcucugaucaacgaucaacuuaucaugaagaaucaccugagggacauuaugugcaucccauauugcaacuacagcaaauauugguacuugaaucacaccguuacuggcaagacaucgcucccccgguguuggcuggugucuaacggguccuacuuaaaugaaacccauuucucagacgauauugagcagcaggccgacaacaugauaacggagcugcuacaaaaagaauauaucgaucgccagggaaagaccccucucggucuggucgaccuuuuuguguucaguacuagcuuuuacuugauuuccaucuuccugcaccucgugaaaaucccaacacaucgacacgucguuggcaagcccugcccuaaaccacauagacugaaucacauggggauuuguucuugcggacuuuauaagcacccgggcgugcccguaaaguggaaaaggugaggacuaguuauaagacugacuagcccgaugggccucccaacgggcccuccuccccuccuugcaccgagauuaauaaaaaaaaaaaaaaaaaaaaaaaaaaaaaaaaaaaaaaaaaaaaaaaaaaaaaaaaaaaaaaaaugcaucccccccccccccccccccccccccccccccaaaggcucuuuucagagccaccagaauu

SEQ ID NO: 7397 - RNA, 1690 nt, Artificial Sequence
  mRNA product Design i-3 comprising derived and/or modified sequence from LASV(Lassa virus/H.sapiens-wt/NGA/2015/ISTH_0543;Clade II)__AVO03639__GPCstabilized (opt3)
gggagaaagcuuaccaugggccagaucauuaccuucuuucaagaggugccccacgucauagaagagguuaugaacaucgugcugauugcccucagccuucuggcuaucuugaaggggauuuacaauguagcaacaugcggauuauucggucugguguccuuucuacuccuguguggcagaucuugcucaacuacguauaaaggggucuacgaacuucagacccuggaguuggacauggccaaccucaauaugacaaugccucugaguuguacuaagaacaauagccaucacuauaucauggugggaaacgaaaccggccuggagcucacauuaaccaauacuuccauaaucaaccauaaauucugcaaucugucugaugcgcacaagaaaaaccuuuacgaccaugcuuugaugucgauuaucucaacauuucaccugagcauuccaaauuucaaccaguaugaggccaugaguugugauuuuaauggugggaagaucuccguucaguacaaccuaucucacaccuaugcaguggacgccgcuaaucauugcggaacgauagcaaacggcguccuccaaacuuucaugaggauggccuggggcgggagcuacauugcucuggauuccggaugcgguucaugggacuguaucaugaccaguuaccaguaucuugugauucagaacacaacuugggaagaucacugccaguuuagccggccgucucccaucggcuaccugggguugcucucccaacgcacccgagacaucuauauuucacguagacgccggggaacauucaccuggacgcugagcgauagugagggcaaugaaacuccugguggguacugucucacaagguggaugcuuauagaggccgagcugaaaugcuuuggaaacaccgcgguagcaaaguguaaugaaaaacaugacgaggaguucugcgauauguugcggcuauuugacuucaacaagcaggccauccgcagacugaaaacucccgcucagaugucuauucagcucaucaauaaggccguuaacgcacugauaaaugaucaacuuauuaugaagaaccaccugagggacaucaugugcaucccauauugcaauuacuccaaauauugguacuugaaccacacagugaccggcaagacgagccucccccgguguuggcuggucucgaaugggucuuacuuaaacgaaacccauuucuccgacgauauugagcagcaggcugacaauaugaucacagagcugcuacaaaaagaauauauugaucgccagggaaagacuccucucggucugguggaccuuuuuguguucucaaccaguuuuuacuugauaagcaucuuccugcaccucgucaaaauuccaacacaucgacacaucacuggcaagcccugcccuaaaccacauagacugaaccacauggggaucuguuccugcggacuuuauaagcacccgggcguucccgugaaguggaaaaggugaggacuaguuauaagacugacuagcccgaugggccucccaacgggcccuccuccccuccuugcaccgagauuaauaaaaaaaaaaaaaaaaaaaaaaaaaaaaaaaaaaaaaaaaaaaaaaaaaaaaaaaaaaaaaaaaugcaucccccccccccccccccccccccccccccccaaaggcucuuuucagagccaccagaauu

SEQ ID NO: 7398 - RNA, 1690 nt, Artificial Sequence
  mRNA product Design i-3 comprising derived and/or modified sequence from LASV(Lassa virus/H.sapiens-wt/NGA/2016/ISTH_0009;Clade II)__AVO03571__GPCstabilized (opt3)
gggagaaagcuuaccaugggccagaucauuaccuucuuucaagaggugccccacgucauagaagagguuaugaacaucgugcugauugcccucagccuucuggcuaucuugaaggggauuuacaauguagcaacaugcggauuacugggucuaguguccuuccuccugcuuuguggcagaucuugcucaacuacguauaaaggggucuacgaacugcagaccuuggagcucgacauggccagucugaacaugacaaugccucugagcuguacuaagaauaacucccaucacuauaucauggugggaaaugaaaccggccucgaguuaacacugaccaacacuucuauaaucaaucauaaauuuugcaaccuuucggaugcgcacaagaaaaauuuguacgaccaugcucugaugucaauuaucagcacauuccaccuaaguauuccaaacuuuaaucaguaugaggccauguccugugauuucaacggugggaggaucucuguucaguacaaucucagccacuccuaugcaguggacgccgcuaaccauugcggaaccauagcaaauggcguccugcaaacguuuaugcggauggccuggggcgggucauacauugcucuugauaguggaugcgguagcugggacuguaucaugacuucuuaccaguaucugauuauccagaacaccacaugggaagaucacugccaguucucccgcccgucacccaucggcuacuuggggcuccugagccaacgaacucgugacauuuauauaaguagaaggcgccggggaaccuuuacauggacccucucugauuccgagggcaacgaaacgccugguggguacugucuuacucgguggaugcugaucgaggccgaguugaagugcuucggaaauacagcgguggcaaaauguaacgaaaagcaugacgaggaauuuugcgauaugcuacgccuguucgacuuuaauaaacaggccauuagaaggcucaagacccccgcucagaugagcauccagcugauaaacaaagccguaaaugcacuuauuaacgaucaacugaucaugaagaaucacuugcgggacaucaugugcauuccauauugcaacuacucgaaguauugguaccucaaucacacuguuacaggcaaaaccucucugccccgcuguugguuaguguccaacgggucauaccugaaugaaacgcauuucagugacgauaucgagcagcaggcugacaacaugauuaccgagcuacuccaaaaggaauauauagaucgacagggaaaaacaccucugggucuugucgacuuguucguguuuagcacuuccuucuaccugaucucuauuuuucuccaccuggugaagaucccaacccauagacacaucacaggcaaacccugcccuaagccacauaggcuuaaucacauggggauuuguagcugcggacuguauaaccacccgggcguccccguuaaauggaagcggugaggacuaguuauaagacugacuagcccgaugggccucccaacgggcccuccuccccuccuugcaccgagauuaauaaaaaaaaaaaaaaaaaaaaaaaaaaaaaaaaaaaaaaaaaaaaaaaaaaaaaaaaaaaaaaaaugcaucccccccccccccccccccccccccccccccaaaggcucuuuucagagccaccagaauu

SEQ ID NO: 7399 - RNA, 1690 nt, Artificial Sequence
  mRNA product Design i-3 comprising derived and/or modified sequence from LASV(Lassa virus/H.sapiens-wt/NGA/2016/ISTH_0017;Clade II)__AVO03567__GPCstabilized (opt3)
gggagaaagcuuaccaugggccagaucauuaccuucuuucaagaggugccccacgucauagaagagguuaugaacaucgugcugauugcccucagccuucuggcuaucuugaaggggauuuacaauguagcaacaugcggauuauucggucugguguccuuucuacuccuguguggcagaucuugcucaacuacguauaaaggggucuacgaacuucagacccuggaguuggacauggccagucucaacaugacaaugccucugagcuguacuaagaauaacucccaucacuauaucauggugggaaaugaaaccggccuggagcucacauuaaccaacacuucuauaaucaaucauaaauucugcaaccugucggaugcgcacaagaaaaaucuuuacgaccaugcuuugaugucaauuaucagcacauuucaccugaguauuccaaacuucaaucaguaugaggccauguccugugauuuuaacggugggaagaucucuguucaguacaaucuaagccacaccuaugcaauagacgccgcuaaccauugcggaacgauugcaaauggcgugcuccaaacuuucaugaggauggccuggggcggguccuacaucgcucuggauucaggaugcgguaguugggacuguauuaugaccagcuaccaguaucuuaucauccagaacacaacuugggaagaucacugccaguuuucucggccgucccccauuggcuaccugggguugcucucacaacgcacccgagacauauauaucagccguagacgccggggaacauucaccuggacgcugagugauucugagggcaacgaaacuccugguggguacugucucacaagguggaugcuuauugaggccgagcugaaaugcuuuggaaauaccgcggucgcaaaguguaacgaaaaacaugacgaggaguucugcgauauguugcggcuauuugacuucaauaagcaggccauccgcagacugaaaacucccgcucagauguccauacagcucauuaacaaggccgugaaugcacugaucaacgaucaacuuaucaugaagaaucaccugagggacauuaugugcaucccauauugcaacuacagcaaauauugguacuugaaucacacaguaaccggcaagacgucgcucccccgguguuggcugguuucuaacggguccuacuuaaaugaaacccauuucucagacgauauugagcagcaggcugacaacaugauaacagagcugcuacaaaaagaauauauggaucgccagggaaagacuccucucggucugguggaccuuuuugucuucaguaccagcuuuuacuugaucuccauuuuccugcaccucgugcgaaucccaacacauagacacgugaucggcaaacccugcccuaagccacauaggcugaaucacauggggauuuguucuugcggacuuuauaaacacccgggcguccccguuaaguggaagcggugaggacuaguuauaagacugacuagcccgaugggccucccaacgggcccuccuccccuccuugcaccgagauuaauaaaaaaaaaaaaaaaaaaaaaaaaaaaaaaaaaaaaaaaaaaaaaaaaaaaaaaaaaaaaaaaaugcaucccccccccccccccccccccccccccccccaaaggcucuuuucagagccaccagaauu

SEQ ID NO: 7400 - RNA, 1690 nt, Artificial Sequence
  mRNA product Design i-3 comprising derived and/or modified sequence from LASV(Lassa virus/H.sapiens-wt/NGA/2018/ISTH_0959;Clade II)__AVV65099__GPCstabilized (opt3)
gggagaaagcuuaccaugggccagaucauuaccuucuuucaagaggugccccacgucauagaagagguuaugaacaucgugcugauugcccucagccuucuggcuaucuugaaggggauuuacaauguagugacaugcggauuauucggucuggucuccuuucuacuccuguguggcagaucuugcucaacuacguauaaagggguguacgaacuucagacccuggaguuggacauggcaagucucaacaugacaaugccucugagcuguacuaagaauaacucccaucacuauaucaugguuggaaaugaaaccggccuggagcucacauuaaccaacacuucuauaaucaaucauaaauucugcaaccugucggaugcccacaagaaaaaucuuuacgaccaugcguugaugucaauuaucagcacauuucaccugaguauuccaaacuucaaucaguaugaggcuauguccugugauuuuaacggugggaagaucucugugcaguacaaucuaagccacgccuaugcaauagacgccgcuaaccauugcggaaccauugcaaauggcguccuccaaacguucaugaggauggccuggggcggguccuacaucgcucuggauucaggaugcgguaguugggacuguauuaugacuagcuaccaguaucuuaucauccagaacaccacaugggaagaucacugccaguuuucucggccgucccccauuggcuaccugggguugcucucacaacgcacucgagacauauauaucagccguagacgccggggaaccuucacauggacccugagugauucugagggcaacgaaacgccugguggguacugucucacuagguggaugcuuauugaggccgagcugaaaugcuuuggaaauacagcgguggcaaaguguaacgaaaaacaugacgaggaguucugcgauauguugcggcuauuugacuucaauaagcaggccauccgcagacugaaaacccccgcucagauguccauacagcucauuaacaaggccguaaaugcacugaucaacgaucaacuuaucaugaagaaucaccugagggacauuaugugcaucccauauugcaacuacagcaaauauugguacuugaaucacacuguuacaggcaagaccucgcucccccgguguuggcuggugucuaacggguccuacuuaaaugaaacgcauuucucagacgauauugagcagcaggcugacaacaugauaaccgagcugcuacaaaaagaauauaucgaucgccagggaaagacaccucucggucuggucgaccuuuuuguguucaguacuagcuuuuacuugauuuccaucuuccugcaccucgugaaaaucccaacccaucgacacgucauuggcaagcccugcccuaaaccacauagacugaaucacauggggauauguucuugcggacuuuauaagcacccgggcguucccgugaaguggaaaaggugaggacuaguuauaagacugacuagcccgaugggccucccaacgggcccuccuccccuccuugcaccgagauuaauaaaaaaaaaaaaaaaaaaaaaaaaaaaaaaaaaaaaaaaaaaaaaaaaaaaaaaaaaaaaaaaaugcaucccccccccccccccccccccccccccccccaaaggcucuuuucagagccaccagaauu

SEQ ID NO: 7401 - RNA, 1690 nt, Artificial Sequence
  mRNA product Design i-3 comprising derived and/or modified sequence from LASV(LASV003-NIG-2008;Clade II)__AIT17580__GPCstabilized (opt3)
gggagaaagcuuaccaugggccagaucauuaccuucuuucaagaggugccccacgucauagaagagguuaugaacaucgugcugauugcccucagccuucuggcuaucuugaaggggauuuacaauguagcaacaugcggauuauucggucugguguccuuucuacuccuguguggcagaucuugcucaacuacguauaaaggggucuacgaacuucagacccuggaguuggacauggccagucucaacaugacaaugccucugagcuguacuaagaauaacucccaucacuauaucauggugggaaaugaaaccggccuggagcucacauuaaccaacacuucuauaaucaaucauaaauucugcaaccugucggaugcgcacaagaaaaaucuuuacgaccaugcuuugaugucaauuaucagcacauuucaccugaguauuccaaacuucaaucaguaugaggccauguccugugauuuuaacggugggaagaucucuguucaguacaaucuaagccacaccuaugcaguggacgccgcuaaccauugcggaacgauagcaaauggcguccuccaaacuuucaugaggauggccuggggcggguccuacauugcucuggauucaggaugcgguaguugggacuguaucaugaccagcuaccaguaucuuauuauccagaacacaacuugggaagaucacugccaguuuucucggccgucccccaucggcuaccugggguugcucucacaacgcacccgagacauuuauauaagccguagacgccggggaacauucaccuggacgcugagugauucugaguccaacgaaacuccuggcgguuacugucucacaagguggaugcuuaucgaggccgagcugaaaugcuuugggaauaccgcgguggcaaaguguaacgaaaaacaugacgaggaguucugcgauauguugcggcuauuugacuucaauaagcaggccauucgcagacugaaagcucccgcccagaugagcauccagcucauaaacaaggcaguaaaugcucugauuaacgaucaacuuaucaugaagaaucaccugagggacaucaugugcauuccauauugcaacuacucgaaauauugguacuugaaucacacuguuacaggacggaccucucucccccgcuguuggcugguguccaacggcucauacuuaaaugaaacgcauuucagugacgauaucgagcagcaggccgacaacaugauuaccgagcugcuacaaaaggaauauauggaucgacaggggaaaacaccucucggacuggucgaccuuuuuguguucagcacuuccuuuuacuugauaucuaucuuccugcaccucgugaagauuccaacccauagacacgucaucgguaaacccugcccuaagccacauaggcugaaucacaugggcaucuguagcugcgggcuuuauaaacacccgggaguucccgugaaguggaagcggugaggacuaguuauaagacugacuagcccgaugggccucccaacgggcccuccuccccuccuugcaccgagauuaauaaaaaaaaaaaaaaaaaaaaaaaaaaaaaaaaaaaaaaaaaaaaaaaaaaaaaaaaaaaaaaaaugcaucccccccccccccccccccccccccccccccaaaggcucuuuucagagccaccagaauu

SEQ ID NO: 7402 - RNA, 1690 nt, Artificial Sequence
  mRNA product Design i-3 comprising derived and/or modified sequence from LASV(LASV035-NIG-2009;Clade II)__AIT17588__GPCstabilized (opt3)
gggagaaagcuuaccaugggccagaucauuaccuucuuucaagaggugccccacgucauagaagagguuaugaacaucgugcugauugcccucagccuucuggcuaucuugaaggggauuuacaauguagcaacaugcggauuauucggucugguguccuuucuacuccuguguggcagaucuugcucaacuacguauaaaggggucuacgaacuucagacccuggaguuggacauggccagucucaacaugacaaugccucugagcuguacuaagaauaacucccaucacuauaucauggugggaaaugaaaccggccuggagcucacauuaaccaacacuucuauaaucaaucauaaauucugcaaccugucggaugcgcacaagaaaaaucuuuacgaccaugcuuugaugucaauuaucagcacauuucaccugaguauuccaaacuucaaucaguaugaggccauguccugugauuuuaacggugggaagaucucuguucaguacaaucuaagccacgcauaugccguggacgcugcaaaccauugcggaaccauagccaauggcguccuccaaacguucaugaggauggcuuggggcggguccuacauugcccuggauucaggaugcgguaguugggacuguaucaugacuagcuaccaguaucuuauuauccagaacaccacaugggaagaucacugccaguuuucucggccgucccccaucggcuaccugggguugcucucacaacgcacucgagacauuuauauaagccguagacgccggggaaccuucacauggacccugagugauucugagggcaacgaaacgccugguggguacugucucacuagguggaugcuuaucgaggcggagcugaaaugcuuuggaaauacagcaguggccaaguguaacgaaaaacaugacgaggaguucugcgauauguugcggcuauuugacuucaauaagcaggcuauucgcagacugaaagcccccgcacagauguccauccagcucauaaacaaggcuguaaaugcccugauuaacgaucaacuuaucaugaagaaucaccugagggacaucaugugcauuccauauugcaacuacagcaaauauugguacuugaaucacaccguuacuggcaagacaucgcucccccgguguuggcuggugucuaacggguccuacuuaaaugaaacccauuucucagacgauaucgagcagcaggcggacaacaugauuacggagcugcuacaaaaagaauauauagaucgccagggaaagaccccucucggucuggucgaccuuuuuguguucaguacuagcuuuuacuugaucuccauuuuccugcaccucgugaaaaucccaacacaucgacacgucaucggcaagcccugcccuaaaccacauagacugaaucacauggggauuuguucuugcggacuuuauaagcacccgggcguucccgugaaguggaaaaggugaggacuaguuauaagacugacuagcccgaugggccucccaacgggcccuccuccccuccuugcaccgagauuaauaaaaaaaaaaaaaaaaaaaaaaaaaaaaaaaaaaaaaaaaaaaaaaaaaaaaaaaaaaaaaaaaugcaucccccccccccccccccccccccccccccccaaaggcucuuuucagagccaccagaauu

SEQ ID NO: 7403 - RNA, 1690 nt, Artificial Sequence
  mRNA product Design i-3 comprising derived and/or modified sequence from LASV(LASV1000-NIG-2009;Clade II)__AIT17782__GPCstabilized (opt3)
gggagaaagcuuaccaugggccagaucauuaccuucuuucaagaggugccccacgucauagaagagguuaugaacaucgugcugauugcccucagccuucuggcuaucuugaaggggauuuacaauguagcaacaugcggauuauucggucugguguccuuucuacuccuguguggcagaucuugcucaacuacguauaaaggggucuacgaacuucagacccuggaguuggacauggccagucucaacaugacaaugccucugagcuguacuaagaauaacucccaucacuauaucauggugggaaaugaaaccggccuggagcucacauuaaccaacacuucuauaaucaaucauaaauucugcaaccugucggaugcgcacaagaaaaaucuuuacgaccaugcuuugaugucaauuaucagcacauuucaccugaguauuccaaacuucaaucaguaugaggccauguccugugauuuuaacggugggaagaucucuguucaguacaaucuaagccacaccuaugcaguggacgccgcuaaccauugcggaacgauagcaaauggcguccuccaaacuuucaugaggauggccuggggcggguccuacauugcucuggauucaggaugcgguaguugggacuguaucaugaccagcuaccaguaucuuauuauccagaacacaacuugggaagaucacugccaguuuucucggccgucccccaucggcuaccugggguugcucucacaacgcacccgagacauuuauauaagccguagacgccggggaacauucaccuggacgcugagugauucugagggcaacgaaacuccugguggguacugucucacaagguggaugcuuaucgaggccgagcugaaaugcuuuggaaauaccgcgguggcaaaguguaacgaaaaacaugacgaggaguucugcgauauguugcggcuauuugacuucaauaagcaggccauuaaacgccugaagacucccgcucagauguccauccagcucauaaacaaggccguaaaugcacugauuaacgaucaacuuaucaugaaaaaucaccugagagacaucaugugcauuccauauugcaacuacagcaaguauugguacuugaaucacacaguuaccggcaaaacgucgcuccccagguguuggcuggugucuaacggguccuacuuaaaugaaacccauuucucagacgauaucgagcagcaggcugacaacaugauuacagagcugcuacaaaaggaauauauagaucggcagggaaaaacuccucucggucuggucgaccuuuuuguguucaguaccagcuuuuacuugaucuccauuuuccugcaccucgugaagaucccaacacaucgccacgucguuggcaaacccugcccuaagccacaucgacugaaucacauggggaucuguucuugcggacuuuauaagcacccgggcgugcccguaaaauggaagagaugaggacuaguuauaagacugacuagcccgaugggccucccaacgggcccuccuccccuccuugcaccgagauuaauaaaaaaaaaaaaaaaaaaaaaaaaaaaaaaaaaaaaaaaaaaaaaaaaaaaaaaaaaaaaaaaaugcaucccccccccccccccccccccccccccccccaaaggcucuuuucagagccaccagaauu

SEQ ID NO: 7404 - RNA, 1690 nt, Artificial Sequence
  mRNA product Design i-3 comprising derived and/or modified sequence from LASV(LASV221-NIG-2010;Clade II)__AIT17624__GPCstabilized (opt3)
gggagaaagcuuaccaugggccagaucauuaccuucuuucaagaggugccccacgucauagaagagguuaugaacaucgugcugauugcccucagccuucuggcuaucuugaaggggauuuacaauguagcaacaugcggauuauucggucugguguccuuucuacuccuguguggcagaucuugcucaacuacguauaaaggggucuacgaacuucagacccuggaguuggacauggccagucucaacaugacaaugccucugagcuguacuaagaauaacucccaucacuauaucauggugggaaaugaaaccggccuggagcucacauuaaccaacacuucuauaaucaaucauaaauucugcaaccugucggaugcgcacaagaaaaaucuuuacgaccaugcuuugaugucaauuaucagcacauuucaccugaguauuccaaacuucaaucaguaugaggccauguccugugauuuuaacggugggaagaucucuguucaguacaaucuaagccacaccuaugcaauagacgccgcuaaccauugcggaacgauugcaaauggcgugcuccaaacuuucaugaggauggccuggggcggguccuacaucgcucuggauucaggaugcgguaguugggacuguauuaugaccagcuaccaguaucuuaucauccagaacacaacuugggaagaucacugccaguuuucucggccgucccccauuggcuaccugggguugcucucacaacgcacccgagacauauauaucagccguagacgccggggaacauucaccuggacgcugagugauucugagggcaacgaaacuccugguggguacugucucacaagguggaugcuuauugaggccgagcugaaaugcuuuggaaauaccgcggucgcaaaguguaacgaaaaacaugacgaggaguucugcgauauguugcggcuauuugacuucaauaagcaggccauccgcagacugaaaacucccgcucagauguccauacagcucauuaacaaggccgugaaugcacugaucaacgaucaacuuaucaugaagaaucaccugagggacauuaugugcaucccauauugcaacuacagcaaauauugguacuugaaucacacaguaaccggcaagacgucgcucccccgguguuggcugguuucuaacggguccuacuuaaaugaaacccauuucucagacgauauugagcagcaggcugacaacaugauaacagagaugcugcaaaaagaauauauggaucgccagggaaagacuccucuaggucucguggaccuguuugucuucaguaccagcuuuuaccuuaucuccauuuucuugcaccuggugaaaaucccaacacaucgacacgugaucggcaagcccugcccuaaaccacauagacucaaucacauggggauuuguucuugcggacuguauaagcacccgggcguccccguuaaguggaaaaggugaggacuaguuauaagacugacuagcccgaugggccucccaacgggcccuccuccccuccuugcaccgagauuaauaaaaaaaaaaaaaaaaaaaaaaaaaaaaaaaaaaaaaaaaaaaaaaaaaaaaaaaaaaaaaaaaugcaucccccccccccccccccccccccccccccccaaaggcucuuuucagagccaccagaauu

SEQ ID NO: 7405 - RNA, 1690 nt, Artificial Sequence
  mRNA product Design i-3 comprising derived and/or modified sequence from LASV(LASV237-NIG-2010;Clade II)__AIT17638__GPCstabilized (opt3)
gggagaaagcuuaccaugggccagaucauuaccuucuuucaagaggugccccacgucauagaagagguuaugaacaucgugcugauugcccucagccuucuggcuaucuugaaggggauuuacaauguagcaacaugcggauuauucggucugguguccuuucuacuccuguguggcagaucuugcucaacuacguauaaaggggucuacgaacuucagacccuggaguuggacauggccagucucaacaugacaaugccucugagcuguacuaagaauaacucccaucacuauaucauggugggaaaugaaaccggccuggagcucacauuaaccaacacuucuauaaucaaucauaaauucugcaaccugucggaugcgcacaagaaagaccuuuacgaucaugcuuugaugucaauuaucagcacauuucaccugaguauuccaaauuucaaccaguaugaggccauguccugugacuuuaauggugggaagaucucuguucaguacaaccuaagccacaccuaugcaguggaugccgcuaaucauugcggaacgauagcaaacggcguccuccaaacuuucaugaggauggccuggggcggguccuacauugcucuggacucaggaugcgguaguugggauuguaucaugaccagcuaccaguaucuuauuauccagaauacaacuugggaagaccacugccaguuuucucggccgucccccaucggcuaccugggguugcucucacaacgcacccgagauauuuauauaagccguagacgccggggaacauucaccuggacgcugagugacucugagggcaacgaaacuccugguggguacugucucacaagguggaugcuuaucgaggccgagcugaaaugcuuuggaaacaccgcgguggcaaaguguaaugaaaaacaugaugaggaguucugcgacauguugcggcuauuugauuucaacaagcaggccauucgcagacugaaaacucccgcucagauguccauccagcucauaaauaaggccguaaacgcacugauuaaugaccaacuuaucaugaagaaccaccugagggacaucaugugcauuccauauugcaauuacagcaaauauugguacuugaaccacacaguuaccggcaagacgucgcucccccgguguuggcuggugucuaauggguccuacuuaaacgaaacccauuucucagaugacaucgagcagcaggcugauaauaugauuacagagcugcuacaaaaagaauauauggaccgccagggaaagacuccucucggucuggucgaucuuuuuguguucaguaccagcuuuuacuugauauccaucuuccugcaccucauuaaaaucccaacacaucgacacaucacuggcaagcccugcccuaaaccacauagacugaaccacauggggauuuguucuugcggacuuuauaagcacccgggcgugcccgucaaguggaaaaggugaggacuaguuauaagacugacuagcccgaugggccucccaacgggcccuccuccccuccuugcaccgagauuaauaaaaaaaaaaaaaaaaaaaaaaaaaaaaaaaaaaaaaaaaaaaaaaaaaaaaaaaaaaaaaaaaugcaucccccccccccccccccccccccccccccccaaaggcucuuuucagagccaccagaauu

SEQ ID NO: 7406 - RNA, 1690 nt, Artificial Sequence
  mRNA product Design i-3 comprising derived and/or modified sequence from LASV(LASV253-NIG-2011;Clade II)__AIT17670__GPCstabilized (opt3)
gggagaaagcuuaccaugggccagaucauuaccuucuuucaagaggugccccacgucauagaagagguuaugaacaucgugcugauugcccucagccuucuggcuaucuugaaggggauuuacaauguagcaacaugcggauuauucggucugguguccuuucuacuccuguguggcagaucuugcucaacuacguauaaaggggucuacgaacuucagacccuggaguuggacauggccagucucaacaugacaaugccucugagcuguacuaagaauaacucccaucacuauaucauggugggaaaugaaaccggccuggagcucacauuaaccaacacuucuauaaucaaucauaaauucugcaaccugucggaugcgcacaagaaaaaucuuuacgaccaugcuuugaugucaauuaucagcacauuucaccugaguauuccaaacuucaaucaguaugaggccauguccugugauuuuaacggugggaagaucucuguucaguacaaucuaagccacaccuaugcaguggacgccgcuaaccauugcggaacgauagcaaauggcguccuccaaacuuucaugaggauggccuggggcggguccuacauugcucuggauucaggaugcgguaguugggacuguaucaugaccagcuaccaguaucuuauuauccagaacacaacuugggaagaucacugccaguuuucucggccgucccccaucggcuaccugggguugcucucacaacgcacccgagacauuuauauaagccguagacgccggggaacauucaccuggacgcugagugauucugagggcaacgaaacuccugguggguacugucucacaagguggaugcuuaucgaggccgagcugaaaugcuuuggaaauaccgcgguggcaaaguguaacgaaaaacaugacgaggaguucugcgauauguugcggcuauuugacuucaauaagcaggccauucgcagacugaaagcucccgcccagauguccauccagcucauaaacaaggcaguaaaugcucugauuaacgaucaacuuaucaugaagaaucaccugagggacaucaugugcauuccauauugcaacuacagcaaauauugguacuugaaucacacuguuacaggccggaccucgcucccccgcuguuggcuggugucuaacggguccuacuuaaaugaaacgcauuucucagacgauaucgagcagcaggccgacaacaugauuaccgagcugcuacaaaaggaauauauagaucgacagggaaaaacaccucucggucuggucgaccuuuuuguguucaguacuagcuuuuacuugaucuccauuuuccugcaccucgugaagaucccaacccauagacacaucauuggcaaacccugcccuaagccacauaggcugaaucacauggggauauguucuugcggacuuuauaaacacccgggcguccccguuaaguggaagcggugaggacuaguuauaagacugacuagcccgaugggccucccaacgggcccuccuccccuccuugcaccgagauuaauaaaaaaaaaaaaaaaaaaaaaaaaaaaaaaaaaaaaaaaaaaaaaaaaaaaaaaaaaaaaaaaaugcaucccccccccccccccccccccccccccccccaaaggcucuuuucagagccaccagaauu

SEQ ID NO: 7407 - RNA, 1690 nt, Artificial Sequence
  mRNA product Design i-3 comprising derived and/or modified sequence from LASV(LASV254-NIG-2011;Clade II)__AIT17674__GPCstabilized (opt3)
gggagaaagcuuaccaugggccagaucauuaccuucuuucaagaggugccccacgucauagaagagguuaugaacaucgugcugauugcccucagccuucuggcuaucuugaaggggauuuacaauguagcaacaugcggauuauucggucugguguccuuucuacuccuguguggcagaucuugcucaacuacguauaaaggggucuacgaacuucagacccuggaguuggacaugacaaaccucaauaugacuaugccucugaguuguaccaagaacaauagccaucacuauaucauggugggaaacgaaacaggccuggagcucaccuuaacuaauacauccauaaucaaccauaaauucugcaaucugucugaugcccacaagaaaaaccuuuacaaucaugcguugaugucgauuaucucaaccuuucaccugagcauuccaaacuucaaucaguaugaggcuaugaguugugacuuuaacggugggaagaucuccguucaguacaaucuaucucacagcuaugccguggaugcagccaaccauugcggaacgauagcuaacggcguccuccaaacuuucaugaggauggcauggggcggguccuacauugcccuggacucaggaugcgguaauugggauuguaucaugaccaguuaccaguaucuuauuauccagaacacaacuugggaagaccacugccaguuuagccggccgucucccaucggcuaccugggguugcucucccaacgcacccgagauauuuauauaucacguagacgccggggaacauucaccuggacgcugagcgacagugagggcaaugaaacuccugguggguacugucucacaagguggaugcuuaucgaggcugagcugaaaugcuuuggaaacaccgccguggcgaaguguaaugaaaaacaugaugaggaguucugcgacauguugcggcuauuugauuucaacaagcaggcaauucgcagacugaaaacucccgcccaggcuaauauccagcucauaaacaaggccguaaaugcacugauuaacgaccaacuuaucaugaagaaucaccugagggauaucaugugcauuccauauugcaacuacucuaaauauugguacuugaaucacacaguuaccggcaagacgucccucccccgguguuggcuggugagcaacgggucguacuuaaaugaaacccauuucucugacgacaucgagcagcaggcugauaacaugauuacagagcugcuacaaaaagaauauauggaccgccagggaaagacuccucucggucuggucgaucuuuuuguguucuccaccucauuuuacuugauaaguaucuuccugcaccucgugaaaauuccaacacaucgacacgucaucggcaagcccugcccuaaaccacauagacugaaccacauggggaucuguagcugcggacuuuauaagcacccgggcguucccgugaaguggaaaaggugaggacuaguuauaagacugacuagcccgaugggccucccaacgggcccuccuccccuccuugcaccgagauuaauaaaaaaaaaaaaaaaaaaaaaaaaaaaaaaaaaaaaaaaaaaaaaaaaaaaaaaaaaaaaaaaaugcaucccccccccccccccccccccccccccccccaaaggcucuuuucagagccaccagaauu

SEQ ID NO: 7408 - RNA, 1690 nt, Artificial Sequence
  mRNA product Design i-3 comprising derived and/or modified sequence from LASV(Nig08-A19;Clade III)__ADU56618__GPCstabilized (opt3)
gggagaaagcuuaccaugggccagaucgugaccuucuuucaagaggucccccacguuauugaagaggugaugaacauaguacugaucgcccucagcauucuugcuauccugaagggguuguacaauauugcaacaugcggauuaaucggucuggugacuuuccuacuccuguccggcagaucuuguucaaugacguauaaaggggucuacgaacuucagacccuggaguugaacaugaauacacucaacaugacuaugccucugaguugcaccaagaauaacagccaucacuauauaauggugggaaaugaaacaggccuggagcucaccuuaacuaacacaucccugcuucaucacaaauuuuguaauuugucugacgcccauaagaaaaaccuguacgaucacacccuaaugucgaucauuucaacguuccaccucagcaucccaaauuuuaaccaguaugaggcgaugaguugcgacuucaauggugggaagauuacuguucaguacaaccugucccauucuuaugcuaucgaugccgcaaaucacuguggaaccguggccaacggcguccuucaaacauuuaugaggauggcuuggggcgggagcuacauagcacuggacuccggaugcgguaagugggauugcauuaugacuucauaccaguauuugaucauucagaacaccacaugggaagaccauugucaguucagucgcccgagccccaucggcuaccucgggcuguuaucucaacgaacccgugauaucuauauuuccagaaggcgccggggaacguuuacuuggacacuuucagacagcgagggcaaugaaaccccugguggguacugccugacucgguggauguugauagaggccgagcuaaaauguuucggaaacacagcuguggccaagugcaaugaaaaacacgaugaggaauuuugugacaugcugcgccucuucgauuuuaacaagcaggcgaucagaaggcugaaagcacccgcccagaugaguauucagcuuaucaauaaggcuguaaacgcccugauaaaugaccaauugauuaugaagaaccaccuccgggauaucaugugcaucccauauugcaauuacucuaaauauugguaccugaaccauaccuccacgggccgcaccagcuuaccccgaugcuggcugguuucgaaugggucuuaccuaaacgaaacacacuucuccgacgacauugagcagcaggcagauaauaugaucacugagaugcuccaaaaggaauaucuggacagacagggaaaaaccccucuugguuugguggaucuguucgucuuuucaacaaguuucuaccucauuagcauauuucugcaucuugugaagaucccaacucacaggcauauugugggcaaacccuguccuaagccacaccggcugaaccacauggggaucugcuccuguggauuguauaaacagccgggcguccccguucguuggaagcgcugaggacuaguuauaagacugacuagcccgaugggccucccaacgggcccuccuccccuccuugcaccgagauuaauaaaaaaaaaaaaaaaaaaaaaaaaaaaaaaaaaaaaaaaaaaaaaaaaaaaaaaaaaaaaaaaaugcaucccccccccccccccccccccccccccccccaaaggcucuuuucagagccaccagaauu

SEQ ID NO: 7409 - RNA, 1693 nt, Artificial Sequence
  mRNA product Design i-3 comprising derived and/or modified sequence from LASV(G1180-SLE-2010;Clade IV)__AIT17168__GPCstabilized (opt3)
gggagaaagcuuaccaugggccagaucgugaccuucuuucaagaggucccccacguuauugaagaggugaugaacauaguacugaucgcccucagcauucuugcugugcugaagggguuguacaauuucgcaacaugcggauuagucggucugcuaacuuuucuccugcuuuguggcagauccugcacggccucuagguauaaagggguguacgaacugcagaccuuggagcucaacauggaaacacugaauaugacuaugccucugucauguaccaagaacaauagucaucacuauaucaugguuggaaacgagacaggccucgaguuaacccugacuaauacaagcauuaucaaccauaaauucugcaaucuuuccgacgcgcacaagaaaaacuuguacgaucaugcucugaugucuauaaucucgaccuuucaccuaucaauuccaaauuucaaccaguaugaagccaugagcugugacuuuaauggugggaagaucagugugcaguacaaccucucccacucuuaugcaggagaugccgcuaaucauugcggcacggucgcaaacggcgugcugcaaacuuucaugcggauggccuggggagggagcuacauugcucuugacuccgguugcggcucaugggauuguaucaugaccaguuaccaguaucugauaauucagaacacaacuugggaggaccauugccaguuuagccgcccgucucccaucggguacuugggacuccugucccaacgaacccgugauauuuauaucucaagaaggcgccggggcacauucaccuggacgcucagcgacagugaagguaaggauacuccugggggauacugucuuacacgguggaugcugaucgaggccgaguugaaaugcuuuggcaauaccgcgguagcaaaguguaacgaaaaacacgacgaggaguucugcgauaugcuacgccuguuugacuucaauaagcaggccauucagagacucaaagcucccgcccagaugucuauacaacugaucaacaaggcaguuaaugcucuuauuaacgaucagcugaucaugaagaaucacuugagggacauaaugugcauuccauauugcaacuacuccaaauauugguaccucaaucauacuacaaccgggaagacgagccugcccaaauguugguuagugucgaacggaucuuaccugaaugaaacccacuucuccgacgauaucgagcagcaagccgacaacaugaucacagagaugcuacagaaggaauauauggagcggcaggguaaaacuccucucggccuggucgaucuuuuuguguucucaaccaguuuuuacuugauuagcaucuuccugcaucucgugaagauuccaacacaccgccauauagucgggaaauccugccccaagccucaccgacugaaucacaugggaaucuguucuugcggccuuuauaagcagccagguguuccggugaaauggaagagaugaggacuaguuauaagacugacuagcccgaugggccucccaacgggcccuccuccccuccuugcaccgagauuaauaaaaaaaaaaaaaaaaaaaaaaaaaaaaaaaaaaaaaaaaaaaaaaaaaaaaaaaaaaaaaaaaugcaucccccccccccccccccccccccccccccccaaaggcucuuuucagagccaccagaauu

SEQ ID NO: 7410 - RNA, 1693 nt, Artificial Sequence
  mRNA product Design i-3 comprising derived and/or modified sequence from LASV(G1442-SLE-2011;Clade IV)__AIT17180__GPCstabilized (opt3)
gggagaaagcuuaccaugggccagaucgugaccuucuuucaagaggucccccacguuauugaagaggugaugaacauaguacugaucgcccucagcauucuugcugugcugaagggguuguacaaugucgcaacaugcggauuaaucggucuggugacuuuccuacuccuguguggcagauccugcacgaccacacuuuauaaagggguuuacgaacugcagacuuuggagcucaacauggaaacccugaauaugacaaugccucugucuuguaccaagaacaauucacaucacuauauuagggugggaaacgagacuggccucgaguuaacacugaccaauacgaguaucauaaaccauaaauuuugcaaucuuagcgacgcccacaagaaaaacuuguacgaucaugcgcugauguccaucauuucuacuuuccaccuaucgaucccaaauuuuaaccaguaugaagcuaugucaugugacuucaauggugggaagauuagcguccaguacaaccucagucacuccuaugccggagaugcagccaaucauugcggcaccguggcuaacggcguacugcaaacauuuaugcggauggcauggggagggucuuacaucgcccuugacagcgguugcggcaacugggauuguauaaugacuuccuaccaguaucugauuauccagaauaccacaugggacgaucacugccaguucucacgaccgagucccauuggguacuugggacuccugagccaacguaccagagacguuuauaucucuaggcggcgccggggcacguuuacuuggacacucuccgauucagaggguaaggacaccccugggggauacugucuuacucgcuggaugcugaucgaagcugaguugaaaugcuucggcaacacagccguggcgaaguguaaugagaaacaugaugaagaguuuugcgacaugcuaagacuguucgauuuuaacaagcaggcaauucagaggcucaaagcccccgcucagaugagcauacaacugaucaauaaggccgucaacgcacuuauuaaugaccagcugaucaugaagaaccacuugcgggacauaaugugcauuccauauugcaauuacaguaaauauugguaccucaacaauaccgcuacggggaagaccucucugcccaaauguugguuaaucuccaacggaagcuaccugaaugagacacacuucucggaugacaucgaacaggaggccgauaacaugauuacugagaugcuacaaaaggaauauauggagcgccaggguaaaaccccucucggccugguggaccuuuucguguuuucuacauccuucuacuugaucucaauuuuucugcaucucgucaagauaccaacucaccgacauaucguugggaaaaguugccccaagccucacagacugaaucauaugggaauuuguagcugcggccuuuauaagcagccaggugugccgguaagguggaaacggugaggacuaguuauaagacugacuagcccgaugggccucccaacgggcccuccuccccuccuugcaccgagauuaauaaaaaaaaaaaaaaaaaaaaaaaaaaaaaaaaaaaaaaaaaaaaaaaaaaaaaaaaaaaaaaaaugcaucccccccccccccccccccccccccccccccaaaggcucuuuucagagccaccagaauu

SEQ ID NO: 7411 - RNA, 1693 nt, Artificial Sequence
  mRNA product Design i-3 comprising derived and/or modified sequence from LASV(G3010-SLE-2013;Clade IV)__AIT17344__GPCstabilized (opt3)
gggagaaagcuuaccaugggccagaucgugaccuucuuucaagaggucccccacguuauugaagaggugaugaacauaguacugaucgcccucagcauucuugcugugcugaagggguuguacaauuucgcaacaugcggauuagucggucuggugacuuuucuacuccuguguggcagauccugcacgaccucucuuuauaaagggguuuacgaacugcagacauuggagcucaacauggaaacucugaauaugaccaugccucugucauguacaaagaacaauagucaucacuauaucauggugggaaacgagaccggccucgaguuaacucugacaaauaccagcauuaucaaccauaaauucugcaaucuuuccgacgcccacaagaaaaacuuguacaaucaugcgcugaugucuauaaucucgacguuucaccuaucaauuccaaacuucaaucaguaugaagcuaugagcugugauuuuaacggugggaagaucaguguccaguacaaucucucccacucuuaugccggagacgcagccagccauugcggcacuguggcuaacggcguacugcaaaccuucaugaggauggcauggggaggguccuacauugcccuugauucagguugcggcaagugggacuguaucaugacaaguuaucaguaccugauaauucagaacacuaccugggaggaucacugccaguuuagccggccgucucccaucggguauuugggacuccugucccaacgcacacgagacauuuacaucucacguagacgccggggcaccuucacguggacucucagcgauagugaagguaaagacacaccugggggauauugucuuaccagguggaugcugaucgaggcugaguugaagugcuuuggcaauacugccguugcgaaauguaacgaaaagcaugaugaggaguucugcgacaugcuacggcuguuugauuucaauaaacaggcaauucagcgccucaagacacccgcccagaugucuauacaacugaucaacaaggcugugaaugcccuuauuaacgaccagcugaucaugaaaaaucacuugagagauauaaugugcauuccauacugcaacuauuccaaguacugguaccucaaucacaccacgaccgggaaaacaagccugcccaaguguugguuagucucgaacggaucuuaucugaaugaaacucauuucuccgacgacaucgagcagcaagcagauaacaugaucaccgagaugcuacagaaagaauacauggagaggcaggguaagacaccucucggccugguggaccuuuuuguguucucaaccaguuuuuauuugauuagcaucuuccugcaccucgucaaaauuccaacucaucggcacauaguugggaaguccugccccaagccucaucgccugaaucacaugggaaucuguucuugcggccuuuacaaacagccaggugugccgguacgauggaagagaugaggacuaguuauaagacugacuagcccgaugggccucccaacgggcccuccuccccuccuugcaccgagauuaauaaaaaaaaaaaaaaaaaaaaaaaaaaaaaaaaaaaaaaaaaaaaaaaaaaaaaaaaaaaaaaaaugcaucccccccccccccccccccccccccccccccaaaggcucuuuucagagccaccagaauu

SEQ ID NO: 7412 - RNA, 1693 nt, Artificial Sequence
  mRNA product Design i-3 comprising derived and/or modified sequence from LASV(G502-SLE-2009;Clade IV)__AIT17126__GPCstabilized (opt3)
gggagaaagcuuaccaugggccagaucgugaccuucuuucaagaggucccccacguuauugaagaggugaugaacauaguacugaucgcccucagcauucuugcugugcugaagggguuguacaauuucgcaacaugcggauuagucggucugcuaacuuuucuccugcuuuguggcagauccugcacgaccgggcuguauaaaggaguguacgaauugcagacacucgagcugaacauggaaacucugaauaugaccaugccucucucuuguacaaagaacaauucacaucacuauaucaugguuggcaacgagaccgguuuagagcugacucuuacaaauaccaguauuaucaaccauaaauucugcaauuugagcgacgcccacaagaaaaaccuguacgaucaugcgcuaauguccauaaucucuacguuucaccucucgauuccaaauuucaaccaguaugaagcuaugucaugugacuuuaaugggggaaagaucagcgugcaguacaaccugagucacuccuaugccggcgaugcagccgaccauugcggcacugucgcuaauggggugcuucaaaccuucaugaggauggcauggggagguucuuacauugcccuggauagcggcugcgggcgcugggacuguaucaugacauccuaccaguauuugauaauucagaacacuaccugggaggaucacugccaguuuucacgaccgagucccaucggauaccucggccuguuaagccaacguacaagagacauuuauaucucuaggcggcgccgggguaccuucacguggacucuuuccgauucagaagggaaggacacaccuggaggcuacugucugacccgcuggauguugaucgaggcugagcuaaaaugcuuuggcaacacugccguagcgaaguguaaugaaaaacaugaugaggaguucugcgacaugcugagacucuuugauuucaacaagcaggcaauucagaggcugaaagcccccgcucagaugagcauacaacuuaucaauaaggccguuaacgcacugauuaaugaccaguuggugaugaagaaccaccuccgggacaucaugugcauaccauauugcaauuacagucgcuauugguaccugaaccacacaaccacgggacgaaccucuuuacccaaauguuggcuggucuccaaugguagcuaccuaaacgaaacacauuucucggaugacauugagcagcaagcugauaauaugaucacugagaugcuccagaaggaauauauggagagacagggcaaaaccccucuggggcuuguggacuuguuuguguucucuacauccuuuuaccugaucucaauuuuccuccaccuggucaagaucccaacucauaggcacauuguuggaaaaaguugccccaagccucaucggcuuaaccacaugggcauauguagcugcggucuguauaaacagccaggggugccgguaaaguggaagcguugaggacuaguuauaagacugacuagcccgaugggccucccaacgggcccuccuccccuccuugcaccgagauuaauaaaaaaaaaaaaaaaaaaaaaaaaaaaaaaaaaaaaaaaaaaaaaaaaaaaaaaaaaaaaaaaaugcaucccccccccccccccccccccccccccccccaaaggcucuuuucagagccaccagaauu

SEQ ID NO: 7413 - RNA, 1693 nt, Artificial Sequence
  mRNA product Design i-3 comprising derived and/or modified sequence from LASV(G733-SLE-2010;Clade IV)__AIT17154__GPCstabilized (opt3)
gggagaaagcuuaccaugggccagaucgugaccuucuuucaagaggucccccacguuauugaagaggugaugaacauaguacugaucgcccucagcauucuugcugugcugaagggguuguacaauuucgcaacaugcggaaucgucgguuuaguguccuuucugcuacucuguggcagaucuugcacuacgucacuguauaaagggguuuacgaacuucagacccuggaguugaacauggaaacacucaauaugacuaugccucugaguuguaccaagaacaauagccaucacuauauuauggugggaaacgagacaggccuggagcucaccuuaacuaauacauccaucauaaaccauaaauucugcaaucugucugacgcccacaagaaaaaccuuuacgaucaugcguugaugucgaucauuucaaccuuucaccugagcaucccaaauuucaaccaguaugaagcuaugaguugugacuuuaauggugggaagauuuccguccaguacaaccuaucucacagcuaugccggagaugcagccaaucauugcggcacgaucgcuaacggcgugcuccaaacuuucaugaggauggcauggggaggguccuacauagcccuggacucagguugcgaucgcugggacuguauuaugaccaguuaccaguaucuuaucauucagaacacaacuugggaggaucacugccaguuuagccgaccgucucccaucggcuaccugggguugcucucccaacguaccagagacaucuauauuucaaggcggcgccggggaacauucaccuggacgcugagcgauagugaaggcaaggacacuccugguggguacugucucacacgcuggaugcuuauagaggcugagcugaaaugcuuuggaaauaccgccguagcgaaguguaacgaaaaacaugaugaggaguucugcgacauguugagacuauuugauuucaauaagcaggcaauccagaggcugaaagcccccgcucagaugucuauucaacucaucaacaaggccguuaaugcacugauaaacgaccagcuuauuaugaagaaucaucugcgggacaucaugugcaucccauauugcaacuacuccaaauauugguacuugaaucacacuacaaccggcaagacgagccuccccaaauguuggcuggugucgaacgggucuuacuuaaaugaaacccacuucuccgaugacauugagcagcaagcugauaacaugaucacagagaugcugcagaaggaauauauggagcgccagggaaaaacuccucuaggucucgucgaccuguuuguguucucaaccaguuuuuaccuuauuagcauauucuugcaccuggugaagaucccaacacaucgacacgucguuggcaaauccugccccaagccucauagacucaaucacauggggauuuguucuugcggacuguauggccagccaggugugccgguaaaguggaaaaggugaggacuaguuauaagacugacuagcccgaugggccucccaacgggcccuccuccccuccuugcaccgagauuaauaaaaaaaaaaaaaaaaaaaaaaaaaaaaaaaaaaaaaaaaaaaaaaaaaaaaaaaaaaaaaaaaugcaucccccccccccccccccccccccccccccccaaaggcucuuuucagagccaccagaauu

SEQ ID NO: 7414 - RNA, 1693 nt, Artificial Sequence
  mRNA product Design i-3 comprising derived and/or modified sequence from MOPV/LASV reassortant(IGS-1;Clade IV)__AFY05576__GPCstabilized (opt3)
gggagaaagcuuaccaugggccagaucgugaccuucuuucaagaggucccccacguuauugaagaggugaugaacauaguacugaucgcccucagcgugcuugcuguccugaagggguuguacaauuucgcaacaugcggauuagugggucugguuacuuuucuacuccuguguggcagauccugcacgaccucucuuuauaaagggguguacgaacugcagacauuggagcucaacauggaaacucugaauaugaccaugccucugucauguacaaagaacaauagucaucacuauauuauggucggaaacgagaccggccucgaguuaacucugacaaauaccagcaucauuaaccauaaauucugcaaucuuuccgacgcccacaagaaaaacuuguacgaucaugcgcugaugucuaucauaucgacguuucaccuaucaaucccaaauuucaaccaguaugaagcuaugagcugugacuuuaauggugggaagauuagugugcaguacaaccucucccacucuuaugccggagaugcagccaaucauugcggcacuguagcuaacggcguucugcaaaccuucaugaggauggcauggggagggagcuacaucgcccuugacuccgguugcggcaacugggauuguauuaugacaucauaccaguaucugaucauacagaauacuaccugggaggaccacugccaguuuagucgcccgagccccauuggguacuugggacuccugucucaacgaacacgugauaucuauauuuccagaaggcgccggggcaccuucacguggacucucucagacagcgaaggugaggauacaccugggggauacugucuuacccgguggaugcugaucgaggcugaauugaagugcuuuggcaacacugccguggcgaaauguaaugagaagcaugacgaagaguucugcgauaugcuacgccuguuugacuucaacaaacaggcaauccagagacucaaggcccccgcucagaugaguauucaacugauaaauaaagccgucaacgcacuuaucaaugaucagcugauuaugaagaaccacuugagggacaucaugugcauaccauauugcaauuacucuaaguauugguaccucaaccacacaaccacggggcggaccucccugcccaaauguugguuagugagcaauggaucguaccugaacgagacacauuucucugacgauauugagcagcaagcugacaauaugaucacugaaaugcuacagaaggaguauauggaacgccaggguaaaaccccucucggccugguggaucuuuuugucuucuccacaucauuuuacuugaucaguauuuuccugcaccucguuaagaucccaacucaucgacacauuguggggaaaagcugccccaagccucauagacugaaccacaugggaauauguuccugcggccuuuauaaacagccagguguaccggugaaguggaagaggugaggacuaguuauaagacugacuagcccgaugggccucccaacgggcccuccuccccuccuugcaccgagauuaauaaaaaaaaaaaaaaaaaaaaaaaaaaaaaaaaaaaaaaaaaaaaaaaaaaaaaaaaaaaaaaaaugcaucccccccccccccccccccccccccccccccaaaggcucuuuucagagccaccagaauu

SEQ ID NO: 7415 - RNA, 1693 nt, Artificial Sequence
  mRNA product Design i-3 comprising derived and/or modified sequence from LASV(LM765-SLE-2012;Clade IV)__AIT17814__GPCstabilized (opt3)
gggagaaagcuuaccaugggccagaucgugaccuucuuucaagaggucccccacguuauugaagaggugaugaacauaguacugaucgcccucagcauucuugcugugcugaagggguuguacaauuucgcaacaugcggauuagucggucuggugacuuuucuacuccuguguggcagauccugcacgaccucucuuuauaaagggguuuacgaacugcagacauuggagcucaacauggaaacucugaauaugaccaugccucugucauguacaaagaacaauagucaucacuauaucauggugggaaacgagaccggccucgaguuaacucugacaaauaccagcauuaucgaccauaaauucugcaaccuuuccgaugcccacaggaagaauuuguacgaccaugcgcugaugucuauaaucucgacguuucaccuaucaauuccaaacuucaaucaguaugaagcuaugagcugugauuuuaacggugggaaaaucaguguccaguacaaucucucccacucuuaugccaaggacgcagccgaucauugcggaacuguggcuaacggcguacugcaaaccuucaugcggauggcauggggcgggagcuacauugcccuugacuccggaugcggucgaugggauuguaucaugacaucauaccaguaucugauaauucagaauacuaccugggaggaccacugccaguuuagucguccgagccccaucggcuacuuggggcuccugucucaaagaacaagggauauuuauaucucccggcgccgccggggaaccuucacguggacucucucagacagcgaaggcaaggauacaccugguggguacugucuuaccagauggaugcugaucgaggcugaguugaaaugcuuuggaaacacugccguugcgaaguguaacgaaaaacaugacgaggaguucugcgauaugcuaaggcuguuugacuucaauaagcaggcaauucagcggcucaaagcccccgcucagaugaguauacaacugaucaacaaggccgugaaugcacuuauuaacgaccagcugaucaugaagaaucacuugcgcgauauaaugugcauuccauauugcaacuacucuaaauauugguaccucaaucacacaaccacgggcaagaccucccugcccaaauguugguuagucagcaacgggucguaccugaaugaaacacauuucucugacgauaucgagcagcaagcugacaacaugaucacugagaugcuacagaaggaauauauggagcgacagggaaaaaccccucucggucugguggaucuuuuuguguucuccacaucauuuuacuugauuaguaucuuccugcaccucgucaagauuccaacucauagacacauaguuggcaaacccugcccuaagccacauaggcugaaucacauggggaucuguagcugcggacuuuauaagcagccgggcgugcccguaaaauggaagcggugaggacuaguuauaagacugacuagcccgaugggccucccaacgggcccuccuccccuccuugcaccgagauuaauaaaaaaaaaaaaaaaaaaaaaaaaaaaaaaaaaaaaaaaaaaaaaaaaaaaaaaaaaaaaaaaaugcaucccccccccccccccccccccccccccccccaaaggcucuuuucagagccaccagaauu

SEQ ID NO: 7416 - RNA, 1693 nt, Artificial Sequence
  mRNA product Design i-3 comprising derived and/or modified sequence from LASV(LM776-SLE-2012;Clade IV)__AIT17824__GPCstabilized (opt3)
gggagaaagcuuaccaugggccagaucgugaccuucuuucaagaggucccccacguuauugaagaggugaugaacauaguacugaucgcccucagcauucuugcugugcugaagggguuguacaauuucgcaacaugcggauuagucggucuggugacuuuucuacuccuguguggcagauccugcacgaccucuguuuauaaagggguguacgaacuucagacacuggaguugaacauggaaacucucaauaugaccaugccucugucauguacaaagaacaauagucaucacuauaucauggucggaaacgagaccggccuggagcucacuuuaacaaauaccagcauuaucaaccauaaauucugcaaucuguccgacgcccacaagaaaaaccuuuacgaucaugcguugaugucuauaaucucgacguuucaccugucaauuccaaauuucaaccaguaugaagcuaugagcugugacuuuaauggugggaagaucagugugcaguacaaccuaucccacucuuaugccggagaugcagccaaucauugcggcacuguagcuaacggcguucuccaaaccuucaugaggauggcauggggagggagcuacauugcccuggacuccgguugcggcaagugggauuguaucaugacaucauaccaguaucuuauaauucagaacacuaccugggaggaccauugccaguuuagucggccgagccccaucggguaccugggauugcucucucaacgcacacgagauauuuauaucucccguagacgccggggcaccuucacguggacucugucagacagcgaagguaaagauacaccugggggauacugucucaccagguggaugcuuaucgaggcugagcugaagugcuuuggcaauacugccguggcgaaauguaacgaaaagcacgacgaggaguucugcgauauguugcggcuauuugacuucaauaaacaggcaauucagcgccugaaggcccccgcucagaugaguauacaacucaucaacaaggccgucaaugcacugauuaacgaucagcuuaucaugaaaaaucaccugagagacauaaugugcauuccauauugcaacuacucuaaguauugguacuugaaucauacaaccacggggaaaaccucccuccccaaguguuggcuggugagcaacggaucguacuuaaaugaaacacacuucucugacgauaucgagcagcaagcugacaacaugaucacugagaugcugcagaaagaauauauggagaggcaggguaagaccccucuaggccucguggaucuguuugucuucuccacaucauuuuaccuuauuaguaucuucuugcaucugguuaaaauuccaacucaccggcauauagugggaaagagcugccccaagccucaccgccucaaucacauggggaucuguuccugcggccuguauaaacagccagguguaccggugcgauggaagagaugaggacuaguuauaagacugacuagcccgaugggccucccaacgggcccuccuccccuccuugcaccgagauuaauaaaaaaaaaaaaaaaaaaaaaaaaaaaaaaaaaaaaaaaaaaaaaaaaaaaaaaaaaaaaaaaaugcaucccccccccccccccccccccccccccccccaaaggcucuuuucagagccaccagaauu

SEQ ID NO: 7417 - RNA, 1693 nt, Artificial Sequence
  mRNA product Design i-3 comprising derived and/or modified sequence from LASV(Mad39;Clade IV)__ANH09722__GPCstabilized (opt3)
gggagaaagcuuaccaugggccagaucgugaccuucuuucaagaggucccccacguuauugaagaggugaugaacauaguacugaucgcccucagcauucuugcugugcugaagggguuguacaaugucgcaacaugcggauuaaucggucuggugacuuuccuacuccuguguggcagauccugcacgaccacacuuuauaaagggguuuacgaacugcaggccuuggagcucaacauggaaacucugaauaugaccaugccucugucuuguacaaagaacaauucacaucacuauauuagggugggaaacgagaccggccucgaguuaacucugacaaauaccagucuuaucaaccauaaauuuugcaauuugagcgacgcgcacaagaaaaaccuguacgaucaugcucuaauguccauaaucucuacguuccaccucucgauuccaaauuuuaaccaguaugaagccaugucaugugacuucaaugaugguaagaucagcguccaguacaaccugagucacacuuaugcaggggacaccgccaaucauugcggaacaguggcuaacggcguacuucaaacuuuuaugcggauggcauggggcggguccuacauugcccuggauucuggaugcgguggcugggacuguaucaugaccagcuaccaguauuugauaauucagaacacaaccugggaggaucacugccaguucucccgaccgucacccaucggguaccucggacuguuaagucaacguacgagagacauuuauaucagcaggcggcgccggggcacuuuuacauggacccuuucugauuccgaagguaaggacacuccugggggauacugucugacacgcuggauguugaucgaggcugagcuaaaaugcuucggcaauaccgccguugcgaaguguaacgaaaaacaugaugaggaauuuugcgacaugcugagacucuucgauuuuaauaagcaggcaauucagaggcugaaagcccccgcucagaugucaauacaacuuaucaacaaggccgugaaugcacugauuaacgaccaguugaucaugaagaaucaccuccgggacauaaugugcauuccauauugcaacuacagcaaauauugguaccugaaucacacggucaccgggaagacaaguuuacccaaauguuggcuggugucuaacggauccuaccuaaaugaaacucauuucagcgaugacaucgagcagcaagcugauaacaugaucaccgagaugcuccagaaggaauauauggagcgccaggguaaaacaccucugggccuuguggacuuguucgucuuuucgacuucuuucuaccugauuuccaucuuucuccaccugguuaagauuccaacccaucgacacgugguagggaaacccugcccuaagccacauagacuuaaucacaugggaauauguucaugcggcuucuauaagcagccgggugugcccgucagguggaaacggugaggacuaguuauaagacugacuagcccgaugggccucccaacgggcccuccuccccuccuugcaccgagauuaauaaaaaaaaaaaaaaaaaaaaaaaaaaaaaaaaaaaaaaaaaaaaaaaaaaaaaaaaaaaaaaaaugcaucccccccccccccccccccccccccccccccaaaggcucuuuucagagccaccagaauu

SEQ ID NO: 7418 - RNA, 1693 nt, Artificial Sequence
  mRNA product Design i-3 comprising derived and/or modified sequence from LASV(Z0947-SLE-2011;Clade IV)__AIT17840__GPCstabilized (opt3)
gggagaaagcuuaccaugggccagaucgugaccuucuuucaagaggucccccacguuauugaagaggugaugaacauaguacugaucgcccucagcauucuugcugugcugaagggguuguacaauuucgcaacaugcggauuagucggucuggugacuuuucuacuccuguguggcagauccugcacgaucucucuuuauaaagggguuuacgaacugcagaccuuggagcucaacauggaaacacugaauaugacuaugccucugucauguaccaagaacaauagucaucacuauauuauggugggaaacgagacaggccucgaguuaacccugacuaauacaagcaucauaaaccauaaauucugcaaucuuuccgacgcccacaagaaaaacuuguacgaucaugcgcugaugucuaucauuucgaccuuucaccuaucaaucccaaauuucaaccaguaugaagcuaugagcugugacuuuaauggugggaagauuaguguccaguacaaccucucccacucuuaugccggagaugcagccaaucauugcggcacgguggcuaacggcguacugcaaacuuucaugaggauggcauggggagggagcuacaucgcccuugacuccgguugcgaucgcugggacuguauaaugaccucauaccaguaucugauuauccagaacacaacuugggaggaucacugccaguuuagucgaccgagccccauuggcuacuuggggcuccugucucaacguaccagagacaucuauaucuccaggcggcgccggggaacauucaccuggacgcucucagauagcgaaggcaaggacacuccugguggguacugucuuacacgcuggaugcugauugaggcugaguugaaaugcuuuggaaauaccgccguugcgaaguguaacgaaaaacaugaugaggaguucugcgacaugcuaagacuguuugauuucaauaagcaggcaauacagaggcucaaagcccccgcucagaugaguauccaacugauuaacaaggccgugaaugcacuuaucaacgaccagcugauaaugaagaaucacuugcgggacauuaugugcaucccauauugcaacuacucuaaauauugguaccucaaucacacuacaaccggcaagacgucccugcccaaauguugguuagucagcaacgggucguaccugaaugaaacccauuucucugaugacaucgagcagcaagcugauaacaugauuacagagaugcuacagaaggaauauauggagcgccagggaaaaacuccucucggucugguggaccuuuuuguguucuccaccucauuuuacuugaucaguauuuuccugcaccucgucaagauaccaacacaucgacacaucguuggcaaacccugcccuaagccacauagacugaaucacauggggauuuguagcugcggacuuuauaagcagccgggcgugcccguaaaauggaagaggugaggacuaguuauaagacugacuagcccgaugggccucccaacgggcccuccuccccuccuugcaccgagauuaauaaaaaaaaaaaaaaaaaaaaaaaaaaaaaaaaaaaaaaaaaaaaaaaaaaaaaaaaaaaaaaaaugcaucccccccccccccccccccccccccccccccaaaggcucuuuucagagccaccagaauu

SEQ ID NO: 7419 - RNA, 1693 nt, Artificial Sequence
  mRNA product Design i-3 comprising derived and/or modified sequence from LASV(Josiah;Clade IV)__NP_694870__GPCstabilized (opt4)
gggagaaagcuuaccaugggccagaucgugaccuucuuccaggaggugccccacgugaucgaggaggugaugaacaucgugcugaucgcccugagcgugcuggccgugcugaagggccuguacaacuucgccaccugcggccuggugggccuggugaccuuccugcugcugugcggcagaagcugcaccaccagccuguacaagggcguguacgagcugcagacccuggagcugaacauggagacccugaacaugaccaugccccugagcugcaccaagaacaacagccaccacuacaucauggugggcaacgagaccggccuggagcugacccugaccaacaccagcaucaucaaccacaaguucugcaaccugagcgacgcccacaagaagaaccuguacgaccacgcccugaugagcaucaucagcaccuuccaccugagcauccccaacuucaaccaguacgaggccaugagcugcgacuucaacggcggcaagaucagcgugcaguacaaccugagccacagcuacgccggcgacgccgccaaccacugcggcaccguggccaacggcgugcugcagaccuucaugagaauggccuggggcggcagcuacaucgcccuggacagcggcugcggcaacugggacugcaucaugaccagcuaccaguaccugaucauccagaacaccaccugggaggaccacugccaguucagcagacccagccccaucggcuaccugggccugcugagccagagaaccagagacaucuacaucagcagaagacgccggggcaccuucaccuggacccugagcgacagcgagggcaaggacacccccggcggcuacugccugaccagauggaugcugaucgaggccgagcugaagugcuucggcaacaccgccguggccaagugcaacgagaagcacgacgaggaguucugcgacaugcugagacuguucgacuucaacaagcaggccauccagagacugaaggcccccgcccagaugagcauccagcugaucaacaaggccgugaacgcccugaucaacgaccagcugaucaugaagaaccaccugagagacaucaugugcauccccuacugcaacuacagcaaguacugguaccugaaccacaccaccaccggcagaaccagccugcccaagugcuggcuggugagcaacggcagcuaccugaacgagacccacuucagcgacgacaucgagcagcaggccgacaacaugaucaccgagaugcugcagaaggaguacauggagagacagggcaagaccccccugggccugguggaccuguucguguucagcaccagcuucuaccugaucagcaucuuccugcaccuggugaagauccccacccacagacacaucgugggcaagagcugccccaagccccacagacugaaccacaugggcaucugcagcugcggccuguacaagcagcccggcgugcccgugaaguggaagagaugaggacuaguuauaagacugacuagcccgaugggccucccaacgggcccuccuccccuccuugcaccgagauuaauaaaaaaaaaaaaaaaaaaaaaaaaaaaaaaaaaaaaaaaaaaaaaaaaaaaaaaaaaaaaaaaaugcaucccccccccccccccccccccccccccccccaaaggcucuuuucagagccaccagaauu

SEQ ID NO: 7420 - RNA, 1690 nt, Artificial Sequence
  mRNA product Design i-3 comprising derived and/or modified sequence from LASV(LP;Clade I)__AAF86701__GPCstabilized (opt4)
gggagaaagcuuaccaugggccagaucaucaccuucuuccaggaggugccccacgugaucgaggaggugaugaacaucgugcugaucgcccugagccugcuggccauccugaagggccuguacaacaucgccaccugcggcaucaucggccugguggccuuccuguuccugugcggcaagagcugcagccugacccugaagggcggcuacgagcugcagacccuggagcugaacauggagacccugaacaugaccaugccccugagcugcaccaagaacagcagccaccacuacaucagagugggcaacgagaccggccuggagcugacccugaccaacaccagcaucaucaaccacaaguucugcaaccugagcgacgcccacaagaagaaccuguacgaccacgcccugaugagcaucaucagcaccuuccaccugagcauccccaacuucaaccaguacgaggccaugagcugcgacuucaacggcggcaagaucagcgugcaguacaaccugagccacagcuacgccggcgacgccgccgagcacugcggcaccguggccaacggcgugcugcagaccuucaugagaauggccuggggcggcagauacaucgcccuggacagcggcugcggcaacugggacugcaucaugaccagcuaccaguaccugaucauccagaacaccaccugggaggaccacugccaguucagcagacccagccccaucggcuaccugggccugcugagccagagaaccagagacaucuacaucagcagaagacgccggggcaccuucaccuggacccugagcgacagcgagggcaacgagacccccggcggcuacugccugaccagauggaugcugaucgaggccgagcugaagugcuucggcaacaccgccguggccaagugcaacgagaagcacgacgaggaguucugcgacaugcugagacuguucgacuucaacaagcaggccaucagaagacugaaggcccccgcccagaugagcauccagcugaucaacaaggccgugaacgcccugaucaacgaccagcugaucaugaagaaccaccugagagacaucaugugcauccccuacugcaacuacagcaaguacugguaccugaaccacaccagcagcggcagaaccagccugcccaagugcuggcugaucagcaacggcagcuaccugaacgagacccaguucagcgacgacaucgagcagcaggccgacaacaugaucaccgagaugcugcagaaggaguacaucgagagacagggcaagaccccccugggccugguggacaucuucaucuucagcaccagcuucuaccugaucagcaucuuccugcaccugaucaagauccccacccacagacacaucgugggcaagcccugccccaagccccacagacugaaccacaugggcgugugcagcugcggccuguacaagcaccccggcgugcccaccaaguggaagagaugaggacuaguuauaagacugacuagcccgaugggccucccaacgggcccuccuccccuccuugcaccgagauuaauaaaaaaaaaaaaaaaaaaaaaaaaaaaaaaaaaaaaaaaaaaaaaaaaaaaaaaaaaaaaaaaaugcaucccccccccccccccccccccccccccccccaaaggcucuuuucagagccaccagaauu

SEQ ID NO: 7421 - RNA, 1690 nt, Artificial Sequence
  mRNA product Design i-3 comprising derived and/or modified sequence from LASV(803213;Clade II)__AAF86703__GPCstabilized (opt4)
gggagaaagcuuaccaugggccagaucaucaccuucuuccaggaggugccccacgugaucgaggaggugaugaacaucgugcugaucgcccugagccugcuggccauccugaagggcaucuacaacguggccaccugcggccuguucggccugaucagcuuccugcugcugugcggcagaagcugcagcgugaccuacaagggcguguacgagcugcagacccuggagcugaacauggccaaccugaacaugaccaugccccugagcugcaccaagaacaacagccaccacuacaucauggugggcaacgagaccggccuggagcugacccugaccaacaccagcaucaucaaccacaaguucugcaaccugagcgacgcccacaagaagaaccuguacgaccacgcccugaugagcaucaucagcaccuuccaccugagcauccccaacuucaaccaguacgaggccaugagcugcgacuucaacggcggcaagaucagcgugcaguacaaccugagccacagcuucgccguggacgccgccaaccacugcggcaccaucgccaacggcgugcugcagaccuucaugagaauggccuggggcggcagcuacaucgcccuggacagcggcugcggcaacugggacugcaucaugaccagcuaccaguaccugaucauccagaacaccaccugggaggaccacugccaguucagcagacccagccccaucggcuaccugggccugcugagccagagaaccagagacaucuacaucagcagaagacgccggggcaccuucaccuggacccugagcgacagcgagggcaacgaggcccccggcggcuacugccugaccagauggaugcugaucgaggccgagcugaagugcuucggcaacaccgccguggccaagugcaacgagaagcacgacgaggaguucugcgacaugcugagacuguucgacuucaacaagcaggccaucaagagacugaagacccccgcccagaugagcauccagcugaucaacaaggccgugaacgcccugaucaacgaccagcugaucaugaagaaccaccugagagacaucaugugcauccccuacugcaacuacagcagauacugguaccugaaccacaccgugaccggcaagaccagccugcccagaugcuggcuggugagcaacggcagcuaccugaacgagacccacuucagcgacgacaucgagcagcaggccgacaacaugaucaccgagaugcugcagaaggaguacauggacagacagggcaagaccccccugggccugguggaccuguucguguucagcaccagcuucuaccugaucagcaucuuccugcaccuggugaagauccccacccacagacacaucgugggcaagcccugccccaagccccacagacugaaccacaugggcaucugcagcugcggccuguacaagcaccccggcgugcccgugaaguggaagagaugaggacuaguuauaagacugacuagcccgaugggccucccaacgggcccuccuccccuccuugcaccgagauuaauaaaaaaaaaaaaaaaaaaaaaaaaaaaaaaaaaaaaaaaaaaaaaaaaaaaaaaaaaaaaaaaaugcaucccccccccccccccccccccccccccccccaaaggcucuuuucagagccaccagaauu

SEQ ID NO: 7422 - RNA, 1690 nt, Artificial Sequence
  mRNA product Design i-3 comprising derived and/or modified sequence from LASV(GA391;Clade III)__CAA36645__GPCstabilized (opt4)
gggagaaagcuuaccaugggccagaucgugaccuucuuccaggaggugccccacgugaucgaggaggugaugaacaucgugcugaucgcccugagcauccuggccauccugaagggccuguacaacguggccaccugcggccugaucggccuggugaccuuccugcugcugagcggcagaagcugcagccugaucuacaagggcaccuacgagcugcagacccuggagcugaacauggagacccugaacaugaccaugccccugagcugcaccaagaacaacagccaccacuacaucagagugggcaacgagaccggccuggagcugacccugaccaacaccagcauccugaaccacaaguucugcaaccugagcgacgcccacaagagaaaccuguacgaccacagccugaugagcaucaucagcaccuuccaccugagcauccccaacuucaaccaguacgaggccaugagcugcgacuucaacggcggcaagaucaccgugcaguacaaccugagccacagcuucgccguggacgccgccggccacugcggcacccuggccaacggcgugcugcagaccuucaugagaauggccuggggcggcagcuacaucgcccuggacagcggcugcggcaacugggacugcaucaugaccagcuaccaguaccugaucauccagaacaccaccugggacgaccacugccaguucagcagacccagccccaucggcuaccugggccugcugagccagagaaccagagacaucuacaucagcagaagacgccggggcaccuucaccuggacccugagcgacagcgagggcaacgagacccccggcggcuacugccugaccagauggaugcugaucgaggccgagcugaagugcuucggcaacaccgccguggccaagugcaacgagaagcacgacgaggaguucugcgacaugcugagacuguucgacuucaacaagcaggccaucagaagacugaagacccccgcccagaugagcauccagcugaucaacaaggccgugaacgcccugaucaacgaccagcugaucaugaagaaccaccugagagacaucaugugcauccccuacugcaacuacagcagauacugguaccugaaccacaccagcaccggcaagaccagccugcccagaugcuggcugaucagcaacggcagcuaccugaacgagaccaaguucagcgacgacaucgagcagcaggccgacaacaugaucaccgagaugcugcagaaggaguacaucgacagacagggcaagaccccccugggccugguggaccuguucguguucagcaccagcuucuaccugaucagcaucuuccugcaccuggugaagauccccacccacagacacaucgugggcaagcccugccccaagccccacagacugaaccacaugggcaucugcagcugcggccuguacaagcagcccggcgugcccgugagauggaagagaugaggacuaguuauaagacugacuagcccgaugggccucccaacgggcccuccuccccuccuugcaccgagauuaauaaaaaaaaaaaaaaaaaaaaaaaaaaaaaaaaaaaaaaaaaaaaaaaaaaaaaaaaaaaaaaaaugcaucccccccccccccccccccccccccccccccaaaggcucuuuucagagccaccagaauu

SEQ ID NO: 7423 - RNA, 1693 nt, Artificial Sequence
  mRNA product Design i-3 comprising derived and/or modified sequence from LASV(AV;Clade V)__CCA30314__GPCstabilized (opt4)
gggagaaagcuuaccaugggccagaucgugaccuucuuccaggaggugccccacgugaucgaggaggugaugaacaucgugcugaucgcccugagcauccuggccgugcugaagggccuguacaacaucgccaccugcggccugaucggccugaucaccuuccugcugcugugcggcagaagcugcagcagcaaccuguacaagggcguguacgagcugcagagccuggaccugaacauggagacccugaacaugaccaugccccugagcugcaccaagaacaacagccaccacuacaucagagugggcaacgacaccggccuggagcugacccugaccaacaccagcauccugaaccacaaguucugcaaccugagcgacgcccacaagaaggaccuguacgaccacgcccugaugagcaucaucagcaccuuccaccugagcauccccaacuucaaccaguacgaggccaugagcugcgacuucaacggcggcaagaucagcgugcaguacaaccugagccacagcuacgccaucgacgccgccaaccacugcggcaccguggccaacggcauccugcagaccuucaugagaauggccuggggcggcagcuacaucgcccuggacagcggcugcggcaacugggacugcaucaugaccagcuaccaguaccugaucauccagaacaccaccugggagaaccacugccaguucagcagacccagccccaucggcuaccugggccugcugagccagagaaccagagacaucuacaucagcagaagacgccggggcaccuucaccuggacccugagcgacagcgagggcaacgccacccccggcggcuacugccugaccagauggaugcugaucgaggccgagcugaagugcuucggcaacaccgccguggccaagugcaacgagaagcacgacgaggaguucugcgacaugcugagacuguucgacuucaacaagcaggccaucagcagacugaagagccccgcccagaugagcauccagcugaucaacaaggccgugaacgcccugaucaacgaccagcugaucaugaagaaccaccugagagacaucaugugcauccccuacugcaacuacagcaaguacugguaccugaaccacaccaucaccggcaagaccagccugcccaagugcuggcuggugagcaacggcagcuaccugaacgagacccacuucagcgacgacaucgagcagcaggccgacaacaugaucaccgagaugcugcagaaggaguacauggagagacagggcaagaccccccugggccugguggaccuguucguguucagcaccagcuucuaccugaucagcaucuuccugagacuggugaagauccccacccacagacacaucgugggcaagcccugccccaagccccacagacugaaccacaugggcaucugcagcugcggccuguacaagcagcccggcgugcccgugagauggaagagaugaggacuaguuauaagacugacuagcccgaugggccucccaacgggcccuccuccccuccuugcaccgagauuaauaaaaaaaaaaaaaaaaaaaaaaaaaaaaaaaaaaaaaaaaaaaaaaaaaaaaaaaaaaaaaaaaugcaucccccccccccccccccccccccccccccccaaaggcucuuuucagagccaccagaauu

SEQ ID NO: 7424 - RNA, 1690 nt, Artificial Sequence
  mRNA product Design i-3 comprising derived and/or modified sequence from LASV(Togo/2016/7082;Clade VI)__AMR44577__GPCstabilized (opt4)
gggagaaagcuuaccaugggccagaucaucaccuucuuccaggaggugccccacgugaucgaggaggugaugaacaucgugcugaucgcccugagccugcuggccauccugaagggcguguacaacguggccaccugcggcaucaucggccuggugaccuuccuguuccugugcggcagaagcugcagccugaucuacaagggcagcuacgagcugcagacccuggagcugaacauggagacccugaacaugaccaugccccugagcugcaccaagaacagcagccaccacuacaucagagugggcaacgagaccggccuggagcugacccugaccaacaccagcaucaucaaccacaaguucugcaaccugagcgacgcccacaagagaaaccuguacgaccacgcccugaugagcauccugagcaccuuccaccugagcauccccaacuucaaccaguacgaggccaugagcugcgacuucaacggcggcaagaucagcgugcaguacaaccugagccacgccuacgccguggacgccgccgagcacugcggcaccguggccaacggcgugcugcagaccuucaugagaauggccuggggcggcagcuacaucgcccuggacagcggcugcggcaacugggacugcaucaugaccagcuaccaguaccugaucauccagaacaccaccugggaggaccacugccaguucagcagacccagccccaucggcuaccugggccugcugagccagagaaccagagacaucuacaucagcagaagacgccggggcaccuucaccuggacccugagcgacagcgagggcaacgagacccccggcggcuacugccugaccagauggaugcugaucgaggccgagcugaagugcuucggcaacaccgccguggccaagugcaacgagaagcacgacgaggaguucugcgacaugcugagacuguucgacuucaacaagcaggccauccagagacugaagagccccgcccagaugagcauccagcugaucaacaaggccgugaacgcccugaucaacgaccagcugaucaugaagaaccaccugagagacaugaugugcauccccuacugcaacuacagcaaguacugguaccugaaccacaccagcagcggcagaaccagccugcccaagugcuggcuggugagcaacggcagcuaccugaacgagacccacuucagcgacgacaucgagcagcaggccgacaacaugaucaccgagaugcugcagaaggaguacaucgacagacagggcaagaccccccugggccugguggaccuguucguguucagcaccagcuucuaccugaucagcaucuuccugcaccugaucaagauccccacccacagacacaucgugggcaagcccugccccaagccccacagacugaaccacaugggcaucugcagcugcggccuguacaagcagcccggcgugcccaccagauggaagagaugaggacuaguuauaagacugacuagcccgaugggccucccaacgggcccuccuccccuccuugcaccgagauuaauaaaaaaaaaaaaaaaaaaaaaaaaaaaaaaaaaaaaaaaaaaaaaaaaaaaaaaaaaaaaaaaaugcaucccccccccccccccccccccccccccccccaaaggcucuuuucagagccaccagaauu

SEQ ID NO: 7425 - RNA, 1690 nt, Artificial Sequence
  mRNA product Design i-3 comprising derived and/or modified sequence from LASV(KAK-428;Clade n.d. (VII))__ANH09740__GPCstabilized (opt4)
gggagaaagcuuaccaugggccagaucgugaccuucuuccaggaggugccccacgugaucgaggaggugaugaacaucgugcugaucgcccugagccugcuggccauccugaagggccuguacaacuucgccaccugcggcgugaucggccugaucaccuuccugcugcugugcggcagaagcugcagcgccaccuacaagggccaguacgagcugcagacccuggagcugaacauggagagccugaacaugaccaugccccugagcugcaccaagaacaacagccaccacuacaucagagccggcaacaacaccggccuggagcugacccugaccaacaccagcaucaucagccacaaguucugcaaccugagcgacgcccacaagaagaaccuguacgaccacacccugaugagcaucaucaccaccuuccaccugagcauccccaacuucaaccaguacgaggccaugagcugcgacuucaacggcggcaagaucagcauccaguacaaccugagccacagcuacgccggcgacgccgcccagcacugcggcaccguggccaacggcgugcugcagaccuucaugagaauggccuggggcggcagcuaccuggcccuggacagcggcugcagaggcugggacugcaucaucagcagcuaccaguaccugaucauccagaacaccaccugggacgaccacugccaguucagcagacccagccccaucggcuaccugggcuucgugagccagaagaccagagacaucuacaucagcagaagacgccggggcaccuucaccuggacccugagcgacagcgagggccacgacaugcccggcggcuacugccugaccagauggaugcugaucgaggccgaccugaagugcuucggcaacaccgccguggccaagugcaacgagaagcacgacgaggaguucugcgacauguggagacuguucgacuucaacaagcaggccauccagagacugaaggcccccgcccagaugaacauccagcugaucaacaaggccgugaacgcccugaucaacgaccagcugaugaugaagaaccaccugagagacaucaugugcauccccuacugcaacuacagcaaguucugguaccugaacaacaccaccaccggcagaaccagccugcccagaugcuggcugaucagcaacggcagcuaccugaacgagacccacuucagcgacgacaucgagcagcaggccgacaacaugaucaccgagaugcugcagaaggaguacauggacagacagggcaagaccccccugggccugguggaccuguucguguucagcaccagcuucuaccugaucaccaucuuccugcaccuggugaagauccccacccacagacacaucgugggcaagcccugccccaagccccacagacugaaccacaugggcaucugcagcugcggccuguacaagcagcccggcgugcccgugagauggaagagaugaggacuaguuauaagacugacuagcccgaugggccucccaacgggcccuccuccccuccuugcaccgagauuaauaaaaaaaaaaaaaaaaaaaaaaaaaaaaaaaaaaaaaaaaaaaaaaaaaaaaaaaaaaaaaaaaugcaucccccccccccccccccccccccccccccccaaaggcucuuuucagagccaccagaauu

SEQ ID NO: 7426 - RNA, 1690 nt, Artificial Sequence; identical to SEQ ID NO: 7420
  mRNA product Design i-3 comprising derived and/or modified sequence from LASV(Pinneo-NIG-1969;Clade I)__AIT17836__GPCstabilized (opt4)

SEQ ID NO: 7427 - RNA, 1690 nt, Artificial Sequence
  mRNA product Design i-3 comprising derived and/or modified sequence from LASV(ISTH0009-NIG-2011;Clade II)__AIT17404__GPCstabilized (opt4)
gggagaaagcuuaccaugggccagaucaucaccuucuuccaggaggugccccacgugaucgaggaggugaugaacaucgugcugaucgcccugagccugcuggccauccugaagggcaucuacaacguggccaccugcggccuguucggccuggugagcuuccugcugcugugcggcagaagcugcagcaccaccuacaagggcguguacgagcugcagacccuggagcuggacauggccagccugaacaugaccaugccccugagcugcaccaagaacaacagccaccacuacaucauggugggcaacgagaccggccuggagcugacccugaccaacaccagcaucaucaaccacaaguucugcaaccugagcgacgcccacaagaagaaccuguacgaccacgcccugaugagcaucaucagcaccuuccaccugagcauccccaacuucaaccaguacgaggccaugagcugcgacuucaacggcggcaagaucagcgugcaguacaaccugagccacgccuacgccguggacgccgccaaccacugcggcaccaucgccaacggcgugcugcagaccuucaugagaauggccuggggcggcagcuacaucgcccuggacagcggcugcggcagcugggacugcaucaugaccagcuaccaguaccugaucauccagaacaccaccugggaggaccacugccaguucagcagacccagccccaucggcuaccugggccugcugagccagagaaccagagacaucuacaucagcagaagacgccggggcaccuucaccuggacccugagcgacagcgagggcaacgagacccccggcggcuacugccugaccagauggaugcugaucgaggccgagcugaagugcuucggcaacaccgccguggccaagugcaacgagaagcacgacgaggaguucugcgacaugcugagacuguucgacuucaacaagcaggccaucagaagacugaagacccccgcccagaugagcauccagcugaucaacaaggccgugaacgcccugaucaacgaccagcugaucaugaagaaccaccugagagacaucaugugcauccccuacugcaacuacagcaaguacugguaccugaaccacaccgugaccggcaagaccagccugcccagaugcuggcuggugagcaacggcagcuaccugaacgagacccacuucagcgacgacaucgagcagcaggccgacaacaugaucaccgagcugcugcagaaggaguacauggacagacagggcaagaccccccugggccugguggaccuguucguguucagcaccagcuucuaccugaucagcaucuuccugcaccugaucaagauccccacccacagacacaucaccggcaagcccugccccaagccccacagacugaaccacaugggcaucugcagcugcggccuguacaagcaccccggcgugcccgugaaguggaagagaugaggacuaguuauaagacugacuagcccgaugggccucccaacgggcccuccuccccuccuugcaccgagauuaauaaaaaaaaaaaaaaaaaaaaaaaaaaaaaaaaaaaaaaaaaaaaaaaaaaaaaaaaaaaaaaaaugcaucccccccccccccccccccccccccccccccaaaggcucuuuucagagccaccagaauu

SEQ ID NO: 7428 - RNA, 1690 nt, Artificial Sequence
  mRNA product Design i-3 comprising derived and/or modified sequence from LASV(ISTH2010-NIG-2012;Clade II)__AIT17482__GPCstabilized (opt4)
gggagaaagcuuaccaugggccagaucaucaccuucuuccaggaggugccccacgugaucgaggaggugaugaacaucgugcugaucgcccugagccugcuggccauccugaagggcaucuacaacguggccaccugcggccuguucggccuggugagcuuccugcugcugugcggcagaagcugcagcaccaccuacaagggcguguacgagcugcagacccuggagcuggacauggccagccugaacaugaccaugccccugagcugcaccaagaacaacagccaccacuacaucauggugggcaacgagaccggccuggagcugacccugaccaacaccagcaucaucaaccacaaguucugcaaccugagcgacgcccacaagaagaaccuguacgaccacgcccugaugagcaucaucagcaccuuccaccugagcauccccaacuucaaccaguacgaggccaugagcugcgacuucaacggcggcaagaucagcgugcaguacaaccugagccacgccuacgccguggacgccgccaaccacugcggcaccaucgccaacggcgugcugcagaccuucaugagaauggccuggggcggcagcuacaucgcccuggacagcggcugcggcagcugggacugcaucaugaccagcuaccaguaccugaucauccagaacaucaccugggaggaccacugccaguucagcagacccagccccaucggcuaccugggccugcugagccagagaaccagagacaucuacaucagcagaagacgccggggcaccuucaccuggacccugagcgacagcgagggcaacgagacccccggcggcuacugccugaccagauggaugcugaucgaggccgagcugaagugcuucggcaacaccgccguggccaagugcaacgagaagcacgacgaggaguucugcgacaugcugagacuguucgacuucaacaagcaggccaucagaagacugaagacccccgcccagaugagcauccagcugaucaacaaggccgugaacgcccugaucaacgaccagcugaucaugaagaaccaccugagagacaucaugugcauccccuacugcaacuacagcaaguacugguaccugaaccacaccgugaccggcaagaccagccugcccagaugcuggcuggugagcaacggcagcuaccugaacgagacccacuucagcgacgacaucgagcagcaggccgacaacaugaucaccgagcugcugcagaaggaguacaucgacagacagggcaagaccccccugggccugguggaccuguucguguucagcaccagcuucuaccugaucagcaucuuccugcaccuggugaagauccccacccacagacacguggugggcaagcccugccccaagccccacagacugaaccacaugggcaucugcagcugcggccuguacaagcaccccggcgugcccgugaaguggaagagaugaggacuaguuauaagacugacuagcccgaugggccucccaacgggcccuccuccccuccuugcaccgagauuaauaaaaaaaaaaaaaaaaaaaaaaaaaaaaaaaaaaaaaaaaaaaaaaaaaaaaaaaaaaaaaaaaugcaucccccccccccccccccccccccccccccccaaaggcucuuuucagagccaccagaauu

SEQ ID NO: 7429 - RNA, 1690 nt, Artificial Sequence
  mRNA product Design i-3 comprising derived and/or modified sequence from LASV(Lassa virus/H.sapiens-wt/NGA/2015/ISTH_0543;Clade II)__AVO03639__GPCstabilized (opt4)
gggagaaagcuuaccaugggccagaucaucaccuucuuccaggaggugccccacgugaucgaggaggugaugaacaucgugcugaucgcccugagccugcuggccauccugaagggcaucuacaacguggccaccugcggccuguucggccuggugagcuuccugcugcugugcggcagaagcugcagcaccaccuacaagggcguguacgagcugcagacccuggagcuggacauggccaaccugaacaugaccaugccccugagcugcaccaagaacaacagccaccacuacaucauggugggcaacgagaccggccuggagcugacccugaccaacaccagcaucaucaaccacaaguucugcaaccugagcgacgcccacaagaagaaccuguacgaccacgcccugaugagcaucaucagcaccuuccaccugagcauccccaacuucaaccaguacgaggccaugagcugcgacuucaacggcggcaagaucagcgugcaguacaaccugagccacaccuacgccguggacgccgccaaccacugcggcaccaucgccaacggcgugcugcagaccuucaugagaauggccuggggcggcagcuacaucgcccuggacagcggcugcggcagcugggacugcaucaugaccagcuaccaguaccuggugauccagaacaccaccugggaggaccacugccaguucagcagacccagccccaucggcuaccugggccugcugagccagagaaccagagacaucuacaucagcagaagacgccggggcaccuucaccuggacccugagcgacagcgagggcaacgagacccccggcggcuacugccugaccagauggaugcugaucgaggccgagcugaagugcuucggcaacaccgccguggccaagugcaacgagaagcacgacgaggaguucugcgacaugcugagacuguucgacuucaacaagcaggccaucagaagacugaagacccccgcccagaugagcauccagcugaucaacaaggccgugaacgcccugaucaacgaccagcugaucaugaagaaccaccugagagacaucaugugcauccccuacugcaacuacagcaaguacugguaccugaaccacaccgugaccggcaagaccagccugcccagaugcuggcuggugagcaacggcagcuaccugaacgagacccacuucagcgacgacaucgagcagcaggccgacaacaugaucaccgagcugcugcagaaggaguacaucgacagacagggcaagaccccccugggccugguggaccuguucguguucagcaccagcuucuaccugaucagcaucuuccugcaccuggugaagauccccacccacagacacaucaccggcaagcccugccccaagccccacagacugaaccacaugggcaucugcagcugcggccuguacaagcaccccggcgugcccgugaaguggaagagaugaggacuaguuauaagacugacuagcccgaugggccucccaacgggcccuccuccccuccuugcaccgagauuaauaaaaaaaaaaaaaaaaaaaaaaaaaaaaaaaaaaaaaaaaaaaaaaaaaaaaaaaaaaaaaaaaugcaucccccccccccccccccccccccccccccccaaaggcucuuuucagagccaccagaauu

SEQ ID NO: 7430 - RNA, 1690 nt, Artificial Sequence
  mRNA product Design i-3 comprising derived and/or modified sequence from LASV(Lassa virus/H.sapiens-wt/NGA/2016/ISTH_0009;Clade II)__AVO03571__GPCstabilized (opt4)
gggagaaagcuuaccaugggccagaucaucaccuucuuccaggaggugccccacgugaucgaggaggugaugaacaucgugcugaucgcccugagccugcuggccauccugaagggcaucuacaacguggccaccugcggccugcugggccuggugagcuuccugcugcugugcggcagaagcugcagcaccaccuacaagggcguguacgagcugcagacccuggagcuggacauggccagccugaacaugaccaugccccugagcugcaccaagaacaacagccaccacuacaucauggugggcaacgagaccggccuggagcugacccugaccaacaccagcaucaucaaccacaaguucugcaaccugagcgacgcccacaagaagaaccuguacgaccacgcccugaugagcaucaucagcaccuuccaccugagcauccccaacuucaaccaguacgaggccaugagcugcgacuucaacggcggcagaaucagcgugcaguacaaccugagccacagcuacgccguggacgccgccaaccacugcggcaccaucgccaacggcgugcugcagaccuucaugagaauggccuggggcggcagcuacaucgcccuggacagcggcugcggcagcugggacugcaucaugaccagcuaccaguaccugaucauccagaacaccaccugggaggaccacugccaguucagcagacccagccccaucggcuaccugggccugcugagccagagaaccagagacaucuacaucagcagaagacgccggggcaccuucaccuggacccugagcgacagcgagggcaacgagacccccggcggcuacugccugaccagauggaugcugaucgaggccgagcugaagugcuucggcaacaccgccguggccaagugcaacgagaagcacgacgaggaguucugcgacaugcugagacuguucgacuucaacaagcaggccaucagaagacugaagacccccgcccagaugagcauccagcugaucaacaaggccgugaacgcccugaucaacgaccagcugaucaugaagaaccaccugagagacaucaugugcauccccuacugcaacuacagcaaguacugguaccugaaccacaccgugaccggcaagaccagccugcccagaugcuggcuggugagcaacggcagcuaccugaacgagacccacuucagcgacgacaucgagcagcaggccgacaacaugaucaccgagcugcugcagaaggaguacaucgacagacagggcaagaccccccugggccugguggaccuguucguguucagcaccagcuucuaccugaucagcaucuuccugcaccuggugaagauccccacccacagacacaucaccggcaagcccugccccaagccccacagacugaaccacaugggcaucugcagcugcggccuguacaaccaccccggcgugcccgugaaguggaagagaugaggacuaguuauaagacugacuagcccgaugggccucccaacgggcccuccuccccuccuugcaccgagauuaauaaaaaaaaaaaaaaaaaaaaaaaaaaaaaaaaaaaaaaaaaaaaaaaaaaaaaaaaaaaaaaaaugcaucccccccccccccccccccccccccccccccaaaggcucuuuucagagccaccagaauu

SEQ ID NO: 7431 - RNA, 1690 nt, Artificial Sequence
  mRNA product Design i-3 comprising derived and/or modified sequence from LASV(Lassa virus/H.sapiens-wt/NGA/2016/ISTH_0017;Clade II)__AVO03567__GPCstabilized (opt4)
gggagaaagcuuaccaugggccagaucaucaccuucuuccaggaggugccccacgugaucgaggaggugaugaacaucgugcugaucgcccugagccugcuggccauccugaagggcaucuacaacguggccaccugcggccuguucggccuggugagcuuccugcugcugugcggcagaagcugcagcaccaccuacaagggcguguacgagcugcagacccuggagcuggacauggccagccugaacaugaccaugccccugagcugcaccaagaacaacagccaccacuacaucauggugggcaacgagaccggccuggagcugacccugaccaacaccagcaucaucaaccacaaguucugcaaccugagcgacgcccacaagaagaaccuguacgaccacgcccugaugagcaucaucagcaccuuccaccugagcauccccaacuucaaccaguacgaggccaugagcugcgacuucaacggcggcaagaucagcgugcaguacaaccugagccacaccuacgccaucgacgccgccaaccacugcggcaccaucgccaacggcgugcugcagaccuucaugagaauggccuggggcggcagcuacaucgcccuggacagcggcugcggcagcugggacugcaucaugaccagcuaccaguaccugaucauccagaacaccaccugggaggaccacugccaguucagcagacccagccccaucggcuaccugggccugcugagccagagaaccagagacaucuacaucagcagaagacgccggggcaccuucaccuggacccugagcgacagcgagggcaacgagacccccggcggcuacugccugaccagauggaugcugaucgaggccgagcugaagugcuucggcaacaccgccguggccaagugcaacgagaagcacgacgaggaguucugcgacaugcugagacuguucgacuucaacaagcaggccaucagaagacugaagacccccgcccagaugagcauccagcugaucaacaaggccgugaacgcccugaucaacgaccagcugaucaugaagaaccaccugagagacaucaugugcauccccuacugcaacuacagcaaguacugguaccugaaccacaccgugaccggcaagaccagccugcccagaugcuggcuggugagcaacggcagcuaccugaacgagacccacuucagcgacgacaucgagcagcaggccgacaacaugaucaccgagcugcugcagaaggaguacauggacagacagggcaagaccccccugggccugguggaccuguucguguucagcaccagcuucuaccugaucagcaucuuccugcaccuggugagaauccccacccacagacacgugaucggcaagcccugccccaagccccacagacugaaccacaugggcaucugcagcugcggccuguacaagcaccccggcgugcccgugaaguggaagagaugaggacuaguuauaagacugacuagcccgaugggccucccaacgggcccuccuccccuccuugcaccgagauuaauaaaaaaaaaaaaaaaaaaaaaaaaaaaaaaaaaaaaaaaaaaaaaaaaaaaaaaaaaaaaaaaaugcaucccccccccccccccccccccccccccccccaaaggcucuuuucagagccaccagaauu

SEQ ID NO: 7432 - RNA, 1690 nt, Artificial Sequence
  mRNA product Design i-3 comprising derived and/or modified sequence from LASV(Lassa virus/H.sapiens-wt/NGA/2018/ISTH_0959;Clade II)__AVV65099__GPCstabilized (opt4)
gggagaaagcuuaccaugggccagaucaucaccuucuuccaggaggugccccacgugaucgaggaggugaugaacaucgugcugaucgcccugagccugcuggccauccugaagggcaucuacaacguggugaccugcggccuguucggccuggugagcuuccugcugcugugcggcagaagcugcagcaccaccuacaagggcguguacgagcugcagacccuggagcuggacauggccagccugaacaugaccaugccccugagcugcaccaagaacaacagccaccacuacaucauggugggcaacgagaccggccuggagcugacccugaccaacaccagcaucaucaaccacaaguucugcaaccugagcgacgcccacaagaagaaccuguacgaccacgcccugaugagcaucaucagcaccuuccaccugagcauccccaacuucaaccaguacgaggccaugagcugcgacuucaacggcggcaagaucagcgugcaguacaaccugagccacgccuacgccaucgacgccgccaaccacugcggcaccaucgccaacggcgugcugcagaccuucaugagaauggccuggggcggcagcuacaucgcccuggacagcggcugcggcagcugggacugcaucaugaccagcuaccaguaccugaucauccagaacaccaccugggaggaccacugccaguucagcagacccagccccaucggcuaccugggccugcugagccagagaaccagagacaucuacaucagcagaagacgccggggcaccuucaccuggacccugagcgacagcgagggcaacgagacccccggcggcuacugccugaccagauggaugcugaucgaggccgagcugaagugcuucggcaacaccgccguggccaagugcaacgagaagcacgacgaggaguucugcgacaugcugagacuguucgacuucaacaagcaggccaucagaagacugaagacccccgcccagaugagcauccagcugaucaacaaggccgugaacgcccugaucaacgaccagcugaucaugaagaaccaccugagagacaucaugugcauccccuacugcaacuacagcaaguacugguaccugaaccacaccgugaccggcaagaccagccugcccagaugcuggcuggugagcaacggcagcuaccugaacgagacccacuucagcgacgacaucgagcagcaggccgacaacaugaucaccgagcugcugcagaaggaguacaucgacagacagggcaagaccccccugggccugguggaccuguucguguucagcaccagcuucuaccugaucagcaucuuccugcaccuggugaagauccccacccacagacacgugaucggcaagcccugccccaagccccacagacugaaccacaugggcaucugcagcugcggccuguacaagcaccccggcgugcccgugaaguggaagagaugaggacuaguuauaagacugacuagcccgaugggccucccaacgggcccuccuccccuccuugcaccgagauuaauaaaaaaaaaaaaaaaaaaaaaaaaaaaaaaaaaaaaaaaaaaaaaaaaaaaaaaaaaaaaaaaaugcaucccccccccccccccccccccccccccccccaaaggcucuuuucagagccaccagaauu

SEQ ID NO: 7433 - RNA, 1690 nt, Artificial Sequence
  mRNA product Design i-3 comprising derived and/or modified sequence from LASV(LASV003-NIG-2008;Clade II)__AIT17580__GPCstabilized (opt4)
gggagaaagcuuaccaugggccagaucaucaccuucuuccaggaggugccccacgugaucgaggaggugaugaacaucgugcugaucgcccugagccugcuggccauccugaagggcaucuacaacguggccaccugcggccuguucggccuggugagcuuccugcugcugugcggcagaagcugcagcaccaccuacaagggcguguacgagcugcagacccuggagcuggacauggccagccugaacaugaccaugccccugagcugcaccaagaacaacagccaccacuacaucauggugggcaacgagaccggccuggagcugacccugaccaacaccagcaucaucaaccacaaguucugcaaccugagcgacgcccacaagaagaaccuguacgaccacgcccugaugagcaucaucagcaccuuccaccugagcauccccaacuucaaccaguacgaggccaugagcugcgacuucaacggcggcaagaucagcgugcaguacaaccugagccacaccuacgccguggacgccgccaaccacugcggcaccaucgccaacggcgugcugcagaccuucaugagaauggccuggggcggcagcuacaucgcccuggacagcggcugcggcagcugggacugcaucaugaccagcuaccaguaccugaucauccagaacaccaccugggaggaccacugccaguucagcagacccagccccaucggcuaccugggccugcugagccagagaaccagagacaucuacaucagcagaagacgccggggcaccuucaccuggacccugagcgacagcgagagcaacgagacccccggcggcuacugccugaccagauggaugcugaucgaggccgagcugaagugcuucggcaacaccgccguggccaagugcaacgagaagcacgacgaggaguucugcgacaugcugagacuguucgacuucaacaagcaggccaucagaagacugaaggcccccgcccagaugagcauccagcugaucaacaaggccgugaacgcccugaucaacgaccagcugaucaugaagaaccaccugagagacaucaugugcauccccuacugcaacuacagcaaguacugguaccugaaccacaccgugaccggcagaaccagccugcccagaugcuggcuggugagcaacggcagcuaccugaacgagacccacuucagcgacgacaucgagcagcaggccgacaacaugaucaccgagcugcugcagaaggaguacauggacagacagggcaagaccccccugggccugguggaccuguucguguucagcaccagcuucuaccugaucagcaucuuccugcaccuggugaagauccccacccacagacacgugaucggcaagcccugccccaagccccacagacugaaccacaugggcaucugcagcugcggccuguacaagcaccccggcgugcccgugaaguggaagagaugaggacuaguuauaagacugacuagcccgaugggccucccaacgggcccuccuccccuccuugcaccgagauuaauaaaaaaaaaaaaaaaaaaaaaaaaaaaaaaaaaaaaaaaaaaaaaaaaaaaaaaaaaaaaaaaaugcaucccccccccccccccccccccccccccccccaaaggcucuuuucagagccaccagaauu

SEQ ID NO: 7434 - RNA, 1690 nt, Artificial Sequence
  mRNA product Design i-3 comprising derived and/or modified sequence from LASV(LASV035-NIG-2009;Clade II)__AIT17588__GPCstabilized (opt4)
gggagaaagcuuaccaugggccagaucaucaccuucuuccaggaggugccccacgugaucgaggaggugaugaacaucgugcugaucgcccugagccugcuggccauccugaagggcaucuacaacguggccaccugcggccuguucggccuggugagcuuccugcugcugugcggcagaagcugcagcaccaccuacaagggcguguacgagcugcagacccuggagcuggacauggccagccugaacaugaccaugccccugagcugcaccaagaacaacagccaccacuacaucauggugggcaacgagaccggccuggagcugacccugaccaacaccagcaucaucaaccacaaguucugcaaccugagcgacgcccacaagaagaaccuguacgaccacgcccugaugagcaucaucagcaccuuccaccugagcauccccaacuucaaccaguacgaggccaugagcugcgacuucaacggcggcaagaucagcgugcaguacaaccugagccacgccuacgccguggacgccgccaaccacugcggcaccaucgccaacggcgugcugcagaccuucaugagaauggccuggggcggcagcuacaucgcccuggacagcggcugcggcagcugggacugcaucaugaccagcuaccaguaccugaucauccagaacaccaccugggaggaccacugccaguucagcagacccagccccaucggcuaccugggccugcugagccagagaaccagagacaucuacaucagcagaagacgccggggcaccuucaccuggacccugagcgacagcgagggcaacgagacccccggcggcuacugccugaccagauggaugcugaucgaggccgagcugaagugcuucggcaacaccgccguggccaagugcaacgagaagcacgacgaggaguucugcgacaugcugagacuguucgacuucaacaagcaggccaucagaagacugaaggcccccgcccagaugagcauccagcugaucaacaaggccgugaacgcccugaucaacgaccagcugaucaugaagaaccaccugagagacaucaugugcauccccuacugcaacuacagcaaguacugguaccugaaccacaccgugaccggcaagaccagccugcccagaugcuggcuggugagcaacggcagcuaccugaacgagacccacuucagcgacgacaucgagcagcaggccgacaacaugaucaccgagcugcugcagaaggaguacaucgacagacagggcaagaccccccugggccugguggaccuguucguguucagcaccagcuucuaccugaucagcaucuuccugcaccuggugaagauccccacccacagacacgugaucggcaagcccugccccaagccccacagacugaaccacaugggcaucugcagcugcggccuguacaagcaccccggcgugcccgugaaguggaagagaugaggacuaguuauaagacugacuagcccgaugggccucccaacgggcccuccuccccuccuugcaccgagauuaauaaaaaaaaaaaaaaaaaaaaaaaaaaaaaaaaaaaaaaaaaaaaaaaaaaaaaaaaaaaaaaaaugcaucccccccccccccccccccccccccccccccaaaggcucuuuucagagccaccagaauu

SEQ ID NO: 7435 - RNA, 1690 nt, Artificial Sequence
  mRNA product Design i-3 comprising derived and/or modified sequence from LASV(LASV1000-NIG-2009;Clade II)__AIT17782__GPCstabilized (opt4)
gggagaaagcuuaccaugggccagaucaucaccuucuuccaggaggugccccacgugaucgaggaggugaugaacaucgugcugaucgcccugagccugcuggccauccugaagggcaucuacaacguggccaccugcggccuguucggccuggugagcuuccugcugcugugcggcagaagcugcagcaccaccuacaagggcguguacgagcugcagacccuggagcuggacauggccagccugaacaugaccaugccccugagcugcaccaagaacaacagccaccacuacaucauggugggcaacgagaccggccuggagcugacccugaccaacaccagcaucaucaaccacaaguucugcaaccugagcgacgcccacaagaagaaccuguacgaccacgcccugaugagcaucaucagcaccuuccaccugagcauccccaacuucaaccaguacgaggccaugagcugcgacuucaacggcggcaagaucagcgugcaguacaaccugagccacaccuacgccguggacgccgccaaccacugcggcaccaucgccaacggcgugcugcagaccuucaugagaauggccuggggcggcagcuacaucgcccuggacagcggcugcggcagcugggacugcaucaugaccagcuaccaguaccugaucauccagaacaccaccugggaggaccacugccaguucagcagacccagccccaucggcuaccugggccugcugagccagagaaccagagacaucuacaucagcagaagacgccggggcaccuucaccuggacccugagcgacagcgagggcaacgagacccccggcggcuacugccugaccagauggaugcugaucgaggccgagcugaagugcuucggcaacaccgccguggccaagugcaacgagaagcacgacgaggaguucugcgacaugcugagacuguucgacuucaacaagcaggccaucaagagacugaagacccccgcccagaugagcauccagcugaucaacaaggccgugaacgcccugaucaacgaccagcugaucaugaagaaccaccugagagacaucaugugcauccccuacugcaacuacagcaaguacugguaccugaaccacaccgugaccggcaagaccagccugcccagaugcuggcuggugagcaacggcagcuaccugaacgagacccacuucagcgacgacaucgagcagcaggccgacaacaugaucaccgagcugcugcagaaggaguacaucgacagacagggcaagaccccccugggccugguggaccuguucguguucagcaccagcuucuaccugaucagcaucuuccugcaccuggugaagauccccacccacagacacguggugggcaagcccugccccaagccccacagacugaaccacaugggcaucugcagcugcggccuguacaagcaccccggcgugcccgugaaguggaagagaugaggacuaguuauaagacugacuagcccgaugggccucccaacgggcccuccuccccuccuugcaccgagauuaauaaaaaaaaaaaaaaaaaaaaaaaaaaaaaaaaaaaaaaaaaaaaaaaaaaaaaaaaaaaaaaaaugcaucccccccccccccccccccccccccccccccaaaggcucuuuucagagccaccagaauu

SEQ ID NO: 7436 - RNA, 1690 nt, Artificial Sequence
  mRNA product Design i-3 comprising derived and/or modified sequence from LASV(LASV221-NIG-2010;Clade II)__AIT17624__GPCstabilized (opt4)
gggagaaagcuuaccaugggccagaucaucaccuucuuccaggaggugccccacgugaucgaggaggugaugaacaucgugcugaucgcccugagccugcuggccauccugaagggcaucuacaacguggccaccugcggccuguucggccuggugagcuuccugcugcugugcggcagaagcugcagcaccaccuacaagggcguguacgagcugcagacccuggagcuggacauggccagccugaacaugaccaugccccugagcugcaccaagaacaacagccaccacuacaucauggugggcaacgagaccggccuggagcugacccugaccaacaccagcaucaucaaccacaaguucugcaaccugagcgacgcccacaagaagaaccuguacgaccacgcccugaugagcaucaucagcaccuuccaccugagcauccccaacuucaaccaguacgaggccaugagcugcgacuucaacggcggcaagaucagcgugcaguacaaccugagccacaccuacgccaucgacgccgccaaccacugcggcaccaucgccaacggcgugcugcagaccuucaugagaauggccuggggcggcagcuacaucgcccuggacagcggcugcggcagcugggacugcaucaugaccagcuaccaguaccugaucauccagaacaccaccugggaggaccacugccaguucagcagacccagccccaucggcuaccugggccugcugagccagagaaccagagacaucuacaucagcagaagacgccggggcaccuucaccuggacccugagcgacagcgagggcaacgagacccccggcggcuacugccugaccagauggaugcugaucgaggccgagcugaagugcuucggcaacaccgccguggccaagugcaacgagaagcacgacgaggaguucugcgacaugcugagacuguucgacuucaacaagcaggccaucagaagacugaagacccccgcccagaugagcauccagcugaucaacaaggccgugaacgcccugaucaacgaccagcugaucaugaagaaccaccugagagacaucaugugcauccccuacugcaacuacagcaaguacugguaccugaaccacaccgugaccggcaagaccagccugcccagaugcuggcuggugagcaacggcagcuaccugaacgagacccacuucagcgacgacaucgagcagcaggccgacaacaugaucaccgagaugcugcagaaggaguacauggacagacagggcaagaccccccugggccugguggaccuguucguguucagcaccagcuucuaccugaucagcaucuuccugcaccuggugaagauccccacccacagacacgugaucggcaagcccugccccaagccccacagacugaaccacaugggcaucugcagcugcggccuguacaagcaccccggcgugcccgugaaguggaagagaugaggacuaguuauaagacugacuagcccgaugggccucccaacgggcccuccuccccuccuugcaccgagauuaauaaaaaaaaaaaaaaaaaaaaaaaaaaaaaaaaaaaaaaaaaaaaaaaaaaaaaaaaaaaaaaaaugcaucccccccccccccccccccccccccccccccaaaggcucuuuucagagccaccagaauu

SEQ ID NO: 7437 - RNA, 1690 nt, Artificial Sequence
  mRNA product Design i-3 comprising derived and/or modified sequence from LASV(LASV237-NIG-2010;Clade II)__AIT17638__GPCstabilized (opt4)
gggagaaagcuuaccaugggccagaucaucaccuucuuccaggaggugccccacgugaucgaggaggugaugaacaucgugcugaucgcccugagccugcuggccauccugaagggcaucuacaacguggccaccugcggccuguucggccuggugagcuuccugcugcugugcggcagaagcugcagcaccaccuacaagggcguguacgagcugcagacccuggagcuggacauggccagccugaacaugaccaugccccugagcugcaccaagaacaacagccaccacuacaucauggugggcaacgagaccggccuggagcugacccugaccaacaccagcaucaucaaccacaaguucugcaaccugagcgacgcccacaagaaggaccuguacgaccacgcccugaugagcaucaucagcaccuuccaccugagcauccccaacuucaaccaguacgaggccaugagcugcgacuucaacggcggcaagaucagcgugcaguacaaccugagccacaccuacgccguggacgccgccaaccacugcggcaccaucgccaacggcgugcugcagaccuucaugagaauggccuggggcggcagcuacaucgcccuggacagcggcugcggcagcugggacugcaucaugaccagcuaccaguaccugaucauccagaacaccaccugggaggaccacugccaguucagcagacccagccccaucggcuaccugggccugcugagccagagaaccagagacaucuacaucagcagaagacgccggggcaccuucaccuggacccugagcgacagcgagggcaacgagacccccggcggcuacugccugaccagauggaugcugaucgaggccgagcugaagugcuucggcaacaccgccguggccaagugcaacgagaagcacgacgaggaguucugcgacaugcugagacuguucgacuucaacaagcaggccaucagaagacugaagacccccgcccagaugagcauccagcugaucaacaaggccgugaacgcccugaucaacgaccagcugaucaugaagaaccaccugagagacaucaugugcauccccuacugcaacuacagcaaguacugguaccugaaccacaccgugaccggcaagaccagccugcccagaugcuggcuggugagcaacggcagcuaccugaacgagacccacuucagcgacgacaucgagcagcaggccgacaacaugaucaccgagcugcugcagaaggaguacauggacagacagggcaagaccccccugggccugguggaccuguucguguucagcaccagcuucuaccugaucagcaucuuccugcaccugaucaagauccccacccacagacacaucaccggcaagcccugccccaagccccacagacugaaccacaugggcaucugcagcugcggccuguacaagcaccccggcgugcccgugaaguggaagagaugaggacuaguuauaagacugacuagcccgaugggccucccaacgggcccuccuccccuccuugcaccgagauuaauaaaaaaaaaaaaaaaaaaaaaaaaaaaaaaaaaaaaaaaaaaaaaaaaaaaaaaaaaaaaaaaaugcaucccccccccccccccccccccccccccccccaaaggcucuuuucagagccaccagaauu

SEQ ID NO: 7438 - RNA, 1690 nt, Artificial Sequence
  mRNA product Design i-3 comprising derived and/or modified sequence from LASV(LASV253-NIG-2011;Clade II)__AIT17670__GPCstabilized (opt4)
gggagaaagcuuaccaugggccagaucaucaccuucuuccaggaggugccccacgugaucgaggaggugaugaacaucgugcugaucgcccugagccugcuggccauccugaagggcaucuacaacguggccaccugcggccuguucggccuggugagcuuccugcugcugugcggcagaagcugcagcaccaccuacaagggcguguacgagcugcagacccuggagcuggacauggccagccugaacaugaccaugccccugagcugcaccaagaacaacagccaccacuacaucauggugggcaacgagaccggccuggagcugacccugaccaacaccagcaucaucaaccacaaguucugcaaccugagcgacgcccacaagaagaaccuguacgaccacgcccugaugagcaucaucagcaccuuccaccugagcauccccaacuucaaccaguacgaggccaugagcugcgacuucaacggcggcaagaucagcgugcaguacaaccugagccacaccuacgccguggacgccgccaaccacugcggcaccaucgccaacggcgugcugcagaccuucaugagaauggccuggggcggcagcuacaucgcccuggacagcggcugcggcagcugggacugcaucaugaccagcuaccaguaccugaucauccagaacaccaccugggaggaccacugccaguucagcagacccagccccaucggcuaccugggccugcugagccagagaaccagagacaucuacaucagcagaagacgccggggcaccuucaccuggacccugagcgacagcgagggcaacgagacccccggcggcuacugccugaccagauggaugcugaucgaggccgagcugaagugcuucggcaacaccgccguggccaagugcaacgagaagcacgacgaggaguucugcgacaugcugagacuguucgacuucaacaagcaggccaucagaagacugaaggcccccgcccagaugagcauccagcugaucaacaaggccgugaacgcccugaucaacgaccagcugaucaugaagaaccaccugagagacaucaugugcauccccuacugcaacuacagcaaguacugguaccugaaccacaccgugaccggcagaaccagccugcccagaugcuggcuggugagcaacggcagcuaccugaacgagacccacuucagcgacgacaucgagcagcaggccgacaacaugaucaccgagcugcugcagaaggaguacaucgacagacagggcaagaccccccugggccugguggaccuguucguguucagcaccagcuucuaccugaucagcaucuuccugcaccuggugaagauccccacccacagacacaucaucggcaagcccugccccaagccccacagacugaaccacaugggcaucugcagcugcggccuguacaagcaccccggcgugcccgugaaguggaagagaugaggacuaguuauaagacugacuagcccgaugggccucccaacgggcccuccuccccuccuugcaccgagauuaauaaaaaaaaaaaaaaaaaaaaaaaaaaaaaaaaaaaaaaaaaaaaaaaaaaaaaaaaaaaaaaaaugcaucccccccccccccccccccccccccccccccaaaggcucuuuucagagccaccagaauu

SEQ ID NO: 7439 - RNA, 1690 nt, Artificial Sequence
  mRNA product Design i-3 comprising derived and/or modified sequence from LASV(LASV254-NIG-2011;Clade II)__AIT17674__GPCstabilized (opt4)
gggagaaagcuuaccaugggccagaucaucaccuucuuccaggaggugccccacgugaucgaggaggugaugaacaucgugcugaucgcccugagccugcuggccauccugaagggcaucuacaacguggccaccugcggccuguucggccuggugagcuuccugcugcugugcggcagaagcugcagcaccaccuacaagggcguguacgagcugcagacccuggagcuggacaugaccaaccugaacaugaccaugccccugagcugcaccaagaacaacagccaccacuacaucauggugggcaacgagaccggccuggagcugacccugaccaacaccagcaucaucaaccacaaguucugcaaccugagcgacgcccacaagaagaaccuguacaaccacgcccugaugagcaucaucagcaccuuccaccugagcauccccaacuucaaccaguacgaggccaugagcugcgacuucaacggcggcaagaucagcgugcaguacaaccugagccacagcuacgccguggacgccgccaaccacugcggcaccaucgccaacggcgugcugcagaccuucaugagaauggccuggggcggcagcuacaucgcccuggacagcggcugcggcaacugggacugcaucaugaccagcuaccaguaccugaucauccagaacaccaccugggaggaccacugccaguucagcagacccagccccaucggcuaccugggccugcugagccagagaaccagagacaucuacaucagcagaagacgccggggcaccuucaccuggacccugagcgacagcgagggcaacgagacccccggcggcuacugccugaccagauggaugcugaucgaggccgagcugaagugcuucggcaacaccgccguggccaagugcaacgagaagcacgacgaggaguucugcgacaugcugagacuguucgacuucaacaagcaggccaucagaagacugaagacccccgcccaggccaacauccagcugaucaacaaggccgugaacgcccugaucaacgaccagcugaucaugaagaaccaccugagagacaucaugugcauccccuacugcaacuacagcaaguacugguaccugaaccacaccgugaccggcaagaccagccugcccagaugcuggcuggugagcaacggcagcuaccugaacgagacccacuucagcgacgacaucgagcagcaggccgacaacaugaucaccgagcugcugcagaaggaguacauggacagacagggcaagaccccccugggccugguggaccuguucguguucagcaccagcuucuaccugaucagcaucuuccugcaccuggugaagauccccacccacagacacgugaucggcaagcccugccccaagccccacagacugaaccacaugggcaucugcagcugcggccuguacaagcaccccggcgugcccgugaaguggaagagaugaggacuaguuauaagacugacuagcccgaugggccucccaacgggcccuccuccccuccuugcaccgagauuaauaaaaaaaaaaaaaaaaaaaaaaaaaaaaaaaaaaaaaaaaaaaaaaaaaaaaaaaaaaaaaaaaugcaucccccccccccccccccccccccccccccccaaaggcucuuuucagagccaccagaauu

SEQ ID NO: 7440 - RNA, 1690 nt, Artificial Sequence
  mRNA product Design i-3 comprising derived and/or modified sequence from LASV(Nig08-A19;Clade III)__ADU56618__GPCstabilized (opt4)
gggagaaagcuuaccaugggccagaucgugaccuucuuccaggaggugccccacgugaucgaggaggugaugaacaucgugcugaucgcccugagcauccuggccauccugaagggccuguacaacaucgccaccugcggccugaucggccuggugaccuuccugcugcugagcggcagaagcugcagcaugaccuacaagggcguguacgagcugcagacccuggagcugaacaugaacacccugaacaugaccaugccccugagcugcaccaagaacaacagccaccacuacaucauggugggcaacgagaccggccuggagcugacccugaccaacaccagccugcugcaccacaaguucugcaaccugagcgacgcccacaagaagaaccuguacgaccacacccugaugagcaucaucagcaccuuccaccugagcauccccaacuucaaccaguacgaggccaugagcugcgacuucaacggcggcaagaucaccgugcaguacaaccugagccacagcuacgccaucgacgccgccaaccacugcggcaccguggccaacggcgugcugcagaccuucaugagaauggccuggggcggcagcuacaucgcccuggacagcggcugcggcaagugggacugcaucaugaccagcuaccaguaccugaucauccagaacaccaccugggaggaccacugccaguucagcagacccagccccaucggcuaccugggccugcugagccagagaaccagagacaucuacaucagcagaagacgccggggcaccuucaccuggacccugagcgacagcgagggcaacgagacccccggcggcuacugccugaccagauggaugcugaucgaggccgagcugaagugcuucggcaacaccgccguggccaagugcaacgagaagcacgacgaggaguucugcgacaugcugagacuguucgacuucaacaagcaggccaucagaagacugaaggcccccgcccagaugagcauccagcugaucaacaaggccgugaacgcccugaucaacgaccagcugaucaugaagaaccaccugagagacaucaugugcauccccuacugcaacuacagcaaguacugguaccugaaccacaccagcaccggcagaaccagccugcccagaugcuggcuggugagcaacggcagcuaccugaacgagacccacuucagcgacgacaucgagcagcaggccgacaacaugaucaccgagaugcugcagaaggaguaccuggacagacagggcaagaccccccugggccugguggaccuguucguguucagcaccagcuucuaccugaucagcaucuuccugcaccuggugaagauccccacccacagacacaucgugggcaagcccugccccaagccccacagacugaaccacaugggcaucugcagcugcggccuguacaagcagcccggcgugcccgugagauggaagagaugaggacuaguuauaagacugacuagcccgaugggccucccaacgggcccuccuccccuccuugcaccgagauuaauaaaaaaaaaaaaaaaaaaaaaaaaaaaaaaaaaaaaaaaaaaaaaaaaaaaaaaaaaaaaaaaaugcaucccccccccccccccccccccccccccccccaaaggcucuuuucagagccaccagaauu

SEQ ID NO: 7441 - RNA, 1693 nt, Artificial Sequence
  mRNA product Design i-3 comprising derived and/or modified sequence from LASV(G1180-SLE-2010;Clade IV)__AIT17168__GPCstabilized (opt4)
gggagaaagcuuaccaugggccagaucgugaccuucuuccaggaggugccccacgugaucgaggaggugaugaacaucgugcugaucgcccugagcauccuggccgugcugaagggccuguacaacuucgccaccugcggccuggugggccugcugaccuuccugcugcugugcggcagaagcugcaccgccagcagauacaagggcguguacgagcugcagacccuggagcugaacauggagacccugaacaugaccaugccccugagcugcaccaagaacaacagccaccacuacaucauggugggcaacgagaccggccuggagcugacccugaccaacaccagcaucaucaaccacaaguucugcaaccugagcgacgcccacaagaagaaccuguacgaccacgcccugaugagcaucaucagcaccuuccaccugagcauccccaacuucaaccaguacgaggccaugagcugcgacuucaacggcggcaagaucagcgugcaguacaaccugagccacagcuacgccggcgacgccgccaaccacugcggcaccguggccaacggcgugcugcagaccuucaugagaauggccuggggcggcagcuacaucgcccuggacagcggcugcggcagcugggacugcaucaugaccagcuaccaguaccugaucauccagaacaccaccugggaggaccacugccaguucagcagacccagccccaucggcuaccugggccugcugagccagagaaccagagacaucuacaucagcagaagacgccggggcaccuucaccuggacccugagcgacagcgagggcaaggacacccccggcggcuacugccugaccagauggaugcugaucgaggccgagcugaagugcuucggcaacaccgccguggccaagugcaacgagaagcacgacgaggaguucugcgacaugcugagacuguucgacuucaacaagcaggccauccagagacugaaggcccccgcccagaugagcauccagcugaucaacaaggccgugaacgcccugaucaacgaccagcugaucaugaagaaccaccugagagacaucaugugcauccccuacugcaacuacagcaaguacugguaccugaaccacaccaccaccggcaagaccagccugcccaagugcuggcuggugagcaacggcagcuaccugaacgagacccacuucagcgacgacaucgagcagcaggccgacaacaugaucaccgagaugcugcagaaggaguacauggagagacagggcaagaccccccugggccugguggaccuguucguguucagcaccagcuucuaccugaucagcaucuuccugcaccuggugaagauccccacccacagacacaucgugggcaagagcugccccaagccccacagacugaaccacaugggcaucugcagcugcggccuguacaagcagcccggcgugcccgugaaguggaagagaugaggacuaguuauaagacugacuagcccgaugggccucccaacgggcccuccuccccuccuugcaccgagauuaauaaaaaaaaaaaaaaaaaaaaaaaaaaaaaaaaaaaaaaaaaaaaaaaaaaaaaaaaaaaaaaaaugcaucccccccccccccccccccccccccccccccaaaggcucuuuucagagccaccagaauu

SEQ ID NO: 7442 - RNA, 1693 nt, Artificial Sequence
  mRNA product Design i-3 comprising derived and/or modified sequence from LASV(G1442-SLE-2011;Clade IV)__AIT17180__GPCstabilized (opt4)
gggagaaagcuuaccaugggccagaucgugaccuucuuccaggaggugccccacgugaucgaggaggugaugaacaucgugcugaucgcccugagcauccuggccgugcugaagggccuguacaacguggccaccugcggccugaucggccuggugaccuuccugcugcugugcggcagaagcugcaccaccacccuguacaagggcguguacgagcugcagacccuggagcugaacauggagacccugaacaugaccaugccccugagcugcaccaagaacaacagccaccacuacaucagagugggcaacgagaccggccuggagcugacccugaccaacaccagcaucaucaaccacaaguucugcaaccugagcgacgcccacaagaagaaccuguacgaccacgcccugaugagcaucaucagcaccuuccaccugagcauccccaacuucaaccaguacgaggccaugagcugcgacuucaacggcggcaagaucagcgugcaguacaaccugagccacagcuacgccggcgacgccgccaaccacugcggcaccguggccaacggcgugcugcagaccuucaugagaauggccuggggcggcagcuacaucgcccuggacagcggcugcggcaacugggacugcaucaugaccagcuaccaguaccugaucauccagaacaccaccugggacgaccacugccaguucagcagacccagccccaucggcuaccugggccugcugagccagagaaccagagacguguacaucagcagaagacgccggggcaccuucaccuggacccugagcgacagcgagggcaaggacacccccggcggcuacugccugaccagauggaugcugaucgaggccgagcugaagugcuucggcaacaccgccguggccaagugcaacgagaagcacgacgaggaguucugcgacaugcugagacuguucgacuucaacaagcaggccauccagagacugaaggcccccgcccagaugagcauccagcugaucaacaaggccgugaacgcccugaucaacgaccagcugaucaugaagaaccaccugagagacaucaugugcauccccuacugcaacuacagcaaguacugguaccugaacaacaccgccaccggcaagaccagccugcccaagugcuggcugaucagcaacggcagcuaccugaacgagacccacuucagcgacgacaucgagcaggaggccgacaacaugaucaccgagaugcugcagaaggaguacauggagagacagggcaagaccccccugggccugguggaccuguucguguucagcaccagcuucuaccugaucagcaucuuccugcaccuggugaagauccccacccacagacacaucgugggcaagagcugccccaagccccacagacugaaccacaugggcaucugcagcugcggccuguacaagcagcccggcgugcccgugagauggaagagaugaggacuaguuauaagacugacuagcccgaugggccucccaacgggcccuccuccccuccuugcaccgagauuaauaaaaaaaaaaaaaaaaaaaaaaaaaaaaaaaaaaaaaaaaaaaaaaaaaaaaaaaaaaaaaaaaugcaucccccccccccccccccccccccccccccccaaaggcucuuuucagagccaccagaauu

SEQ ID NO: 7443 - RNA, 1693 nt, Artificial Sequence
  mRNA product Design i-3 comprising derived and/or modified sequence from LASV(G3010-SLE-2013;Clade IV)__AIT17344__GPCstabilized (opt4)
gggagaaagcuuaccaugggccagaucgugaccuucuuccaggaggugccccacgugaucgaggaggugaugaacaucgugcugaucgcccugagcauccuggccgugcugaagggccuguacaacuucgccaccugcggccuggugggccuggugaccuuccugcugcugugcggcagaagcugcaccaccagccuguacaagggcguguacgagcugcagacccuggagcugaacauggagacccugaacaugaccaugccccugagcugcaccaagaacaacagccaccacuacaucauggugggcaacgagaccggccuggagcugacccugaccaacaccagcaucaucaaccacaaguucugcaaccugagcgacgcccacaagaagaaccuguacaaccacgcccugaugagcaucaucagcaccuuccaccugagcauccccaacuucaaccaguacgaggccaugagcugcgacuucaacggcggcaagaucagcgugcaguacaaccugagccacagcuacgccggcgacgccgccagccacugcggcaccguggccaacggcgugcugcagaccuucaugagaauggccuggggcggcagcuacaucgcccuggacagcggcugcggcaagugggacugcaucaugaccagcuaccaguaccugaucauccagaacaccaccugggaggaccacugccaguucagcagacccagccccaucggcuaccugggccugcugagccagagaaccagagacaucuacaucagcagaagacgccggggcaccuucaccuggacccugagcgacagcgagggcaaggacacccccggcggcuacugccugaccagauggaugcugaucgaggccgagcugaagugcuucggcaacaccgccguggccaagugcaacgagaagcacgacgaggaguucugcgacaugcugagacuguucgacuucaacaagcaggccauccagagacugaagacccccgcccagaugagcauccagcugaucaacaaggccgugaacgcccugaucaacgaccagcugaucaugaagaaccaccugagagacaucaugugcauccccuacugcaacuacagcaaguacugguaccugaaccacaccaccaccggcaagaccagccugcccaagugcuggcuggugagcaacggcagcuaccugaacgagacccacuucagcgacgacaucgagcagcaggccgacaacaugaucaccgagaugcugcagaaggaguacauggagagacagggcaagaccccccugggccugguggaccuguucguguucagcaccagcuucuaccugaucagcaucuuccugcaccuggugaagauccccacccacagacacaucgugggcaagagcugccccaagccccacagacugaaccacaugggcaucugcagcugcggccuguacaagcagcccggcgugcccgugagauggaagagaugaggacuaguuauaagacugacuagcccgaugggccucccaacgggcccuccuccccuccuugcaccgagauuaauaaaaaaaaaaaaaaaaaaaaaaaaaaaaaaaaaaaaaaaaaaaaaaaaaaaaaaaaaaaaaaaaugcaucccccccccccccccccccccccccccccccaaaggcucuuuucagagccaccagaauu

SEQ ID NO: 7444 - RNA, 1693 nt, Artificial Sequence
  mRNA product Design i-3 comprising derived and/or modified sequence from LASV(G502-SLE-2009;Clade IV)__AIT17126__GPCstabilized (opt4)
gggagaaagcuuaccaugggccagaucgugaccuucuuccaggaggugccccacgugaucgaggaggugaugaacaucgugcugaucgcccugagcauccuggccgugcugaagggccuguacaacuucgccaccugcggccuggugggccugcugaccuuccugcugcugugcggcagaagcugcaccaccggccuguacaagggcguguacgagcugcagacccuggagcugaacauggagacccugaacaugaccaugccccugagcugcaccaagaacaacagccaccacuacaucauggugggcaacgagaccggccuggagcugacccugaccaacaccagcaucaucaaccacaaguucugcaaccugagcgacgcccacaagaagaaccuguacgaccacgcccugaugagcaucaucagcaccuuccaccugagcauccccaacuucaaccaguacgaggccaugagcugcgacuucaacggcggcaagaucagcgugcaguacaaccugagccacagcuacgccggcgacgccgccgaccacugcggcaccguggccaacggcgugcugcagaccuucaugagaauggccuggggcggcagcuacaucgcccuggacagcggcugcggcagaugggacugcaucaugaccagcuaccaguaccugaucauccagaacaccaccugggaggaccacugccaguucagcagacccagccccaucggcuaccugggccugcugagccagagaaccagagacaucuacaucagcagaagacgccggggcaccuucaccuggacccugagcgacagcgagggcaaggacacccccggcggcuacugccugaccagauggaugcugaucgaggccgagcugaagugcuucggcaacaccgccguggccaagugcaacgagaagcacgacgaggaguucugcgacaugcugagacuguucgacuucaacaagcaggccauccagagacugaaggcccccgcccagaugagcauccagcugaucaacaaggccgugaacgcccugaucaacgaccagcuggugaugaagaaccaccugagagacaucaugugcauccccuacugcaacuacagcagauacugguaccugaaccacaccaccaccggcagaaccagccugcccaagugcuggcuggugagcaacggcagcuaccugaacgagacccacuucagcgacgacaucgagcagcaggccgacaacaugaucaccgagaugcugcagaaggaguacauggagagacagggcaagaccccccugggccugguggaccuguucguguucagcaccagcuucuaccugaucagcaucuuccugcaccuggugaagauccccacccacagacacaucgugggcaagagcugccccaagccccacagacugaaccacaugggcaucugcagcugcggccuguacaagcagcccggcgugcccgugaaguggaagagaugaggacuaguuauaagacugacuagcccgaugggccucccaacgggcccuccuccccuccuugcaccgagauuaauaaaaaaaaaaaaaaaaaaaaaaaaaaaaaaaaaaaaaaaaaaaaaaaaaaaaaaaaaaaaaaaaugcaucccccccccccccccccccccccccccccccaaaggcucuuuucagagccaccagaauu

SEQ ID NO: 7445 - RNA, 1693 nt, Artificial Sequence
  mRNA product Design i-3 comprising derived and/or modified sequence from LASV(G733-SLE-2010;Clade IV)__AIT17154__GPCstabilized (opt4)
gggagaaagcuuaccaugggccagaucgugaccuucuuccaggaggugccccacgugaucgaggaggugaugaacaucgugcugaucgcccugagcauccuggccgugcugaagggccuguacaacuucgccaccugcggcaucgugggccuggugagcuuccugcugcugugcggcagaagcugcaccaccagccuguacaagggcguguacgagcugcagacccuggagcugaacauggagacccugaacaugaccaugccccugagcugcaccaagaacaacagccaccacuacaucauggugggcaacgagaccggccuggagcugacccugaccaacaccagcaucaucaaccacaaguucugcaaccugagcgacgcccacaagaagaaccuguacgaccacgcccugaugagcaucaucagcaccuuccaccugagcauccccaacuucaaccaguacgaggccaugagcugcgacuucaacggcggcaagaucagcgugcaguacaaccugagccacagcuacgccggcgacgccgccaaccacugcggcaccaucgccaacggcgugcugcagaccuucaugagaauggccuggggcggcagcuacaucgcccuggacagcggcugcgacagaugggacugcaucaugaccagcuaccaguaccugaucauccagaacaccaccugggaggaccacugccaguucagcagacccagccccaucggcuaccugggccugcugagccagagaaccagagacaucuacaucagcagaagacgccggggcaccuucaccuggacccugagcgacagcgagggcaaggacacccccggcggcuacugccugaccagauggaugcugaucgaggccgagcugaagugcuucggcaacaccgccguggccaagugcaacgagaagcacgacgaggaguucugcgacaugcugagacuguucgacuucaacaagcaggccauccagagacugaaggcccccgcccagaugagcauccagcugaucaacaaggccgugaacgcccugaucaacgaccagcugaucaugaagaaccaccugagagacaucaugugcauccccuacugcaacuacagcaaguacugguaccugaaccacaccaccaccggcaagaccagccugcccaagugcuggcuggugagcaacggcagcuaccugaacgagacccacuucagcgacgacaucgagcagcaggccgacaacaugaucaccgagaugcugcagaaggaguacauggagagacagggcaagaccccccugggccugguggaccuguucguguucagcaccagcuucuaccugaucagcaucuuccugcaccuggugaagauccccacccacagacacguggugggcaagagcugccccaagccccacagacugaaccacaugggcaucugcagcugcggccuguacggccagcccggcgugcccgugaaguggaagagaugaggacuaguuauaagacugacuagcccgaugggccucccaacgggcccuccuccccuccuugcaccgagauuaauaaaaaaaaaaaaaaaaaaaaaaaaaaaaaaaaaaaaaaaaaaaaaaaaaaaaaaaaaaaaaaaaugcaucccccccccccccccccccccccccccccccaaaggcucuuuucagagccaccagaauu

SEQ ID NO: 7446 - RNA, 1693 nt, Artificial Sequence
  mRNA product Design i-3 comprising derived and/or modified sequence from MOPV/LASV reassortant(IGS-1;Clade IV)__AFY05576__GPCstabilized (opt4)
gggagaaagcuuaccaugggccagaucgugaccuucuuccaggaggugccccacgugaucgaggaggugaugaacaucgugcugaucgcccugagcgugcuggccgugcugaagggccuguacaacuucgccaccugcggccuggugggccuggugaccuuccugcugcugugcggcagaagcugcaccaccagccuguacaagggcguguacgagcugcagacccuggagcugaacauggagacccugaacaugaccaugccccugagcugcaccaagaacaacagccaccacuacaucauggugggcaacgagaccggccuggagcugacccugaccaacaccagcaucaucaaccacaaguucugcaaccugagcgacgcccacaagaagaaccuguacgaccacgcccugaugagcaucaucagcaccuuccaccugagcauccccaacuucaaccaguacgaggccaugagcugcgacuucaacggcggcaagaucagcgugcaguacaaccugagccacagcuacgccggcgacgccgccaaccacugcggcaccguggccaacggcgugcugcagaccuucaugagaauggccuggggcggcagcuacaucgcccuggacagcggcugcggcaacugggacugcaucaugaccagcuaccaguaccugaucauccagaacaccaccugggaggaccacugccaguucagcagacccagccccaucggcuaccugggccugcugagccagagaaccagagacaucuacaucagcagaagacgccggggcaccuucaccuggacccugagcgacagcgagggcgaggacacccccggcggcuacugccugaccagauggaugcugaucgaggccgagcugaagugcuucggcaacaccgccguggccaagugcaacgagaagcacgacgaggaguucugcgacaugcugagacuguucgacuucaacaagcaggccauccagagacugaaggcccccgcccagaugagcauccagcugaucaacaaggccgugaacgcccugaucaacgaccagcugaucaugaagaaccaccugagagacaucaugugcauccccuacugcaacuacagcaaguacugguaccugaaccacaccaccaccggcagaaccagccugcccaagugcuggcuggugagcaacggcagcuaccugaacgagacccacuucagcgacgacaucgagcagcaggccgacaacaugaucaccgagaugcugcagaaggaguacauggagagacagggcaagaccccccugggccugguggaccuguucguguucagcaccagcuucuaccugaucagcaucuuccugcaccuggugaagauccccacccacagacacaucgugggcaagagcugccccaagccccacagacugaaccacaugggcaucugcagcugcggccuguacaagcagcccggcgugcccgugaaguggaagagaugaggacuaguuauaagacugacuagcccgaugggccucccaacgggcccuccuccccuccuugcaccgagauuaauaaaaaaaaaaaaaaaaaaaaaaaaaaaaaaaaaaaaaaaaaaaaaaaaaaaaaaaaaaaaaaaaugcaucccccccccccccccccccccccccccccccaaaggcucuuuucagagccaccagaauu

SEQ ID NO: 7447 - RNA, 1693 nt, Artificial Sequence
  mRNA product Design i-3 comprising derived and/or modified sequence from LASV(LM765-SLE-2012;Clade IV)__AIT17814__GPCstabilized (opt4)
gggagaaagcuuaccaugggccagaucgugaccuucuuccaggaggugccccacgugaucgaggaggugaugaacaucgugcugaucgcccugagcauccuggccgugcugaagggccuguacaacuucgccaccugcggccuggugggccuggugaccuuccugcugcugugcggcagaagcugcaccaccagccuguacaagggcguguacgagcugcagacccuggagcugaacauggagacccugaacaugaccaugccccugagcugcaccaagaacaacagccaccacuacaucauggugggcaacgagaccggccuggagcugacccugaccaacaccagcaucaucgaccacaaguucugcaaccugagcgacgcccacagaaagaaccuguacgaccacgcccugaugagcaucaucagcaccuuccaccugagcauccccaacuucaaccaguacgaggccaugagcugcgacuucaacggcggcaagaucagcgugcaguacaaccugagccacagcuacgccaaggacgccgccgaccacugcggcaccguggccaacggcgugcugcagaccuucaugagaauggccuggggcggcagcuacaucgcccuggacagcggcugcggcagaugggacugcaucaugaccagcuaccaguaccugaucauccagaacaccaccugggaggaccacugccaguucagcagacccagccccaucggcuaccugggccugcugagccagagaaccagagacaucuacaucagcagaagacgccggggcaccuucaccuggacccugagcgacagcgagggcaaggacacccccggcggcuacugccugaccagauggaugcugaucgaggccgagcugaagugcuucggcaacaccgccguggccaagugcaacgagaagcacgacgaggaguucugcgacaugcugagacuguucgacuucaacaagcaggccauccagagacugaaggcccccgcccagaugagcauccagcugaucaacaaggccgugaacgcccugaucaacgaccagcugaucaugaagaaccaccugagagacaucaugugcauccccuacugcaacuacagcaaguacugguaccugaaccacaccaccaccggcaagaccagccugcccaagugcuggcuggugagcaacggcagcuaccugaacgagacccacuucagcgacgacaucgagcagcaggccgacaacaugaucaccgagaugcugcagaaggaguacauggagagacagggcaagaccccccugggccugguggaccuguucguguucagcaccagcuucuaccugaucagcaucuuccugcaccuggugaagauccccacccacagacacaucgugggcaagcccugccccaagccccacagacugaaccacaugggcaucugcagcugcggccuguacaagcagcccggcgugcccgugaaguggaagagaugaggacuaguuauaagacugacuagcccgaugggccucccaacgggcccuccuccccuccuugcaccgagauuaauaaaaaaaaaaaaaaaaaaaaaaaaaaaaaaaaaaaaaaaaaaaaaaaaaaaaaaaaaaaaaaaaugcaucccccccccccccccccccccccccccccccaaaggcucuuuucagagccaccagaauu

SEQ ID NO: 7448 - RNA, 1693 nt, Artificial Sequence
  mRNA product Design i-3 comprising derived and/or modified sequence from LASV(LM776-SLE-2012;Clade IV)__AIT17824__GPCstabilized (opt4)
gggagaaagcuuaccaugggccagaucgugaccuucuuccaggaggugccccacgugaucgaggaggugaugaacaucgugcugaucgcccugagcauccuggccgugcugaagggccuguacaacuucgccaccugcggccuggugggccuggugaccuuccugcugcugugcggcagaagcugcaccaccagcguguacaagggcguguacgagcugcagacccuggagcugaacauggagacccugaacaugaccaugccccugagcugcaccaagaacaacagccaccacuacaucauggugggcaacgagaccggccuggagcugacccugaccaacaccagcaucaucaaccacaaguucugcaaccugagcgacgcccacaagaagaaccuguacgaccacgcccugaugagcaucaucagcaccuuccaccugagcauccccaacuucaaccaguacgaggccaugagcugcgacuucaacggcggcaagaucagcgugcaguacaaccugagccacagcuacgccggcgacgccgccaaccacugcggcaccguggccaacggcgugcugcagaccuucaugagaauggccuggggcggcagcuacaucgcccuggacagcggcugcggcaagugggacugcaucaugaccagcuaccaguaccugaucauccagaacaccaccugggaggaccacugccaguucagcagacccagccccaucggcuaccugggccugcugagccagagaaccagagacaucuacaucagcagaagacgccggggcaccuucaccuggacccugagcgacagcgagggcaaggacacccccggcggcuacugccugaccagauggaugcugaucgaggccgagcugaagugcuucggcaacaccgccguggccaagugcaacgagaagcacgacgaggaguucugcgacaugcugagacuguucgacuucaacaagcaggccauccagagacugaaggcccccgcccagaugagcauccagcugaucaacaaggccgugaacgcccugaucaacgaccagcugaucaugaagaaccaccugagagacaucaugugcauccccuacugcaacuacagcaaguacugguaccugaaccacaccaccaccggcaagaccagccugcccaagugcuggcuggugagcaacggcagcuaccugaacgagacccacuucagcgacgacaucgagcagcaggccgacaacaugaucaccgagaugcugcagaaggaguacauggagagacagggcaagaccccccugggccugguggaccuguucguguucagcaccagcuucuaccugaucagcaucuuccugcaccuggugaagauccccacccacagacacaucgugggcaagagcugccccaagccccacagacugaaccacaugggcaucugcagcugcggccuguacaagcagcccggcgugcccgugagauggaagagaugaggacuaguuauaagacugacuagcccgaugggccucccaacgggcccuccuccccuccuugcaccgagauuaauaaaaaaaaaaaaaaaaaaaaaaaaaaaaaaaaaaaaaaaaaaaaaaaaaaaaaaaaaaaaaaaaugcaucccccccccccccccccccccccccccccccaaaggcucuuuucagagccaccagaauu

SEQ ID NO: 7449 - RNA, 1693 nt, Artificial Sequence
  mRNA product Design i-3 comprising derived and/or modified sequence from LASV(Mad39;Clade IV)__ANH09722__GPCstabilized (opt4)
gggagaaagcuuaccaugggccagaucgugaccuucuuccaggaggugccccacgugaucgaggaggugaugaacaucgugcugaucgcccugagcauccuggccgugcugaagggccuguacaacguggccaccugcggccugaucggccuggugaccuuccugcugcugugcggcagaagcugcaccaccacccuguacaagggcguguacgagcugcaggcccuggagcugaacauggagacccugaacaugaccaugccccugagcugcaccaagaacaacagccaccacuacaucagagugggcaacgagaccggccuggagcugacccugaccaacaccagccugaucaaccacaaguucugcaaccugagcgacgcccacaagaagaaccuguacgaccacgcccugaugagcaucaucagcaccuuccaccugagcauccccaacuucaaccaguacgaggccaugagcugcgacuucaacgacggcaagaucagcgugcaguacaaccugagccacaccuacgccggcgacaccgccaaccacugcggcaccguggccaacggcgugcugcagaccuucaugagaauggccuggggcggcagcuacaucgcccuggacagcggcugcggcggcugggacugcaucaugaccagcuaccaguaccugaucauccagaacaccaccugggaggaccacugccaguucagcagacccagccccaucggcuaccugggccugcugagccagagaaccagagacaucuacaucagcagaagacgccggggcaccuucaccuggacccugagcgacagcgagggcaaggacacccccggcggcuacugccugaccagauggaugcugaucgaggccgagcugaagugcuucggcaacaccgccguggccaagugcaacgagaagcacgacgaggaguucugcgacaugcugagacuguucgacuucaacaagcaggccauccagagacugaaggcccccgcccagaugagcauccagcugaucaacaaggccgugaacgcccugaucaacgaccagcugaucaugaagaaccaccugagagacaucaugugcauccccuacugcaacuacagcaaguacugguaccugaaccacaccgugaccggcaagaccagccugcccaagugcuggcuggugagcaacggcagcuaccugaacgagacccacuucagcgacgacaucgagcagcaggccgacaacaugaucaccgagaugcugcagaaggaguacauggagagacagggcaagaccccccugggccugguggaccuguucguguucagcaccagcuucuaccugaucagcaucuuccugcaccuggugaagauccccacccacagacacguggugggcaagcccugccccaagccccacagacugaaccacaugggcaucugcagcugcggcuucuacaagcagcccggcgugcccgugagauggaagagaugaggacuaguuauaagacugacuagcccgaugggccucccaacgggcccuccuccccuccuugcaccgagauuaauaaaaaaaaaaaaaaaaaaaaaaaaaaaaaaaaaaaaaaaaaaaaaaaaaaaaaaaaaaaaaaaaugcaucccccccccccccccccccccccccccccccaaaggcucuuuucagagccaccagaauu

SEQ ID NO: 7450 - RNA, 1693 nt, Artificial Sequence
  mRNA product Design i-3 comprising derived and/or modified sequence from LASV(Z0947-SLE-2011;Clade IV)__AIT17840__GPCstabilized (opt4)
gggagaaagcuuaccaugggccagaucgugaccuucuuccaggaggugccccacgugaucgaggaggugaugaacaucgugcugaucgcccugagcauccuggccgugcugaagggccuguacaacuucgccaccugcggccuggugggccuggugaccuuccugcugcugugcggcagaagcugcaccaucagccuguacaagggcguguacgagcugcagacccuggagcugaacauggagacccugaacaugaccaugccccugagcugcaccaagaacaacagccaccacuacaucauggugggcaacgagaccggccuggagcugacccugaccaacaccagcaucaucaaccacaaguucugcaaccugagcgacgcccacaagaagaaccuguacgaccacgcccugaugagcaucaucagcaccuuccaccugagcauccccaacuucaaccaguacgaggccaugagcugcgacuucaacggcggcaagaucagcgugcaguacaaccugagccacagcuacgccggcgacgccgccaaccacugcggcaccguggccaacggcgugcugcagaccuucaugagaauggccuggggcggcagcuacaucgcccuggacagcggcugcgacagaugggacugcaucaugaccagcuaccaguaccugaucauccagaacaccaccugggaggaccacugccaguucagcagacccagccccaucggcuaccugggccugcugagccagagaaccagagacaucuacaucagcagaagacgccggggcaccuucaccuggacccugagcgacagcgagggcaaggacacccccggcggcuacugccugaccagauggaugcugaucgaggccgagcugaagugcuucggcaacaccgccguggccaagugcaacgagaagcacgacgaggaguucugcgacaugcugagacuguucgacuucaacaagcaggccauccagagacugaaggcccccgcccagaugagcauccagcugaucaacaaggccgugaacgcccugaucaacgaccagcugaucaugaagaaccaccugagagacaucaugugcauccccuacugcaacuacagcaaguacugguaccugaaccacaccaccaccggcaagaccagccugcccaagugcuggcuggugagcaacggcagcuaccugaacgagacccacuucagcgacgacaucgagcagcaggccgacaacaugaucaccgagaugcugcagaaggaguacauggagagacagggcaagaccccccugggccugguggaccuguucguguucagcaccagcuucuaccugaucagcaucuuccugcaccuggugaagauccccacccacagacacaucgugggcaagcccugccccaagccccacagacugaaccacaugggcaucugcagcugcggccuguacaagcagcccggcgugcccgugaaguggaagagaugaggacuaguuauaagacugacuagcccgaugggccucccaacgggcccuccuccccuccuugcaccgagauuaauaaaaaaaaaaaaaaaaaaaaaaaaaaaaaaaaaaaaaaaaaaaaaaaaaaaaaaaaaaaaaaaaugcaucccccccccccccccccccccccccccccccaaaggcucuuuucagagccaccagaauu

SEQ ID NO: 7451 - RNA, 1693 nt, Artificial Sequence
  mRNA product Design i-3 comprising derived and/or modified sequence from LASV(Josiah;Clade IV)__NP_694870__GPCstabilized (opt5)
gggagaaagcuuaccaugggccagaucgugaccuucuuucaagaggucccccacguuauugaagaggugaugaacaucgugcugauugcccucagcguccuggcugugcuuaaggggcuguacaauuucgccacaugcggacucguuggccuggugacguuucuucugcucugugggagauccugcaccacaucucuguauaaaggagucuacgaacugcagacccucgagcugaacauggaaacacuuaauaugaccaugccucugagcuguacaaagaacaauucccaucacuauaucauggugggcaacgagaccgggcucgagcugacgcuuaccaauacaucuauuaucaaccauaaauucugcaaucugagcgacgcgcacaagaaaaaccucuacgaucaugcucugauguccaucauuucuaccuuucaccugagcaucccgaauuucaaccaguaugaagccauguccugugacuuuaauggaggcaagauuagcguucaguacaaccucucucacuccuaugccggcgaugcugccaaucauugcgggacaguggcuaacggaguccugcaaaccuucaugcggauggccuggggcgggagcuacaucgcgcuugacucuggaugcggcaacugggauuguauuaugacguccuaccaguaucugaucauucagaauacaaccugggaggaccacugccaguuuagcagacccucuccuaucggguaccucggacugcuuucccaacggacacgcgauaucuauauuagcagacggcgccggggcaccuucaccuggacacuguccgacucugaaggcaaggauacgcccgggggauacugucugacccgcuggaugcucaucgaggccgagcugaaaugcuuuggcaacacagcuguggccaaguguaaugaaaaacaugacgaggaguucugcgauaugcuuagacuguuugacuucaacaagcaggcuauucagcggcucaaagcccccgcgcagaugagcauccaacugauuaauaaggccgugaacgcucuuaucaaugaucagcugaucaugaagaaccaccuccgcgacauuaugugcaucccuuauugcaauuacuccaaauauugguaccugaaccacaccacaaccggaagaacgagccugcccaaguguuggcucgucucuaauggcuccuaccugaacgaaacacauuucagcgacgauauugagcagcaagccgacaauaugaucaccgagaugcuucagaaagaauauauggagcggcaggggaagaccccucugggacucguugaucuguuuguguucucuaccagcuuuuaccugauuuccaucuuccuucaccucgugaaaaucccgacacaucgccacauugucggcaagucuugccccaaaccucauagacugaaccacaugggcaucuguagcugcgggcuguauaagcagcccggagugccuguuaaguggaaacggugaggacuaguuauaagacugacuagcccgaugggccucccaacgggcccuccuccccuccuugcaccgagauuaauaaaaaaaaaaaaaaaaaaaaaaaaaaaaaaaaaaaaaaaaaaaaaaaaaaaaaaaaaaaaaaaaugcaucccccccccccccccccccccccccccccccaaaggcucuuuucagagccaccagaauu

SEQ ID NO: 7452 - RNA, 1690 nt, Artificial Sequence
  mRNA product Design i-3 comprising derived and/or modified sequence from LASV(LP;Clade I)__AAF86701__GPCstabilized (opt5)
gggagaaagcuuaccaugggccagaucauuaccuucuuucaagaggugccccacgucaucgaagagguuaugaacauugugcugaucgcccucagccugcuugcuauucugaaggggcucuacaauaucgccacaugcggaaucauuggccugguggcguuccuuuuucugugugggaaauccugcucucucacgcugaagggaggcuaugaacugcagacccucgagcugaacauggaaacacuuaauaugaccaugccucugagcuguaccaaaaacuccucucaucacuacaucagagucgggaaugagacaggacucgagcugacacuuaccaacacgagcauuaucaaucauaaguucugcaaccuguccgacgcucacaaaaagaaucucuaugaucaugcccugaugucuauuaucagcaccuuucaccuguccauuccgaacuucaaucaguacgaagccaugagcugugacuuuaacggcggcaagaucucugugcaguauaaucucucccacagcuacgcuggggaugccgcugagcauugcggaacaguugccaacggcgugcugcaaaccuucaugcggauggcguggggagggcgcuauaucgcccuugacucuggcugcgggaauugggauuguauuaugacauccuaccaguaccugaucauucagaacaccacgugggaagaccacugccaguuuagcagacccucuccuaucggauaucucggccugcuuucccaacggacacgcgauauuuacaucagcagacggcgccggggcaccuucacauggacccuguccgacucugaggggaacgagacccccggaggcuauugucugacacgcuggaugcucaucgaagcugagcugaagugcuuugggaauacggccgucgcuaaauguaacgaaaagcaugaugaggaguucugcgacaugcuuagacuguuugauuucaauaaacaggccauucggcgccucaaggcgcccgcccagaugagcauccagcugauuaacaaggcugugaaugcccuuaucaacgaccaacugauuaugaaaaaucaccucagagauaucaugugcaucccuuacugcaacuauuccaaguacugguaucugaaucacaccagcucuggccggacaucccugcccaaauguuggcucauuagcaacgggucuuaccugaaugagacccaguucagcgacgacaucgaacagcaagcugauaacaugauuacagagaugcuucagaaggaauacaucgagcgccagggaaaaaccccucugggccucguugacauuuuuaucuucuccacgucuuuuuaucugauuagcaucuuccugcaucuuaucaagauuccgacacacagacauaucgugggcaaacccugcccuaagccccaccggcucaaucauaugggggucuguuccugcggacuguacaagcacccuggcgugcccaccaaauggaagcgcugaggacuaguuauaagacugacuagcccgaugggccucccaacgggcccuccuccccuccuugcaccgagauuaauaaaaaaaaaaaaaaaaaaaaaaaaaaaaaaaaaaaaaaaaaaaaaaaaaaaaaaaaaaaaaaaaugcaucccccccccccccccccccccccccccccccaaaggcucuuuucagagccaccagaauu

SEQ ID NO: 7453 - RNA, 1690 nt, Artificial Sequence
  mRNA product Design i-3 comprising derived and/or modified sequence from LASV(803213;Clade II)__AAF86703__GPCstabilized (opt5)
gggagaaagcuuaccaugggccagaucauuaccuucuuucaagaggugccccacgucaucgaagagguuaugaacauugugcugaucgcccucagccugcuugcuauucugaaggggaucuacaauguggccacaugcggacucuucggccugaucuccuuucuucugcucugugggagaucuugcagcgucacguauaaaggaguguacgaacugcagacccuggagcucaacauggcgaaucugaacaugacaaugccucuuuccuguaccaagaauaacucucaucacuauauuaugguuggcaaugaaacagggcuggagcucacccugacaaacaccagcaucauuaaucauaaauucugcaaccuuuccgacgcucacaagaaaaaucuguacgaucaugcccucaugucuaucauuagcacguuucaccuguccaucccgaacuucaaucaguaugaggccaugagcugugacuuuaacggaggcaagauuucugugcaguacaaucugucccacagcuucgcugucgaugccgcuaaccauugcggcaccaucgccaacggggugcuccaaacauuuaugcggauggcguggggaggcucuuauaucgcccuggacuccgggugcggaaauugggauuguauuaugaccagcuaccaguaccuuaucauucagaacacaaccugggaagaccacugccaguucucucgccccuccccuaucggcuaucuggggcuccugagccaaagaacgcgggauauuuacaucucccgcagacgccggggaacauuuaccuggacacucucugacagcgagggcaaugaagcucccggcggguauugucugacccgguggaugcugaucgaggccgagcucaaaugcuucggaaacaccgcuguugccaaguguaaugaaaaacaugaugaggaauuuugcgacaugcugcgccuuuucgauuucaacaagcaggcgauuaaaagacugaagacacccgcccagauguccauccagcucauuaauaaggcugugaacgcccugaucaaugaccaacuuauuaugaaaaaccaucugcgggauaucaugugcaucccuuacugcaauuauagccgcuacugguaucucaaccacacggucaccgggaagacaucucugcccagauguuggcugguguccaauggaagcuaccucaacgaaacccacuuuucugacgacauugagcagcaggcugauaauaugaucacagagaugcugcaaaaagaauacauggaccggcagggcaagaccccucuugggcugguggaucucuucgucuuuagcacguccuucuaucugauuucuaucuuucugcaccuuguuaaaauuccgacacaucgccacaucgugggaaagcccugcccuaaaccccauagacucaaccacaugggcauuuguagcugcggccuguacaagcacccuggggugcccgucaaguggaaacggugaggacuaguuauaagacugacuagcccgaugggccucccaacgggcccuccuccccuccuugcaccgagauuaauaaaaaaaaaaaaaaaaaaaaaaaaaaaaaaaaaaaaaaaaaaaaaaaaaaaaaaaaaaaaaaaaugcaucccccccccccccccccccccccccccccccaaaggcucuuuucagagccaccagaauu

SEQ ID NO: 7454 - RNA, 1690 nt, Artificial Sequence
  mRNA product Design i-3 comprising derived and/or modified sequence from LASV(GA391;Clade III)__CAA36645__GPCstabilized (opt5)
gggagaaagcuuaccaugggccagaucgugaccuucuuucaagaggucccccacguuauugaagaggugaugaacaucgugcugauugcccucagcauccuggcuauucuuaaggggcuguacaaugucgccacaugcggacucaucggccuggugacguuccuucugcucuccgggagaucuuguagccugaucuauaaaggaaccuacgaacugcagacacucgagcugaacauggaaacccuuaauaugacaaugccucuguccugcaccaagaacaauucucaucacuauauucggguuggcaacgagacagggcucgagcugacccuuacgaauaccagcauccugaaccauaaauuuuguaaucucuccgacgcgcacaagcgcaaccuguacgaucauucucugaugagcauuaucuccacauuccaccucagcauuccgaauuuuaaccaguaugaagcuaugucuugcgacuucaauggaggcaaaaucaccgugcaguacaaccugucccacagcuuugccgucgaugccgcuggccauugugggacacuugccaauggagugcugcaaaccuucaugagaauggcuuggggcgggucuuauauugcccucgacuccggaugcggcaacugggauugcaucaugacgagcuaccaguaccugaucauucagaacacaaccugggacgaucacugucaguuuucucgccccuccccuaucggguaucuuggacugcucagccaaagaacacgggacauuuacaucucccgcagacgccggggcaccuucaccuggacacucucugauagcgagggcaaugaaacgcccgggggauauugccugacccgguggaugcuuauugaggcggagcugaaguguuuuggcaacacagccguugcuaagugcaaugaaaaacaugacgaggaguucugugauaugcuccgccuguuugacuucaacaagcaggccaucagacggcuuaaaacccccgcucagauguccauccagcugauuaauaaggccgugaacgcgcucaucaaugaucaacugauuaugaaaaaccaucugcgcgacaucaugugcauuccuuacugcaauuauagcagauacugguaucucaaccacacaucuaccggaaagacgucccugccccggugcuggcuuaucagcaauggcucuuaccugaacgaaacaaaguucagcgacgauaucgagcagcaggccgacaauaugauuaccgagaugcuccaaaaagaauacaucgaucgccaggggaagaccccucugggacuggucgaccuuuuuguguucuccacaucuuuuuaucucauuagcaucuuccugcaccuggugaaaauuccgacccacagacauaucgucggcaagcccuguccuaaaccccaccggcucaaccauaugggcauuugcuccugugggcuguacaagcagccuggaguucccgugagauggaaacgcugaggacuaguuauaagacugacuagcccgaugggccucccaacgggcccuccuccccuccuugcaccgagauuaauaaaaaaaaaaaaaaaaaaaaaaaaaaaaaaaaaaaaaaaaaaaaaaaaaaaaaaaaaaaaaaaaugcaucccccccccccccccccccccccccccccccaaaggcucuuuucagagccaccagaauu

SEQ ID NO: 7455 - RNA, 1693 nt, Artificial Sequence
  mRNA product Design i-3 comprising derived and/or modified sequence from LASV(AV;Clade V)__CCA30314__GPCstabilized (opt5)
gggagaaagcuuaccaugggccagaucgugaccuucuuucaagaggucccccacguuauugaagaggugaugaacaucgugcugauugcccucagcauccuggcuguccuuaaggggcuguacaauauugccacaugcggacucaucggccugaucacguuccuucugcucugugggagauccugcucuagcaaccuguauaaaggaguguacgaacugcagucccucgaccugaauauggagacccuuaacaugacaaugccucugucuuguaccaagaauaacagccaucacuauauucggguuggcaaugauacagggcucgaacugacccuuacaaacaccuccauccugaaucauaaauuuugcaaccucucugacgcgcacaagaaagaucuguacgaccaugcucugaugagcauuaucuccacguuccaccucagcauuccgaauuuuaaccaguaugaggccaugucuugugauuucaauggaggcaagaucuccgugcaguacaaccugagccacucuuaugccauugacgcugccaaucauugcggcaccgucgcuaacgggauccuucaaacauuuaugcgcauggccuggggaggcuccuacaucgcgcuggauagcgggugcggaaacugggacuguauuaugaccucuuaccaguaucucaucauucagaauacaaccugggagaaccacugccaguucucccggcccagcccuaucggcuaccuggggcuucugucccaacgcacgagagauauuuauaucucucggcgccgccggggaacauuuaccuggacacugagcgacuccgaaggcaaugccacccccggcggguacugucucaccagauggaugcugaucgaggcugaacuuaagugcuucggaaacacagccguggcuaaauguaaugagaagcaugaugaggaauuuugcgacaugcugcgccucuucgauuuuaacaaacaggccauuagccggcugaagucucccgcgcagauguccauccagcuuauuaauaaagccguuaacgcucugaucaaugaccaacucauuaugaagaaccaccugagagacaucaugugcaucccuuauugcaauuacagcaaguauugguaccugaaccacacgauuaccgggaaaacaucucuccccaaguguuggcuggugagcaauggauccuaccuuaacgaaacccauuucucugaugacaucgagcagcaggccgauaauaugauuacagaaaugcugcaaaaagaguauauggagcggcagggcaagaccccucucgggcuggucgaccuguucguguuuagcacguccuucuaccuuaucagcauuuuucuccgccuggugaaaaucccgacacacagacauauugucggaaagcccugcccuaaaccccaccggcugaaccauaugggcaucuguucuugcggccucuauaagcagccugggguucccgugcgcuggaagagaugaggacuaguuauaagacugacuagcccgaugggccucccaacgggcccuccuccccuccuugcaccgagauuaauaaaaaaaaaaaaaaaaaaaaaaaaaaaaaaaaaaaaaaaaaaaaaaaaaaaaaaaaaaaaaaaaugcaucccccccccccccccccccccccccccccccaaaggcucuuuucagagccaccagaauu

SEQ ID NO: 7456 - RNA, 1690 nt, Artificial Sequence
  mRNA product Design i-3 comprising derived and/or modified sequence from LASV(Togo/2016/7082;Clade VI)__AMR44577__GPCstabilized (opt5)
gggagaaagcuuaccaugggccagaucauuaccuucuuucaagaggugccccacgucaucgaagagguuaugaacauugugcugaucgcccucagccugcuugcuauucugaaggggguguacaaugucgccacaugcggaaucaucggccucgugacguuccuguuucuuugugggagauccugcucucugauuuauaaaggaagcuacgaacuccagacccuggagcugaacauggaaacacucaauaugaccaugccucuguccuguacaaagaacucuagccaucacuauauccggguuggcaaugagaccgggcuugagcugacacucaccaacacguccauuaucaaucauaaauucugcaaccugucugacgcgcacaagcgcaaucuuuacgaucaugcucugaugagcauucucuccaccuuucaccugagcaucccgaacuucaaucaguaugaagccaugucuugugacuuuaacggaggcaaaauuuccgugcaguacaaucugagccacgccuaugcugucgaugccgcugagcauugcggcacaguggccaacgggguucuccaaaccuucaugagaauggcguggggaggcucuuacaucgcccuggacuccgggugcggaaauugggauuguaucaugacaagcuaccaguaucuuauuauccagaacaccacgugggaagaccacugccaguuuucucgccccuccccuauuggcuaccuggggcuccugagccaaagaacacgggauaucuauauuucccgcagacgccggggaaccuucacauggacccucucugacagcgagggcaacgagacccccggcggguacugucugacacgguggaugcugaucgaagcugagcucaagugcuuuggaaauacggccguggcuaaguguaacgaaaaacaugaugaggaguucugcgacaugcugcgccuuuuugauuucaauaagcaggccauccagagacugaaaucccccgcgcagaugagcauucaacucaucaacaaggccgucaaugcucugauuaacgaccagcuuaucaugaaaaaucaucugcgggauaugaugugcauuccuuauugcaacuacucuaaguauugguaccucaaucacaccuccagcgggcgcacaucucugcccaaguguuggcuggugagcaacggauccuaccucaaugagacccacuucucugacgacaucgaacagcaagccgauaacaugaucacagagaugcugcagaaagaauauauugacagacagggcaagaccccucuugggcugguggaucucuuugucuucagcacguccuuuuaccugaucagcauuuuccugcaccuuaucaaaauuccgacacaucggcacaucguuggaaagcccugcccuaaaccccaucgccucaaucacaugggcauuuguucuugcggccuguauaagcagccuggggugcccaccagauggaaacggugaggacuaguuauaagacugacuagcccgaugggccucccaacgggcccuccuccccuccuugcaccgagauuaauaaaaaaaaaaaaaaaaaaaaaaaaaaaaaaaaaaaaaaaaaaaaaaaaaaaaaaaaaaaaaaaaugcaucccccccccccccccccccccccccccccccaaaggcucuuuucagagccaccagaauu

SEQ ID NO: 7457 - RNA, 1690 nt, Artificial Sequence
  mRNA product Design i-3 comprising derived and/or modified sequence from LASV(KAK-428;Clade n.d. (VII))__ANH09740__GPCstabilized (opt5)
gggagaaagcuuaccaugggccagaucgugaccuucuuucaagaggucccccacguuauugaagaggugaugaacaucgugcugauugcccucagccugcuugcuauccugaaggggcucuacaauuucgccacaugcggagucauuggccugaucacguuucuucugcucugugggagauccugcucugcgaccuauaaaggacaguacgaacugcagacacuggagcucaacauggaaagccugaauaugaccaugccucuuuccuguacaaagaacaauucucaucacuauauccgggcuggcaacaauaccgggcuggagcucacacugaccaacacgagcauuaucucccauaaauucugcaaucuuucugacgcccacaagaaaaaccuguacgaucauacccucaugagcauuaucacaaccuuucaccuguccauuccgaauuucaaccaguaugaggccaugagcugugacuuuaauggaggcaagaucucuauucaauacaaccugucccacagcuaugcuggcgaugccgcucagcauugcgggacaguggccaauggaguucuccagaccuucaugcgcauggcguggggcgggucuuaccuggcccuugacuccggaugccggggcugggauuguaucaucagcucuuaccaguaucugauuauccaaaacacgacaugggacgaucacugccaguuuucccgccccagcccuauuggguaccucggauucgugucccagaagaccagagacaucuauauuucucggcgccgccggggcacauuuaccuggacccugagcgauuccgaaggccaugacaugcccgggggauacugucucacaagauggaugcugaucgaggcugaucugaaaugcuucggcaacacggccgucgcuaaguguaaugaaaaacacgacgaggaguuuugcgauauguggcgccucuucgacuucaacaagcaggccauccaacggcugaaagcgcccgcccagaugaauauucagcuuaucaacaaggcugugaaugcccugauuaacgaccaacucaugaugaagaaucaccugagagauaucaugugcauuccuuauugcaacuacagcaaauuuugguaucuuaauaacaccacaaccggacggacaucucugccccgcuguuggcucaucuccaauggcagcuaccugaacgagacccauuucucugacgauaucgaacagcaggcugacaauaugauuacggagaugcugcagaaggaauacauggauagacaagggaaaacaccucucggacugguugaccuuuuuguguucagcaccuccuuuuaucugaucaccauuuuccuccaccuggucaagaucccgacacaucggcacauugugggcaaacccugcccuaagccccaucgccugaaccacaugggcaucuguucuugcgggcuuuacaaacagccuggagugcccgucagauggaagcggugaggacuaguuauaagacugacuagcccgaugggccucccaacgggcccuccuccccuccuugcaccgagauuaauaaaaaaaaaaaaaaaaaaaaaaaaaaaaaaaaaaaaaaaaaaaaaaaaaaaaaaaaaaaaaaaaugcaucccccccccccccccccccccccccccccccaaaggcucuuuucagagccaccagaauu

SEQ ID NO: 7458 - RNA, 1690 nt, Artificial Sequence; identical to SEQ ID NO: 7452
  mRNA product Design i-3 comprising derived and/or modified sequence from LASV(Pinneo-NIG-1969;Clade I)__AIT17836__GPCstabilized (opt5)

SEQ ID NO: 7459 - RNA, 1690 nt, Artificial Sequence
  mRNA product Design i-3 comprising derived and/or modified sequence from LASV(ISTH0009-NIG-2011;Clade II)__AIT17404__GPCstabilized (opt5)
gggagaaagcuuaccaugggccagaucauuaccuucuuucaagaggugccccacgucaucgaagagguuaugaacauugugcugaucgcccucagccugcuugcuauucugaaggggaucuacaauguggccacaugcggacucuucggccuggucuccuuucuucugcucugugggagaucuugcagcacgaccuauaaaggaguguacgaacugcagacacuggagcucgacauggcgucccugaacaugaccaugccucuuucuuguacaaagaauaacagccaucacuauaucaugguuggcaaugaaaccgggcuggagcucacacugaccaacacguccauuaucaaucauaaauucugcaaccuuucugaugcucacaagaaaaaucuguacgaccaugcccucaugagcauuaucuccaccuuucaccugagcauuccgaacuucaaucaguaugaggccaugucuugugauuuuaacggaggcaagaucuccgugcaguacaaucugagccacgcuuaugccgucgacgcugccaaccauugcggcacaauugcgaauggggugcuccaaaccuucaugcggauggccuggggaggcucuuacaucgcucuggauuccgggugcggaagcugggacuguaucaugacaucuuaccaguaucuuauuauccagaacaccacgugggaagaucacugccaguuuucccgccccagcccuauuggcuaccuggggcuccugucccaaagaacacgggacaucuauauuucucgcagacgccggggaaccuucacauggacccucagcgauuccgagggcaacgaaacccccggcggguacugucugacacgguggaugcugaucgaggccgagcucaaaugcuuuggaaauacggcuguugccaaguguaacgaaaaacaugacgaggaguucugcgauaugcugcgccuuuuugacuucaauaagcaggcgaucagacggcugaaaacccccgcccagaugagcauucagcucaucaacaaggcugugaaugcccugauuaacgaucaacuuaucaugaagaaucaucugcgcgacauuaugugcaucccuuauugcaacuacucuaaauauugguaccucaaucacacagucaccgggaagacaucccugcccagauguuggcuggugagcaacggaucuuaccucaaugaaacccacuucagcgacgauaucgagcagcaggcugacaacaugauuacggagcugcuucaaaaagaauauauggaucggcagggcaagacaccucuggggcucguggaccuguuugucuucuccaccucuuuuuaccugaucagcauuuuccuucaccucaucaaaauuccgacccaucgccacaucacaggaaagcccugcccuaaaccccauagacugaaucacaugggcauuuguuccugcggccuguauaagcacccugggguucccgugaaguggaaacggugaggacuaguuauaagacugacuagcccgaugggccucccaacgggcccuccuccccuccuugcaccgagauuaauaaaaaaaaaaaaaaaaaaaaaaaaaaaaaaaaaaaaaaaaaaaaaaaaaaaaaaaaaaaaaaaaugcaucccccccccccccccccccccccccccccccaaaggcucuuuucagagccaccagaauu

SEQ ID NO: 7460 - RNA, 1690 nt, Artificial Sequence
  mRNA product Design i-3 comprising derived and/or modified sequence from LASV(ISTH2010-NIG-2012;Clade II)__AIT17482__GPCstabilized (opt5)
gggagaaagcuuaccaugggccagaucauuaccuucuuucaagaggugccccacgucaucgaagagguuaugaacauugugcugaucgcccucagccugcuugcuauucugaaggggaucuacaauguggccacaugcggacucuucggccuggucuccuuucuucugcucugugggagaucuugcagcacgaccuauaaaggaguguacgaacugcagacacuggagcucgacauggcgucccugaacaugaccaugccucuuucuuguacaaagaauaacagccaucacuauaucaugguuggcaaugaaaccgggcuggagcucacacugaccaacacguccauuaucaaucauaaauucugcaaccuuucugaugcucacaagaaaaaucuguacgaccaugcccucaugagcauuaucuccaccuuucaccugagcauuccgaacuucaaucaguaugaggccaugucuugugauuuuaacggaggcaagaucuccgugcaguacaaucugagccacgcuuaugccgucgacgcugccaaccauugcggcacaauugcgaauggggugcuccaaaccuucaugcggauggccuggggaggcucuuacaucgcucuggauuccgggugcggaagcugggacuguaucaugacaucuuaccaguaucuuauuauccagaacauuaccugggaagaucacugccaguuuucccgccccagcccuaucggcuaccuggggcuccugucccaaagaacgcgggacauuuauaucucucgcagacgccggggaacauucaccuggacacucagcgauuccgagggcaacgaaacccccggcggguacugucugacccgguggaugcugaucgaggccgagcucaaaugcuuuggaaauacagcuguugccaaguguaacgaaaaacaugacgaggaguucugcgauaugcugcgccuuuuugacuucaauaagcaggcgauuagacggcugaaaacgcccgcccagaugagcauccagcucauuaacaaggcugugaaugcccugaucaacgaucaacuuauuaugaagaaucaucugcgcgacaucaugugcaucccuuauugcaacuacucuaaauauugguaccucaaucacaccgucacagggaagaccucccugcccagauguuggcuggugagcaacggaucuuaccucaaugaaacacacuucagcgacgauauugagcagcaggcugacaacaugaucaccgagcugcuucaaaaagaauauauugaucggcagggcaagacgccucuggggcucguggaccuguuugucuucuccacaucuuuuuaccugaucagcauuuuccuucaccucguuaaaaucccgacccaucgccacguggugggaaagcccugcccuaaaccccauagacugaaucacaugggcauuuguuccugcggccuguauaagcacccugggguccccgugaaguggaaacggugaggacuaguuauaagacugacuagcccgaugggccucccaacgggcccuccuccccuccuugcaccgagauuaauaaaaaaaaaaaaaaaaaaaaaaaaaaaaaaaaaaaaaaaaaaaaaaaaaaaaaaaaaaaaaaaaugcaucccccccccccccccccccccccccccccccaaaggcucuuuucagagccaccagaauu

SEQ ID NO: 7461 - RNA, 1690 nt, Artificial Sequence
  mRNA product Design i-3 comprising derived and/or modified sequence from LASV(Lassa virus/H.sapiens-wt/NGA/2015/ISTH_0543;Clade II)__AVO03639__GPCstabilized (opt5)
gggagaaagcuuaccaugggccagaucauuaccuucuuucaagaggugccccacgucaucgaagagguuaugaacauugugcugaucgcccucagccugcuugcuauucugaaggggaucuacaauguggccacaugcggacucuucggccuggucuccuuucuucugcucugugggagaucuugcagcacgaccuauaaaggaguguacgaacugcagacacuggagcucgacauggcgaaccugaauaugaccaugccucuuuccuguacaaagaacaauucucaucacuauaucaugguuggcaacgaaaccgggcuggagcucacacugaccaauacgagcauuaucaaccauaaauucugcaaucuuuccgaugcucacaagaaaaaccuguacgaccaugcccucaugucuauuaucagcaccuuucaccuguccauuccgaauuucaaccaguaugaggccaugagcugugauuuuaauggaggcaagaucucugugcaguacaaccugucccacacauaugcugucgacgccgcuaaucauugcggcaccauugccaacggggugcuccaaacauucaugcggauggcguggggaggcagcuacaucgcccuggauucugggugcggauccugggacuguaucaugaccagcuaccaguaucuuguuauucagaacacgacaugggaagaucacugccaguuuucucgccccuccccuaucggcuaccuggggcuccugagccaaagaacccgggacauuuauaucucccgcagacgccggggaacauucaccuggacccucucugauagcgagggcaaugaaacacccggcggguacugucugacgcgguggaugcugauugaggcugagcucaaaugcuuuggaaacaccgccguggcuaaguguaaugaaaaacaugacgaggaguucugcgauaugcugcgccuuuuugacuucaacaagcaggccaucagacggcugaaaacacccgcgcagauguccauccagcucauuaauaaggccgucaacgcucugaucaaugaucaacuuauuaugaagaaccaucugcgcgacaucaugugcauuccuuauugcaauuacagcaaauauugguaccucaaccacaccgugacagggaagaccucucugcccagauguuggcugguguccaauggaagcuaccucaacgaaacgcacuucucugacgauaucgagcagcaggccgacaauaugaucacagagcugcuucaaaaagaauauauugaucggcagggcaagaccccucuggggcucgucgaccuguuuguuuucagcaccuccuuuuaccugaucucuauuuuccuucaccucgugaaaaucccgacacaucgccacauuaccggaaagcccugcccuaaaccccauagacugaaccacaugggcaucuguagcugcggccuguauaagcacccuggggugcccgucaaguggaaacggugaggacuaguuauaagacugacuagcccgaugggccucccaacgggcccuccuccccuccuugcaccgagauuaauaaaaaaaaaaaaaaaaaaaaaaaaaaaaaaaaaaaaaaaaaaaaaaaaaaaaaaaaaaaaaaaaugcaucccccccccccccccccccccccccccccccaaaggcucuuuucagagccaccagaauu

SEQ ID NO: 7462 - RNA, 1690 nt, Artificial Sequence
  mRNA product Design i-3 comprising derived and/or modified sequence from LASV(Lassa virus/H.sapiens-wt/NGA/2016/ISTH_0009;Clade II)__AVO03571__GPCstabilized (opt5)
gggagaaagcuuaccaugggccagaucauuaccuucuuucaagaggugccccacgucaucgaagagguuaugaacauugugcugaucgcccucagccugcuugcuauucugaaggggaucuacaauguggccacaugcggacuccugggccuugucuccuuccugcuccugugugggagaucuugcagcacgaccuauaaaggaguguacgaacugcagacacucgagcuggacauggcgucccuuaacaugaccaugccucugucuuguacaaagaauaacagccaucacuauaucaugguuggcaaugaaaccgggcucgagcugacacuuaccaacacguccauuaucaaucauaaauuuugcaaccugucugaugcucacaagaaaaaucucuacgaccaugcccugaugagcauuaucuccaccuuccaccugagcauuccgaacuuuaaucaguaugaggccaugucuugugauuucaacggaggccggaucuccgugcaguacaaucucagccacucuuaugcugucgacgccgcuaaccauugcggcacaauugccaauggggugcugcaaaccuuuaugcgcauggcguggggaggcuccuacaucgcccuugauagcgggugcggaucuugggacuguaucaugacauccuaccaguaucugauuauccagaacaccacgugggaagaucacugccaguucagcagacccuccccuauuggcuaccucgggcugcuuucucaacggacacgcgacaucuauauuagcagacggcgccggggaaccuuuacauggacccuguccgauagcgagggcaacgaaacccccggcggguacugucugacacgcuggaugcucaucgaggcugagcugaagugcuucggaaauacggccguugcuaaauguaacgaaaagcaugacgaggaauuuugcgauaugcuuagacuguucgacuuuaauaaacaggccauccggcgccucaagacccccgcgcagaugucuauucagcugaucaacaaagccgugaaugcucuuauuaacgaucaacugaucaugaagaaucaccucagagacauuaugugcaucccuuauugcaacuacuccaaguauugguaccugaaucacacagucaccgggaaaacaagccugccccgguguuggcucgugucuaacggaagcuaccugaaugaaacccauuucuccgacgauaucgagcagcaggccgacaacaugauuacggagcuucugcaaaaggaauauaucgaucgccagggcaaaacaccucucgggcugguggaccuguucgucuuuucuaccagcuucuaccuuauuuccaucuuucuccaccugguuaagauuccgacccauagacacaucacaggaaaacccugcccuaagccccaucggcugaaucacaugggcauuuguagcugcggccucuauaaccacccuggggugcccgugaaauggaagcgcugaggacuaguuauaagacugacuagcccgaugggccucccaacgggcccuccuccccuccuugcaccgagauuaauaaaaaaaaaaaaaaaaaaaaaaaaaaaaaaaaaaaaaaaaaaaaaaaaaaaaaaaaaaaaaaaaugcaucccccccccccccccccccccccccccccccaaaggcucuuuucagagccaccagaauu

SEQ ID NO: 7463 - RNA, 1690 nt, Artificial Sequence
  mRNA product Design i-3 comprising derived and/or modified sequence from LASV(Lassa virus/H.sapiens-wt/NGA/2016/ISTH_0017;Clade II)__AVO03567__GPCstabilized (opt5)
gggagaaagcuuaccaugggccagaucauuaccuucuuucaagaggugccccacgucaucgaagagguuaugaacauugugcugaucgcccucagccugcuugcuauucugaaggggaucuacaauguggccacaugcggacucuucggccuggucuccuuucuucugcucugugggagaucuugcagcacgaccuauaaaggaguguacgaacugcagacacuggagcucgacauggcgucccugaacaugaccaugccucuuucuuguacaaagaauaacagccaucacuauaucaugguuggcaaugaaaccgggcuggagcucacacugaccaacacguccauuaucaaucauaaauucugcaaccuuucugaugcucacaagaaaaaucuguacgaccaugcccucaugagcauuaucuccaccuuucaccugagcauuccgaacuucaaucaguaugaggccaugucuugugauuuuaacggaggcaagaucuccgugcaguacaaucugagccacacauaugcuauugacgccgcuaaccauugcggcaccaucgccaaugggguccuccaaacauucaugcggauggcguggggaggcucuuacaucgcccuggauuccgggugcggaagcugggacuguauuaugaccucuuaccaguaucuuaucauucagaacacgacaugggaagaucacugccaguuuucccgccccagcccuaucggcuaccuggggcuccugucccaaagaacccgggacauuuauaucucucgcagacgccggggaacauucaccuggacccucagcgauuccgagggcaacgaaacacccggcggguacugucugacgcgguggaugcugaucgaggcugagcucaaaugcuuuggaaauaccgccguggcuaaguguaacgaaaaacaugacgaggaguucugcgauaugcugcgccuuuuugacuucaauaagcaggccauuagacggcugaaaacacccgcgcagaugagcauccagcucauuaacaaggccguuaaugcucugaucaacgaucaacuuauuaugaagaaucaucugcgcgacaucaugugcaucccuuauugcaacuacucuaaauauugguaccucaaucacaccgugacagggaagaccucccugcccagauguuggcuggucagcaacggaucuuaccucaaugaaacgcacuucagcgacgauauugagcagcaggccgacaacaugaucacagagcugcuucaaaaagaauauauggaucggcagggcaagaccccucuggggcucguggaccuguuuguguucuccaccucuuuuuaccugauuagcaucuuccuucaccucguccgcauuccgacacauagacacguuaucggaaaacccugcccuaagccccaucggcugaaucacaugggcauuuguuccugcggccuguauaaacacccuggggugcccgugaaguggaagcgcugaggacuaguuauaagacugacuagcccgaugggccucccaacgggcccuccuccccuccuugcaccgagauuaauaaaaaaaaaaaaaaaaaaaaaaaaaaaaaaaaaaaaaaaaaaaaaaaaaaaaaaaaaaaaaaaaugcaucccccccccccccccccccccccccccccccaaaggcucuuuucagagccaccagaauu

SEQ ID NO: 7464 - RNA, 1690 nt, Artificial Sequence
  mRNA product Design i-3 comprising derived and/or modified sequence from LASV(Lassa virus/H.sapiens-wt/NGA/2018/ISTH_0959;Clade II)__AVV65099__GPCstabilized (opt5)
gggagaaagcuuaccaugggccagaucauuaccuucuuucaagaggugccccacgucaucgaagagguuaugaacauugugcugaucgcccucagccugcuugcuauucugaaggggaucuacaauguggucacaugcggacucuucggccugguguccuuucuucugcucugugggagaucuugcagcacgaccuauaaaggaguuuacgaacugcagacacuggagcucgacauggccucccugaacaugaccaugccucuuucuuguacaaagaauaacagccaucacuauaucauggugggcaaugaaaccgggcuggagcucacacugaccaacacguccauuaucaaucauaaauucugcaaccuuucugaugcgcacaagaaaaaucuguacgaccaugcucucaugagcauuaucuccaccuuucaccugagcauuccgaacuucaaucaguaugaggccaugucuugugauuuuaacggaggcaagaucuccguccaguacaaucugagccacgccuaugcuauugacgccgcuaaccauugcggcacaaucgccaauggggugcuccaaaccuucaugcggauggcguggggaggcucuuacaucgcccuggauuccgggugcggaagcugggacuguauuaugacaucuuaccaguaucuuaucauucagaacaccacgugggaagaucacugccaguuuucccgccccagcccuaucggcuaccuggggcuccugucccaaagaacacgggacauuuauaucucucgcagacgccggggaaccuucacauggacccucagcgauuccgagggcaacgaaacccccggcggguacugucugacacgguggaugcugaucgaggcugagcucaaaugcuuuggaaauacggccguugcuaaguguaacgaaaaacaugacgaggaguucugcgauaugcugcgccuuuuugacuucaauaagcaggccauuagacggcugaaaacccccgcgcagaugagcauccagcucauuaacaaggccgugaaugcucugaucaacgaucaacuuauuaugaagaaucaucugcgcgacaucaugugcaucccuuauugcaacuacucuaaauauugguaccucaaucacacagucaccgggaagacaucccugcccagauguuggcuggugagcaacggaucuuaccucaaugaaacccacuucagcgacgauauugagcagcaggccgacaacaugaucacggagcugcuucaaaaagaauauauugaucggcagggcaagacaccucuggggcucguggaccuguuugucuucuccaccucuuuuuaccugaucagcauuuuccuucaccucguuaaaaucccgacccaucgccacgugauuggaaagcccugcccuaaaccccauagacugaaucacaugggcaucuguuccugcggccuguauaagcacccuggggugcccgucaaguggaaacggugaggacuaguuauaagacugacuagcccgaugggccucccaacgggcccuccuccccuccuugcaccgagauuaauaaaaaaaaaaaaaaaaaaaaaaaaaaaaaaaaaaaaaaaaaaaaaaaaaaaaaaaaaaaaaaaaugcaucccccccccccccccccccccccccccccccaaaggcucuuuucagagccaccagaauu

SEQ ID NO: 7465 - RNA, 1690 nt, Artificial Sequence
  mRNA product Design i-3 comprising derived and/or modified sequence from LASV(LASV003-NIG-2008;Clade II)__AIT17580__GPCstabilized (opt5)
gggagaaagcuuaccaugggccagaucauuaccuucuuucaagaggugccccacgucaucgaagagguuaugaacauugugcugaucgcccucagccugcuugcuauucugaaggggaucuacaauguggccacaugcggacucuucggccuggucuccuuucuucugcucugugggagaucuugcagcacgaccuauaaaggaguguacgaacugcagacacuggagcucgacauggcgucccugaacaugaccaugccucuuucuuguacaaagaauaacagccaucacuauaucaugguuggcaaugaaaccgggcuggagcucacacugaccaacacguccauuaucaaucauaaauucugcaaccuuucugaugcucacaagaaaaaucuguacgaccaugcccucaugagcauuaucuccaccuuucaccugagcauuccgaacuucaaucaguaugaggccaugucuugugauuuuaacggaggcaagaucuccgugcaguacaaucugagccacacauaugcugucgacgccgcuaaccauugcggcaccauugccaauggggugcuccaaacauucaugcggauggcguggggaggcucuuacaucgcccuggauuccgggugcggaagcugggacuguaucaugaccucuuaccaguaucuuauuauccagaacacgacaugggaagaucacugccaguuuucccgccccagcccuauuggcuaccuggggcuccugucccaaagaacccgggacaucuauauuucucgcagacgccggggaacauucaccuggacccucagcgauuccgagagcaacgaaacacccggcggcuacugucugacgcgguggaugcugaucgaggcugagcucaaaugcuuugggaauaccgccguugcuaaguguaacgaaaaacaugacgaggaguucugcgauaugcugcgccuuuuugacuucaauaagcaggccaucagacggcugaaagcgcccgcccagaugucuauucagcucaucaacaaggcugugaaugcccugauuaacgaucaacuuaucaugaagaaucaucugcgcgacauuaugugcaucccuuauugcaacuacuccaaauauugguaccucaaucacacagucaccggcagaacaagccugccccgguguuggcuggugucuaacgggagcuaccucaaugaaacccacuucuccgacgauaucgagcagcaggcugacaacaugauuacggagcugcuucaaaaggaauauauggaucgccagggaaaaacaccucugggccucguggaccuguuugucuucucuaccagcuuuuaccugaucuccauuuuccuucaccucguuaagaucccgacccauagacacgugauugggaaacccugcccuaagccccaucggcugaaucacaugggaaucuguagcugcggccuguauaaacacccuggcgugcccgucaaguggaagcgcugaggacuaguuauaagacugacuagcccgaugggccucccaacgggcccuccuccccuccuugcaccgagauuaauaaaaaaaaaaaaaaaaaaaaaaaaaaaaaaaaaaaaaaaaaaaaaaaaaaaaaaaaaaaaaaaaugcaucccccccccccccccccccccccccccccccaaaggcucuuuucagagccaccagaauu

SEQ ID NO: 7466 - RNA, 1690 nt, Artificial Sequence
  mRNA product Design i-3 comprising derived and/or modified sequence from LASV(LASV035-NIG-2009;Clade II)__AIT17588__GPCstabilized (opt5)
gggagaaagcuuaccaugggccagaucauuaccuucuuucaagaggugccccacgucaucgaagagguuaugaacauugugcugaucgcccucagccugcuugcuauucugaaggggaucuacaauguggccacaugcggacucuucggccuggucuccuuucuucugcucugugggagaucuugcagcacgaccuauaaaggaguguacgaacugcagacacuggagcucgacauggcgucccugaacaugaccaugccucuuucuuguacaaagaauaacagccaucacuauaucaugguuggcaaugaaaccgggcuggagcucacacugaccaacacguccauuaucaaucauaaauucugcaaccuuucugaugcucacaagaaaaaucuguacgaccaugcccucaugagcauuaucuccaccuuucaccugagcauuccgaacuucaaucaguaugaggccaugucuugugauuuuaacggaggcaagaucuccgugcaguacaaucugagccacgcuuaugccgucgacgcugccaaccauugcggcacaauugcgaauggggugcuccaaaccuucaugcggauggccuggggaggcucuuacaucgcucuggauuccgggugcggaagcugggacuguaucaugacaucuuaccaguaucuuauuauccagaacaccacgugggaagaucacugccaguuuucccgccccagcccuauuggcuaccuggggcuccugucccaaagaacacgggacaucuauauuucucgcagacgccggggaaccuucacauggacccucagcgauuccgagggcaacgaaacccccggcggguacugucugacacgguggaugcugaucgaggccgagcucaaaugcuuuggaaauacggcuguugccaaguguaacgaaaaacaugacgaggaguucugcgauaugcugcgccuuuuugacuucaauaagcaggcgaucagacggcugaaagcccccgcucagaugagcauucagcucaucaacaaggccgugaaugcucugauuaacgaucaacuuaucaugaagaaucaucugcgcgacauuaugugcaucccuuauugcaacuacucuaaauauugguaccucaaucacaccgucacagggaagaccucccugcccagauguuggcuggugagcaacggaucuuaccucaaugaaacacacuucagcgacgauaucgagcagcaggccgacaacaugauuaccgagcugcuucaaaaagaauauaucgaucggcagggcaagacgccucuggggcucguggaccuguuugucuucuccacaucuuuuuaccugauuagcaucuuccuucaccucguuaaaauuccgacccaucgccacgugaucggaaagcccugcccuaaaccccauagacugaaucacaugggcauuuguuccugcggccuguauaagcacccuggggugcccgucaaguggaaacggugaggacuaguuauaagacugacuagcccgaugggccucccaacgggcccuccuccccuccuugcaccgagauuaauaaaaaaaaaaaaaaaaaaaaaaaaaaaaaaaaaaaaaaaaaaaaaaaaaaaaaaaaaaaaaaaaugcaucccccccccccccccccccccccccccccccaaaggcucuuuucagagccaccagaauu

SEQ ID NO: 7467 - RNA, 1690 nt, Artificial Sequence
  mRNA product Design i-3 comprising derived and/or modified sequence from LASV(LASV1000-NIG-2009;Clade II)__AIT17782__GPCstabilized (opt5)
gggagaaagcuuaccaugggccagaucauuaccuucuuucaagaggugccccacgucaucgaagagguuaugaacauugugcugaucgcccucagccugcuugcuauucugaaggggaucuacaauguggccacaugcggacucuucggccuggucuccuuucuucugcucugugggagaucuugcagcacgaccuauaaaggaguguacgaacugcagacacuggagcucgacauggcgucccugaacaugaccaugccucuuucuuguacaaagaauaacagccaucacuauaucaugguuggcaaugaaaccgggcuggagcucacacugaccaacacguccauuaucaaucauaaauucugcaaccuuucugaugcucacaagaaaaaucuguacgaccaugcccucaugagcauuaucuccaccuuucaccugagcauuccgaacuucaaucaguaugaggccaugucuugugauuuuaacggaggcaagaucuccgugcaguacaaucugagccacacauaugcugucgacgccgcuaaccauugcggcaccauugccaauggggugcuccaaacauucaugcggauggcguggggaggcucuuacaucgcccuggauuccgggugcggaagcugggacuguaucaugaccucuuaccaguaucuuauuauccagaacacgacaugggaagaucacugccaguuuucccgccccagcccuauuggcuaccuggggcuccugucccaaagaacccgggacaucuauauuucucgcagacgccggggaacauucaccuggacccucagcgauuccgagggcaacgaaacacccggcggguacugucugacgcgguggaugcugaucgaggcugagcucaaaugcuuuggaaauaccgccguugcuaaguguaacgaaaaacaugacgaggaguucugcgauaugcugcgccuuuuugacuucaauaagcaggccaucaaaagacugaagacacccgcgcagaugagcauucagcucaucaacaaggccgugaaugcucugauuaacgaucaacuuaucaugaaaaaucaucugcgggacauuaugugcaucccuuauugcaacuacucuaaguauugguaccucaaucacaccgucacagggaaaaccucccugccccgcuguuggcuggugagcaacggaucuuaccucaaugaaacgcacuucagcgacgauaucgagcagcaggccgacaacaugauuacagagcugcuucaaaaggaauauaucgauagacagggcaaaaccccucuggggcucguggaccuguuugucuucuccaccucuuuuuaccugauuagcaucuuccuucaccucguuaagauuccgacacaucggcacguggugggaaaacccugcccuaagccccaucgccugaaucacaugggcaucuguuccugcggccuguauaagcacccugggguccccgugaaauggaagagaugaggacuaguuauaagacugacuagcccgaugggccucccaacgggcccuccuccccuccuugcaccgagauuaauaaaaaaaaaaaaaaaaaaaaaaaaaaaaaaaaaaaaaaaaaaaaaaaaaaaaaaaaaaaaaaaaugcaucccccccccccccccccccccccccccccccaaaggcucuuuucagagccaccagaauu

SEQ ID NO: 7468 - RNA, 1690 nt, Artificial Sequence
  mRNA product Design i-3 comprising derived and/or modified sequence from LASV(LASV221-NIG-2010;Clade II)__AIT17624__GPCstabilized (opt5)
gggagaaagcuuaccaugggccagaucauuaccuucuuucaagaggugccccacgucaucgaagagguuaugaacauugugcugaucgcccucagccugcuugcuauucugaaggggaucuacaauguggccacaugcggacucuucggccuggucuccuuucuucugcucugugggagaucuugcagcacgaccuauaaaggaguguacgaacugcagacacuggagcucgacauggcgucccugaacaugaccaugccucuuucuuguacaaagaauaacagccaucacuauaucaugguuggcaaugaaaccgggcuggagcucacacugaccaacacguccauuaucaaucauaaauucugcaaccuuucugaugcucacaagaaaaaucuguacgaccaugcccucaugagcauuaucuccaccuuucaccugagcauuccgaacuucaaucaguaugaggccaugucuugugauuuuaacggaggcaagaucuccgugcaguacaaucugagccacacauaugcuauugacgccgcuaaccauugcggcaccaucgccaaugggguccuccaaacauucaugcggauggcguggggaggcucuuacaucgcccuggauuccgggugcggaagcugggacuguauuaugaccucuuaccaguaucuuaucauucagaacacgacaugggaagaucacugccaguuuucccgccccagcccuaucggcuaccuggggcuccugucccaaagaacccgggacauuuauaucucucgcagacgccggggaacauucaccuggacccucagcgauuccgagggcaacgaaacacccggcggguacugucugacgcgguggaugcugaucgaggcugagcucaaaugcuuuggaaauaccgccguggcuaaguguaacgaaaaacaugacgaggaguucugcgauaugcugcgccuuuuugacuucaauaagcaggccauuagacggcugaaaacacccgcgcagaugagcauccagcucauuaacaaggccguuaaugcucugaucaacgaucaacuuauuaugaagaaucaucugcgcgacaucaugugcaucccuuauugcaacuacucuaaauauugguaccucaaucacaccgugacagggaagaccucccugcccagauguuggcuggucagcaacggaucuuaccucaaugaaacgcacuucagcgacgauauugagcagcaggccgacaacaugaucacagagaugcugcaaaaagaauauauggaucggcagggcaagaccccucuugggcugguggaccucuuuguguucuccaccucuuuuuaccugauuagcaucuuccugcaccuugucaaaauuccgacacaucgccacguuaucggaaagcccugcccuaaaccccauagacucaaucacaugggcauuuguuccugcggccuguauaagcacccuggggugcccgugaaguggaaacggugaggacuaguuauaagacugacuagcccgaugggccucccaacgggcccuccuccccuccuugcaccgagauuaauaaaaaaaaaaaaaaaaaaaaaaaaaaaaaaaaaaaaaaaaaaaaaaaaaaaaaaaaaaaaaaaaugcaucccccccccccccccccccccccccccccccaaaggcucuuuucagagccaccagaauu

SEQ ID NO: 7469 - RNA, 1690 nt, Artificial Sequence
  mRNA product Design i-3 comprising derived and/or modified sequence from LASV(LASV237-NIG-2010;Clade II)__AIT17638__GPCstabilized (opt5)
gggagaaagcuuaccaugggccagaucauuaccuucuuucaagaggugccccacgucaucgaagagguuaugaacauugugcugaucgcccucagccugcuugcuauucugaaggggaucuacaauguggccacaugcggacucuucggccuggucuccuuucuucugcucugugggagaucuugcagcacgaccuauaaaggaguguacgaacugcagacacuggagcucgacauggcgucccugaacaugaccaugccucuuucuuguacaaagaauaacagccaucacuauaucaugguuggcaaugaaaccgggcuggagcucacacugaccaacacguccauuaucaaucauaaauucugcaaccuuucugaugcucacaagaaagaccuguacgaucaugcccucaugagcauuaucuccaccuuucaccugagcauuccgaauuucaaccaguaugaggccaugucuugugacuuuaauggaggcaagaucuccgugcaguacaaccugagccacacauaugcugucgaugccgcuaaucauugcggcaccauugccaacggggugcuccaaacauucaugcggauggcguggggaggcucuuacaucgcccuggacuccgggugcggaagcugggauuguaucaugaccucuuaccaguaucuuauuauccagaauacgacaugggaagaccacugccaguuuucccgccccagcccuauuggcuaccuggggcuccugucccaaagaacccgggauaucuauauuucucgcagacgccggggaacauucaccuggacccucagcgacuccgagggcaacgaaacacccggcggguacugucugacgcgguggaugcugaucgaggcugagcucaaaugcuuuggaaacaccgccguugcuaaguguaaugaaaaacaugaugaggaguucugcgacaugcugcgccuuuuugauuucaacaagcaggccaucagacggcugaaaacacccgcgcagaugagcauucagcucaucaauaaggccgugaacgcucugauuaaugaccaacuuaucaugaagaaccaucugcgcgacauuaugugcaucccuuauugcaauuacucuaaauauugguaccucaaccacaccgucacagggaagaccucccugcccagauguuggcuggugagcaauggaucuuaccucaacgaaacgcacuucagcgaugacaucgagcagcaggccgauaauaugauuacagagcugcuucaaaaagaauauauggaccggcagggcaagaccccucuggggcucguggaucuguuugucuucuccaccucuuuuuaccugaucagcauuuuccuucaccucaucaaaauuccgacacaucgccacaucaccggaaagcccugcccuaaaccccauagacugaaccacaugggcauuuguuccugcggccuguauaagcacccugggguucccgugaaguggaaacggugaggacuaguuauaagacugacuagcccgaugggccucccaacgggcccuccuccccuccuugcaccgagauuaauaaaaaaaaaaaaaaaaaaaaaaaaaaaaaaaaaaaaaaaaaaaaaaaaaaaaaaaaaaaaaaaaugcaucccccccccccccccccccccccccccccccaaaggcucuuuucagagccaccagaauu

SEQ ID NO: 7470 - RNA, 1690 nt, Artificial Sequence
  mRNA product Design i-3 comprising derived and/or modified sequence from LASV(LASV253-NIG-2011;Clade II)__AIT17670__GPCstabilized (opt5)
gggagaaagcuuaccaugggccagaucauuaccuucuuucaagaggugccccacgucaucgaagagguuaugaacauugugcugaucgcccucagccugcuugcuauucugaaggggaucuacaauguggccacaugcggacucuucggccuggucuccuuucuucugcucugugggagaucuugcagcacgaccuauaaaggaguguacgaacugcagacacuggagcucgacauggcgucccugaacaugaccaugccucuuucuuguacaaagaauaacagccaucacuauaucaugguuggcaaugaaaccgggcuggagcucacacugaccaacacguccauuaucaaucauaaauucugcaaccuuucugaugcucacaagaaaaaucuguacgaccaugcccucaugagcauuaucuccaccuuucaccugagcauuccgaacuucaaucaguaugaggccaugucuugugauuuuaacggaggcaagaucuccgugcaguacaaucugagccacacauaugcugucgacgccgcuaaccauugcggcaccauugccaauggggugcuccaaacauucaugcggauggcguggggaggcucuuacaucgcccuggauuccgggugcggaagcugggacuguaucaugaccucuuaccaguaucuuauuauccagaacacgacaugggaagaucacugccaguuuucccgccccagcccuauuggcuaccuggggcuccugucccaaagaacccgggacaucuauauuucucgcagacgccggggaacauucaccuggacccucagcgauuccgagggcaacgaaacacccggcggguacugucugacgcgguggaugcugaucgaggcugagcucaaaugcuuuggaaauaccgccguugcuaaguguaacgaaaaacaugacgaggaguucugcgauaugcugcgccuuuuugacuucaauaagcaggccaucagacggcugaaagcgcccgcccagaugagcauucagcucaucaacaaggcugugaaugcccugauuaacgaucaacuuaucaugaagaaucaucugcgcgacauuaugugcaucccuuauugcaacuacucuaaauauugguaccucaaucacacagucaccgggagaacaucccugccccgguguuggcuggugagcaacggaucuuaccucaaugaaacccacuucagcgacgauaucgagcagcaggcugacaacaugauuacggagcugcuucaaaaggaauauaucgaucgccagggcaaaacaccucuggggcucguggaccuguuugucuucuccaccucuuuuuaccugauuagcaucuuccuucaccucguuaagauuccgacccauagacacaucauuggaaaacccugcccuaagccccaucggcugaaucacaugggcaucuguuccugcggccuguauaaacacccuggggugcccgugaaguggaagcgcugaggacuaguuauaagacugacuagcccgaugggccucccaacgggcccuccuccccuccuugcaccgagauuaauaaaaaaaaaaaaaaaaaaaaaaaaaaaaaaaaaaaaaaaaaaaaaaaaaaaaaaaaaaaaaaaaugcaucccccccccccccccccccccccccccccccaaaggcucuuuucagagccaccagaauu

SEQ ID NO: 7471 - RNA, 1690 nt, Artificial Sequence
  mRNA product Design i-3 comprising derived and/or modified sequence from LASV(LASV254-NIG-2011;Clade II)__AIT17674__GPCstabilized (opt5)
gggagaaagcuuaccaugggccagaucauuaccuucuuucaagaggugccccacgucaucgaagagguuaugaacauugugcugaucgcccucagccugcuugcuauucugaaggggaucuacaauguggccacaugcggacucuucggccuggucuccuuucuucugcucugugggagaucuugcagcacgaccuauaaaggaguguacgaacugcagacacuggagcucgacaugaccaaccugaauaugacaaugccucuuuccuguaccaagaacaauucucaucacuauaucaugguuggcaacgaaacagggcuggagcucacccugacgaauaccagcauuaucaaccauaaauucugcaaucuuuccgaugcgcacaagaaaaaccuguacaaucaugcucucaugucuauuaucagcacauuucaccuguccauuccgaacuucaaucaguaugaggccaugagcugugacuuuaacggaggcaagaucucugugcaguacaaucugucccacagcuaugccgucgaugcugccaaccauugcggcaccauugcuaacggggugcuccaaacauucaugcggauggccuggggaggcucuuacaucgcgcuggacuccgggugcggaaauugggauuguaucaugaccagcuaccaguaucuuauuauccagaacacgacaugggaagaccacugccaguuuucucgccccuccccuauuggcuaccuggggcuccugagccaaagaacccgggauaucuauauuucccgcagacgccggggaacauucaccuggacccucucugacagcgagggcaaugaaacacccggcggguacugucugacgcgguggaugcugaucgaggccgagcucaaaugcuuuggaaacaccgcuguugccaaguguaaugaaaaacaugaugaggaguucugcgacaugcugcgccuuuuugauuucaacaagcaggcuaucagacggcugaaaacacccgcccaggcgaauauucagcucaucaacaaggccgugaaugcucugauuaacgaccaacuuaucaugaagaaucaucugcgcgauauuaugugcaucccuuauugcaacuacuccaaauauugguaccucaaucacaccgucacagggaagaccagccugcccagauguuggcuggugucuaacggauccuaccucaaugaaacgcacuucagcgacgacaucgagcagcaggccgauaacaugauuacagagcugcuucaaaaagaauauauggaccggcagggcaagaccccucuggggcucguggaucuguuugucuucucuaccagcuuuuaccugaucuccauuuuccuucaccucguuaaaaucccgacacaucgccacgugauuggaaagcccugcccuaaaccccauagacugaaccacaugggcaucuguucuugcggccuguauaagcacccuggggugcccgucaaguggaaacggugaggacuaguuauaagacugacuagcccgaugggccucccaacgggcccuccuccccuccuugcaccgagauuaauaaaaaaaaaaaaaaaaaaaaaaaaaaaaaaaaaaaaaaaaaaaaaaaaaaaaaaaaaaaaaaaaugcaucccccccccccccccccccccccccccccccaaaggcucuuuucagagccaccagaauu

SEQ ID NO: 7472 - RNA, 1690 nt, Artificial Sequence
  mRNA product Design i-3 comprising derived and/or modified sequence from LASV(Nig08-A19;Clade III)__ADU56618__GPCstabilized (opt5)
gggagaaagcuuaccaugggccagaucgugaccuucuuucaagaggucccccacguuauugaagaggugaugaacaucgugcugauugcccucagcauccuggcuauucuuaaggggcuguacaauaucgccacaugcggacucaucggccuggucacguuccuucugcucuccgggagaucuuguagcaugaccuauaaaggaguguacgaacugcagacacuggagcucaacaugaauacccugaacaugacaaugccucuuuccugcaccaagaauaacucucaucacuauauuaugguuggcaaugaaacagggcuggagcucacccugacgaacaccagccuucugcaucacaaauuuuguaaucucuccgacgcgcauaagaaaaaccuguacgaucacacacugaugucuaucauuagcaccuuccaccucuccaucccgaauuuuaaccaguaugaggcuaugagcugcgacuucaauggaggcaagauuacagugcaguacaaccugucucauuccuaugccaucgaugccgcuaaucacuguggcaccgucgccaacggggugcuucaaacguuuaugcggauggcuuggggaggcagcuacauugcccuggacucugggugcggaaagugggauugcaucaugacauccuaccaguaucucaucauucagaacaccacaugggaagaccauugucaguucagcagacccucuccuaucggcuaccuggggcuucugucccaacggacccgcgauauuuauaucagcagacggcgccggggaaccuuuacauggacgcuguccgacucugagggcaaugaaacccccggcggguacugccucacacgcuggaugcugauugaggcggagcuuaaauguuucggaaacaccgccguugcuaagugcaaugaaaaacacgaugaggaauuuugugacaugcugagacucuucgauuuuaacaagcaggccauccggcgccugaaagcucccgcccagaugagcauccagcuuauuaauaaggcggugaacgcccugaucaaugaccaacucauuaugaagaaccaccugagagauaucaugugcauuccuuauugcaauuacuccaaauauugguaccugaaccauacaagcaccgggcggacgucucucccccgcugcuggcuggucuccaauggaagcuaccuuaacgaaacacacuucucugacgacaucgagcagcaggcugauaauaugaucaccgagaugcugcaaaaggaauaucucgacagacagggcaaaaccccucuggggcugguggaucuuuucguguuuagcacauccuucuaccucauuucuaucuuucugcaucuggucaagauuccgacccaccggcauaucguuggaaaacccuguccuaagccccaccgccucaaccacaugggcauuugcagcuguggccuguauaaacagccuggggugcccgugagauggaagcggugaggacuaguuauaagacugacuagcccgaugggccucccaacgggcccuccuccccuccuugcaccgagauuaauaaaaaaaaaaaaaaaaaaaaaaaaaaaaaaaaaaaaaaaaaaaaaaaaaaaaaaaaaaaaaaaaugcaucccccccccccccccccccccccccccccccaaaggcucuuuucagagccaccagaauu

SEQ ID NO: 7473 - RNA, 1693 nt, Artificial Sequence
  mRNA product Design i-3 comprising derived and/or modified sequence from LASV(G1180-SLE-2010;Clade IV)__AIT17168__GPCstabilized (opt5)
gggagaaagcuuaccaugggccagaucgugaccuucuuucaagaggucccccacguuauugaagaggugaugaacaucgugcugauugcccucagcauccuggcuguccuuaaggggcuguacaauuucgccacaugcggacucgugggccugcuuacguuucugcuccugugugggagauccugcaccgcgucucgguauaaaggaguuuacgaacugcagacacucgagcugaacauggaaacccuuaauaugacaaugccucugagcuguaccaagaacaauucccaucacuauauuauggugggcaacgagacagggcucgagcugacccuuacgaauaccucuaucaucaaccauaaauucugcaaucugagcgacgcucacaagaaaaaccucuacgaucaugcccugauguccauuaucucuacauuucaccugagcauuccgaauuucaaccaguaugaagccauguccugugacuuuaauggaggcaagaucagcguccaguacaaccucucucacuccuaugcuggcgaugccgcuaaucauugcgggaccguggccaacggaguucugcaaacauucaugcgcauggcguggggcgggagcuacauugcccuugacucuggaugcggcuccugggauuguaucaugaccagcuaccaguaucugauuauccagaacacgacaugggaggaccauugccaguuuucuagacccuccccuaucggguaccucggacugcuuagccaacggacccgcgauauuuauaucuccagacggcgccggggcacauucaccuggacccugucugacagcgaaggcaaggauacacccgggggauacugucugacgcgcuggaugcucauugaggcugagcugaaaugcuuuggcaauaccgccguggcuaaguguaacgaaaaacacgacgaggaguucugcgauaugcuuagacuguuugacuucaauaagcaggccauccagcggcucaaagcgcccgcccagauguccauucaacugaucaacaaggcugucaaugcccuuaucaacgaucagcugauuaugaagaaucaccuccgcgacaucaugugcauuccuuauugcaacuacagcaaauauugguaccugaaucauacaaccacaggaaagaccucucugcccaaauguuggcucguguccaacggcagcuaccugaaugaaacgcacuucucugacgauaucgagcagcaagcugacaacaugauuacagagaugcuucagaaggaauauauggagagacaggggaaaaccccucugggacucguggaucuguuugucuucagcaccuccuuuuaccugaucucuaucuuccuucaucucguuaagauuccgacacaccggcauaucgugggcaaaagcugccccaagccucaccgccugaaucacaugggcauuuguuccugcgggcuguauaagcagcccggagugccugucaaauggaagagaugaggacuaguuauaagacugacuagcccgaugggccucccaacgggcccuccuccccuccuugcaccgagauuaauaaaaaaaaaaaaaaaaaaaaaaaaaaaaaaaaaaaaaaaaaaaaaaaaaaaaaaaaaaaaaaaaugcaucccccccccccccccccccccccccccccccaaaggcucuuuucagagccaccagaauu

SEQ ID NO: 7474 - RNA, 1693 nt, Artificial Sequence
  mRNA product Design i-3 comprising derived and/or modified sequence from LASV(G1442-SLE-2011;Clade IV)__AIT17180__GPCstabilized (opt5)
gggagaaagcuuaccaugggccagaucgugaccuucuuucaagaggucccccacguuauugaagaggugaugaacaucgugcugauugcccucagcauccuggcuguccuuaaggggcuguacaauguggccacaugcggacucauuggccugguuacguuccuucugcucugugggagauccugcaccacaacccuguauaaaggaguguacgaacugcagacacucgagcugaacauggaaacccuuaauaugacaaugccucugucuuguaccaagaacaauagccaucacuauauccgggucggcaacgagacggggcucgagcugacccuuacaaauaccuccaucauuaaccauaaauuuugcaaucugucugacgcgcacaagaaaaaccucuacgaucaugcucugaugagcaucauuuccacauuccaccugucuaucccgaauuuuaaccaguaugaagccaugagcugugacuucaauggaggcaagauuuccgugcaguacaaccucagccacucuuaugccggcgaugcugccaaucauugcgggaccguugcuaacggagugcugcaaacguuuaugcgcauggccuggggcggguccuacaucgcgcuugacagcggaugcggcaacugggauuguauuaugacaucuuaccaguaucugaucauccagaauaccacaugggacgaucacugccaguucucccggcccagcccuauuggguaccucggacugcuuucucaacgcaccagagacgucuauaucucccggcgccgccggggcaccuuuacauggacgcugagcgauuccgagggcaaggacacccccgggggauacugucugacaagauggaugcucauugaagccgagcugaaaugcuucggcaacaccgcuguggccaaguguaaugagaaacaugaugaagaguuuugcgacaugcuucggcuguucgauuuuaacaagcaggcuauccagcgccucaaagcccccgcgcagaugucuauucaacugaucaauaaggccgugaacgcucuuaucaaugaccagcugauuaugaagaaccaccucagagacaucaugugcauuccuuauugcaauuacagcaaauauugguaccugaacaauacagccaccggaaagacgucccugcccaaauguuggcucaucagcaacggcucuuaccugaaugagacacacuucuccgaugacauugaacaggaggcugauaacaugaucaccgagaugcuucaaaaggaauauauggagcggcaggggaaaaccccucugggacucgucgaccuguucguuuuuagcacaucuuucuaccugaucagcauuuuucuucaucucgugaagaucccgacccaccgccauauugugggcaaauccugccccaagccucacagacugaaucauaugggcaucuguucuugcgggcuguauaagcagcccggagucccugugcgguggaaacgcugaggacuaguuauaagacugacuagcccgaugggccucccaacgggcccuccuccccuccuugcaccgagauuaauaaaaaaaaaaaaaaaaaaaaaaaaaaaaaaaaaaaaaaaaaaaaaaaaaaaaaaaaaaaaaaaaugcaucccccccccccccccccccccccccccccccaaaggcucuuuucagagccaccagaauu

SEQ ID NO: 7475 - RNA, 1693 nt, Artificial Sequence
  mRNA product Design i-3 comprising derived and/or modified sequence from LASV(G3010-SLE-2013;Clade IV)__AIT17344__GPCstabilized (opt5)
gggagaaagcuuaccaugggccagaucgugaccuucuuucaagaggucccccacguuauugaagaggugaugaacaucgugcugauugcccucagcauccuggcuguccuuaaggggcuguacaauuucgccacaugcggacucgugggccugguuacguuucuucugcucugugggagauccugcaccacaucucuguauaaaggaguguacgaacugcagacccucgagcugaacauggaaacacuuaauaugaccaugccucugagcuguacaaagaacaauucccaucacuauauuauggucggcaacgagaccgggcucgagcugacgcuuaccaauacaucuaucaucaaccauaaauucugcaaucugagcgacgcgcacaagaaaaaccucuacaaucaugcucugauguccauuaucucuaccuuucaccugagcauuccgaacuucaaucaguaugaagccauguccugugauuuuaacggaggcaagaucagcgugcaguacaaucucucucacuccuaugccggcgacgcugccagccauugcgggacaguugcuaacggagugcugcaaaccuucaugcggauggccuggggcgggucuuacauugcgcuugauuccggaugcggcaagugggacuguaucaugacgagcuaucaguaccugauuauccagaacacaaccugggaggaucacugccaguuuucucgccccuccccuaucggguaucucggacugcuuagccaaagaacacgggacauuuacaucucccgcagacgccggggcaccuucaccuggacacugucugauagcgaaggcaaagacacgcccgggggauauugucugacccgguggaugcucauugaggccgagcugaagugcuuuggcaauacagcugucgccaaauguaacgaaaagcaugaugaggaguucugcgacaugcuucgccuguuugauuucaauaaacaggcuauccagagacucaagacccccgcccagauguccauucaacugaucaacaaggcggugaaugcccuuaucaacgaccagcugauuaugaaaaaucaccuccgggauaucaugugcauuccuuacugcaacuauagcaaguacugguaccugaaucacacaaccacgggaaaaacaucucugcccaaguguuggcucguguccaacggcagcuaucugaaugaaacccauuucucugacgacaucgagcagcaagcugauaacaugauuaccgagaugcuucagaaagaauacauggagcgccaggggaagacaccucugggacucgucgaccuguuuguuuucagcaccuccuuuuaucugaucucuaucuuccuucaccucgugaaaauuccgacacauagacacaucgugggcaagagcugccccaagccucaucggcugaaucacaugggcauuuguuccugcgggcuguacaaacagcccggagucccugugcgcuggaagagaugaggacuaguuauaagacugacuagcccgaugggccucccaacgggcccuccuccccuccuugcaccgagauuaauaaaaaaaaaaaaaaaaaaaaaaaaaaaaaaaaaaaaaaaaaaaaaaaaaaaaaaaaaaaaaaaaugcaucccccccccccccccccccccccccccccccaaaggcucuuuucagagccaccagaauu

SEQ ID NO: 7476 - RNA, 1693 nt, Artificial Sequence
  mRNA product Design i-3 comprising derived and/or modified sequence from LASV(G502-SLE-2009;Clade IV)__AIT17126__GPCstabilized (opt5)
gggagaaagcuuaccaugggccagaucgugaccuucuuucaagaggucccccacguuauugaagaggugaugaacaucgugcugauugcccucagcauccuggcuguccuuaaggggcuguacaauuucgccacaugcggacucgugggccugcuuacguuucugcuccugugugggagauccugcaccacaggacuguauaaaggcguuuacgaacuccagacccuggagcuuaacauggaaacacugaauaugaccaugccucucucuuguacaaagaacaauagccaucacuauauuaugguggggaacgagaccggacuggagcuuacgcugaccaauacauccaucaucaaccauaaauucugcaaucucucugacgcgcacaagaaaaaccuguacgaucaugcucugaugagcauuaucuccaccuuucaccucucuauuccgaauuucaaccaguaugaagccaugagcugugacuuuaauggcggcaagaucuccguccaguacaaccugagccacucuuaugccggggaugcugccgaccauugcggaacaguggcuaauggcguucuucaaaccuucaugcggauggccuggggaggguccuacauugcgcuggauagcggcugcgggagaugggacuguaucaugacgucuuaccaguaucucauuauccagaacacaaccugggaggaucacugccaguuuucccggcccagcccuaucggauaccugggccuucugucucaacgcacaagagacauuuauaucucccggcgccgccggggcaccuucaccuggacacugagcgauuccgaagggaaggacacgcccggaggcuacugucucaccagauggaugcugauugaggccgagcuuaaaugcuuugggaacacagcuguggccaaguguaaugaaaaacaugaugaggaguucugcgacaugcugcggcucuuugauuucaacaagcaggcuauccagcgccugaaagcccccgcgcagaugucuauucaacuuaucaauaaggccgucaacgcucugaucaaugaccagcucgugaugaagaaccaccugagagacauuaugugcaucccuuauugcaauuacagccgguauugguaccugaaccacaccacaaccggccgcacgucccuccccaaauguuggcuggugagcaaugggucuuaccuuaacgaaacacauuucuccgaugacauugagcagcaagccgauaauaugaucaccgagaugcugcagaaggaauauauggagagacagggaaaaaccccucucggccuggucgaccuguuuguuuucagcacaucuuuuuaccuuauuagcaucuuccuccaccuggugaagaucccgacccaucggcacauugugggcaaauccugccccaagccucaucgccugaaccacauggggaucuguucuugcggacucuauaaacagcccggcgucccugugaaguggaagagaugaggacuaguuauaagacugacuagcccgaugggccucccaacgggcccuccuccccuccuugcaccgagauuaauaaaaaaaaaaaaaaaaaaaaaaaaaaaaaaaaaaaaaaaaaaaaaaaaaaaaaaaaaaaaaaaaugcaucccccccccccccccccccccccccccccccaaaggcucuuuucagagccaccagaauu

SEQ ID NO: 7477 - RNA, 1693 nt, Artificial Sequence
  mRNA product Design i-3 comprising derived and/or modified sequence from LASV(G733-SLE-2010;Clade IV)__AIT17154__GPCstabilized (opt5)
gggagaaagcuuaccaugggccagaucgugaccuucuuucaagaggucccccacguuauugaagaggugaugaacaucgugcugauugcccucagcauccuggcuguccuuaaggggcuguacaauuucgccacaugcggaauugugggccucguuuccuuucugcuucugugugggagaucuugcacgaccagccucuauaaaggaguguacgaacugcagacacuggagcucaacauggaaacccugaauaugacaaugccucuuuccuguaccaagaacaauucucaucacuauaucauggucggcaacgagacagggcuggagcucacccugacgaauaccagcaucauuaaccauaaauucugcaaucuuuccgacgcgcacaagaaaaaccuguacgaucaugcucucaugucuaucauuagcacauuucaccuguccaucccgaauuucaaccaguaugaagccaugagcugugacuuuaauggaggcaagauuucugugcaguacaaccugucccacagcuaugccggcgaugcugccaaucauugcgggaccaucgcuaacggaguucuccaaacauucaugcggauggccuggggcgggucuuacauugcgcuggacuccggaugcgauagaugggacuguaucaugaccagcuaccaguaucuuaucauucagaacacgacaugggaggaucacugccaguuuucucggcccuccccuaucggcuaccuggggcuccugagccaacgcaccagagacauuuauaucucccggcgccgccggggaacauucaccuggacccucucugauagcgaaggcaaggacacacccggcggguacugucugacgagauggaugcugauugaggccgagcucaaaugcuuuggaaauaccgcuguggccaaguguaacgaaaaacaugaugaggaguucugcgacaugcugcggcuuuuugauuucaauaagcaggcuauccagcgccugaaagcccccgcgcagauguccauccaacucauuaacaaggccgucaaugcucugaucaacgaccagcuuauuaugaagaaucaccugagagacaucaugugcauuccuuauugcaacuacagcaaauauugguaccucaaucacacaaccacagggaagaccucucugcccaaauguuggcugguguccaacggaagcuaccucaaugaaacgcauuucucugaugacaucgagcagcaagccgauaacaugaucacagagaugcugcagaaggaauauauggagcggcagggcaaaaccccucuugggcugguggaccucuuugucuucagcaccuccuuuuaccugauuucuaucuuccugcaccuuguuaagauuccgacacaucgccacguggugggaaaaagcugccccaagccucauagacucaaucacaugggcaucuguuccugcggccuguaugggcagcccggagucccugugaaguggaaacggugaggacuaguuauaagacugacuagcccgaugggccucccaacgggcccuccuccccuccuugcaccgagauuaauaaaaaaaaaaaaaaaaaaaaaaaaaaaaaaaaaaaaaaaaaaaaaaaaaaaaaaaaaaaaaaaaugcaucccccccccccccccccccccccccccccccaaaggcucuuuucagagccaccagaauu

SEQ ID NO: 7478 - RNA, 1693 nt, Artificial Sequence
  mRNA product Design i-3 comprising derived and/or modified sequence from MOPV/LASV reassortant(IGS-1;Clade IV)__AFY05576__GPCstabilized (opt5)
gggagaaagcuuaccaugggccagaucgugaccuucuuucaagaggucccccacguuauugaagaggugaugaacaucgugcugauugcccucagcguccuggcugugcuuaaggggcuguacaauuucgccacaugcggacucguuggccuggugacguuucuucugcucugugggagauccugcaccacaucucuguauaaaggagucuacgaacugcagacccucgagcugaacauggaaacacuuaauaugaccaugccucugagcuguacaaagaacaauucccaucacuauaucauggugggcaacgagaccgggcucgagcugacgcuuaccaauacaucuauuaucaaccauaaauucugcaaucugagcgacgcgcacaagaaaaaccucuacgaucaugcucugauguccaucauuucuaccuuucaccugagcaucccgaauuucaaccaguaugaagccauguccugugacuuuaauggaggcaagauuagcguucaguacaaccucucucacuccuaugccggcgaugcugccaaucauugcgggacaguggcuaacggaguccugcaaaccuucaugcggauggccuggggcgggagcuacaucgcgcuugacucuggaugcggcaacugggauuguauuaugacguccuaccaguaucugaucauucagaauacaaccugggaggaccacugccaguuuagcagacccucuccuaucggguaccucggacugcuuucccaacggacacgcgauaucuauauuagcagacggcgccggggcaccuucaccuggacacuguccgacucugaaggcgaggauacgcccgggggauacugucugacccgcuggaugcucaucgaggccgaacugaagugcuuuggcaacacagcuguggccaaauguaaugagaagcaugacgaagaguucugcgauaugcuuagacuguuugacuucaacaaacaggcuauucagcggcucaaggcccccgcgcagaugagcauccaacugauuaauaaagccgugaacgcucuuaucaaugaucagcugaucaugaagaaccaccuccgcgacauuaugugcaucccuuauugcaauuacuccaaguauugguaccugaaccacaccacaaccggaagaacgagccugcccaaauguuggcucgucucuaauggcuccuaccugaacgagacacauuucagcgacgauauugagcagcaagccgacaauaugaucaccgaaaugcuucagaaggaguauauggaacggcaggggaaaaccccucugggacucguugaucuguuuguguucucuaccagcuuuuaccugauuuccaucuuccuucaccucgugaagaucccgacacaucgccacauugucggcaaaucuugccccaagccucauagacugaaccacaugggcaucuguagcugcgggcuguauaaacagcccggagugccuguuaaguggaagcggugaggacuaguuauaagacugacuagcccgaugggccucccaacgggcccuccuccccuccuugcaccgagauuaauaaaaaaaaaaaaaaaaaaaaaaaaaaaaaaaaaaaaaaaaaaaaaaaaaaaaaaaaaaaaaaaaugcaucccccccccccccccccccccccccccccccaaaggcucuuuucagagccaccagaauu

SEQ ID NO: 7479 - RNA, 1693 nt, Artificial Sequence
  mRNA product Design i-3 comprising derived and/or modified sequence from LASV(LM765-SLE-2012;Clade IV)__AIT17814__GPCstabilized (opt5)
gggagaaagcuuaccaugggccagaucgugaccuucuuucaagaggucccccacguuauugaagaggugaugaacaucgugcugauugcccucagcauccuggcuguccuuaaggggcuguacaauuucgccacaugcggacucgugggccugguuacguuucuucugcucugugggagauccugcaccacaucucuguauaaaggaguguacgaacugcagacccucgagcugaacauggaaacacuuaauaugaccaugccucugagcuguacaaagaacaauucccaucacuauauuauggucggcaacgagaccgggcucgagcugacgcuuaccaauacaucuaucaucgaccauaaauucugcaaccugagcgaugcgcaccggaagaaucucuacgaccaugcucugauguccauuaucucuaccuuucaccugagcauuccgaacuucaaucaguaugaagccauguccugugauuuuaacggaggcaaaaucagcgugcaguacaaucucucucacuccuaugccaaggacgcugccgaucauugcggcacaguugcuaacggggugcugcaaaccuucaugcgcauggccuggggaggcagcuacauugcgcuugacucugggugcggacggugggauuguaucaugacguccuaccaguaucugauuauccagaauacaaccugggaggaccacugccaguuuagccgccccucuccuaucggcuaccucgggcugcuuucccaaagaacacgggauauuuauaucagccgcagacgccggggaaccuucaccuggacacuguccgacucugaaggcaaggauacgcccggcggguacugucugacccgguggaugcucauugaggccgagcugaaaugcuuuggaaacacagcugucgccaaguguaacgaaaaacaugacgaggaguucugcgauaugcuucgccuguuugacuucaauaagcaggcuauccagagacucaaagcccccgcgcagaugagcauucaacugaucaacaaggccgugaaugcucuuaucaacgaccagcugauuaugaagaaucaccuccgggauaucaugugcauuccuuauugcaacuacuccaaauauugguaccugaaucacaccacaaccgggaagacgagccugcccaaauguuggcucgugucuaacggauccuaccugaaugaaacacauuucagcgacgauaucgagcagcaagccgacaacaugauuaccgagaugcuucagaaggaauauauggagcgccagggcaaaaccccucuggggcucgucgaucuguuuguuuucucuaccagcuuuuaccugaucuccaucuuccuucaccucgugaagauuccgacacauagacacaucgugggaaaacccugcccuaagccccaucggcugaaucacaugggcauuuguucuugcggccuguauaagcagccugggguccccgugaaauggaagcgcugaggacuaguuauaagacugacuagcccgaugggccucccaacgggcccuccuccccuccuugcaccgagauuaauaaaaaaaaaaaaaaaaaaaaaaaaaaaaaaaaaaaaaaaaaaaaaaaaaaaaaaaaaaaaaaaaugcaucccccccccccccccccccccccccccccccaaaggcucuuuucagagccaccagaauu

SEQ ID NO: 7480 - RNA, 1693 nt, Artificial Sequence
  mRNA product Design i-3 comprising derived and/or modified sequence from LASV(LM776-SLE-2012;Clade IV)__AIT17824__GPCstabilized (opt5)
gggagaaagcuuaccaugggccagaucgugaccuucuuucaagaggucccccacguuauugaagaggugaugaacaucgugcugauugcccucagcauccuggcuguccuuaaggggcuguacaauuucgccacaugcggacucgugggccugguuacguuucuucugcucugugggagauccugcaccacaucuguguauaaaggagucuacgaacugcagacccuggagcucaacauggaaacacugaauaugaccaugccucuuagcuguacaaagaacaauucccaucacuauauuauggugggcaacgagaccgggcuggagcucacgcugaccaauacaucuaucaucaaccauaaauucugcaaucuuagcgacgcgcacaagaaaaaccuguacgaucaugcucucauguccauuaucucuaccuuucaccugagcauuccgaauuucaaccaguaugaagccauguccugugacuuuaauggaggcaagaucagcguucaguacaaccugucucacuccuaugccggcgaugcugccaaucauugcgggacaguggcuaacggaguccuccaaaccuucaugcggauggccuggggcgggagcuacauugcgcuggacucuggaugcggcaagugggauuguaucaugacguccuaccaguaucuuauuauccagaacacaaccugggaggaccauugccaguuuagccgccccucuccuaucggguaccugggacuccugucccaaagaacacgggauauuuauaucagccgcagacgccggggcaccuucaccuggacacucuccgacucugaaggcaaagauacgcccgggggauacugucugacccgguggaugcugauugaggccgagcucaagugcuuuggcaauacagcuguggccaaauguaacgaaaagcacgacgaggaguucugcgauaugcugcgccuuuuugacuucaauaaacaggcuauccagagacugaaggcccccgcgcagaugagcauucaacucaucaacaaggccgugaaugcucugaucaacgaucagcuuauuaugaaaaaucaucugcgggacaucaugugcauuccuuauugcaacuacuccaaguauugguaccucaaucacaccacaaccggaaaaacgagccugcccaaguguuggcuggucucuaacggcuccuaccucaaugaaacacacuucagcgacgauaucgagcagcaagccgacaacaugauuaccgagaugcugcagaaagaauauauggagcgccaggggaagaccccucuuggacugguugaucucuuuguguucucuaccagcuuuuaccugaucuccaucuuccugcaucuugugaaaauuccgacacacagacauaucgucggcaagucuugccccaagccucaccggcucaaucacaugggcauuuguagcugcgggcuguauaaacagcccggagugccuguucgcuggaagagaugaggacuaguuauaagacugacuagcccgaugggccucccaacgggcccuccuccccuccuugcaccgagauuaauaaaaaaaaaaaaaaaaaaaaaaaaaaaaaaaaaaaaaaaaaaaaaaaaaaaaaaaaaaaaaaaaugcaucccccccccccccccccccccccccccccccaaaggcucuuuucagagccaccagaauu

SEQ ID NO: 7481 - RNA, 1693 nt, Artificial Sequence
  mRNA product Design i-3 comprising derived and/or modified sequence from LASV(Mad39;Clade IV)__ANH09722__GPCstabilized (opt5)
gggagaaagcuuaccaugggccagaucgugaccuucuuucaagaggucccccacguuauugaagaggugaugaacaucgugcugauugcccucagcauccuggcuguccuuaaggggcuguacaauguggccacaugcggacucauuggccugguuacguuccuucugcucugugggagauccugcaccacaacccuguauaaaggaguguacgaacugcaggcgcucgagcugaacauggaaacacuuaauaugaccaugccucugucuuguacaaagaacaauagccaucacuauauccgggucggcaacgagaccgggcucgagcugacgcuuaccaauacaucccugaucaaccauaaauuuugcaaucucucugacgcucacaagaaaaaccuguacgaucaugcccugaugagcauuaucuccaccuuccaccucucuauuccgaauuuuaaccaguaugaagccaugagcugugacuucaaugauggaaagaucuccgugcaguacaaccugagccacacauaugcuggcgacaccgccaaucauugcggcacgguugcuaacggggugcuucaaacauuuaugcgcauggccuggggaggcucuuacauugcgcuggauuccgggugcggaggcugggacuguaucaugaccagcuaccaguaucucauuauccagaacacaaccugggaggaucacugccaguucucucggcccuccccuaucggguaccugggacuucugagccaacgcaccagagacauuuauaucucucggcgccgccggggcacauuuacguggacccuguccgauagcgaaggcaaggacacacccgggggauacugucucaccagauggaugcugauugaggccgagcuuaaaugcuucggcaauacagcugucgccaaguguaacgaaaaacaugaugaggaauuuugcgacaugcugcgccucuucgauuuuaauaagcaggcuauccagcggcugaaagcccccgcgcagauguccauucaacuuaucaacaaggccgugaaugcucugaucaacgaccagcucauuaugaagaaucaccugagagacaucaugugcauuccuuauugcaacuacucuaaauauugguaccugaaucacaccgugacgggaaagacaagccuccccaaauguuggcuggucuccaacggcagcuaccuuaaugaaacccauuucucugaugacaucgagcagcaagccgauaacaugauuaccgagaugcugcagaaggaauauauggagcggcaggggaaaacaccucucggacugguugaccuguucguguuuuccaccagcuucuaccuuaucucuaucuuucuccaccuggugaagauuccgacacaucgccacgucgugggcaaacccugcccuaagccccauagacugaaucacaugggcaucuguagcugcggguucuauaagcagccuggaguucccgugcgguggaaacgcugaggacuaguuauaagacugacuagcccgaugggccucccaacgggcccuccuccccuccuugcaccgagauuaauaaaaaaaaaaaaaaaaaaaaaaaaaaaaaaaaaaaaaaaaaaaaaaaaaaaaaaaaaaaaaaaaugcaucccccccccccccccccccccccccccccccaaaggcucuuuucagagccaccagaauu

SEQ ID NO: 7482 - RNA, 1693 nt, Artificial Sequence
  mRNA product Design i-3 comprising derived and/or modified sequence from LASV(Z0947-SLE-2011;Clade IV)__AIT17840__GPCstabilized (opt5)
gggagaaagcuuaccaugggccagaucgugaccuucuuucaagaggucccccacguuauugaagaggugaugaacaucgugcugauugcccucagcauccuggcuguccuuaaggggcuguacaauuucgccacaugcggacucgugggccugguuacguuucuucugcucugugggagauccugcaccauuucucuguauaaaggaguguacgaacugcagacacucgagcugaacauggaaacccuuaauaugacaaugccucugagcuguaccaagaacaauucccaucacuauaucauggucggcaacgagacagggcucgagcugacccuuacgaauaccucuaucauuaaccauaaauucugcaaucugagcgacgcgcacaagaaaaaccucuacgaucaugcucugauguccaucauuucuacauuucaccugagcaucccgaauuucaaccaguaugaagccauguccugugacuuuaauggaggcaagauuagcgugcaguacaaccucucucacuccuaugccggcgaugcugccaaucauugcgggaccguugcuaacggagugcugcaaacauucaugcggauggccuggggcgggagcuacaucgcgcuugacucuggaugcgauagaugggacuguauuaugaccuccuaccaguaucugaucauccagaacacgacaugggaggaucacugccaguuuagccggcccucuccuauuggcuaccucgggcugcuuucccaacgcaccagagacaucuauauuagccggcgccgccggggaacauucaccuggacccuguccgauucugaaggcaaggacacacccggcggguacugucugacgagauggaugcucaucgaggccgagcugaaaugcuuuggaaauaccgcugucgccaaguguaacgaaaaacaugaugaggaguucugcgacaugcuucggcuguuugauuucaauaagcaggcuauucagcgccucaaagcccccgcgcagaugagcauccaacugaucaacaaggccgugaaugcucuuauuaacgaccagcugaucaugaagaaucaccucagagacauuaugugcaucccuuauugcaacuacuccaaauauugguaccugaaucacacaaccacagggaagaccagccugcccaaauguuggcucgugucuaacggauccuaccugaaugaaacgcauuucagcgaugacauugagcagcaagccgauaacaugaucacagagaugcuucagaaggaauauauggagcggcagggcaaaaccccucuggggcucgucgaccuguuuguuuucucuaccagcuuuuaccugaucuccauuuuccuucaccucgugaagaucccgacacaucgccacauugugggaaaacccugcccuaagccccauagacugaaucacaugggcaucuguucuugcggccuguauaagcagccugggguccccgugaaauggaagcggugaggacuaguuauaagacugacuagcccgaugggccucccaacgggcccuccuccccuccuugcaccgagauuaauaaaaaaaaaaaaaaaaaaaaaaaaaaaaaaaaaaaaaaaaaaaaaaaaaaaaaaaaaaaaaaaaugcaucccccccccccccccccccccccccccccccaaaggcucuuuucagagccaccagaauu

SEQ ID NO: 7483 - RNA, 1693 nt, Artificial Sequence
  mRNA product Design i-3 comprising derived and/or modified sequence from LASV(Josiah;Clade IV)__NP_694870__GPCstabilized (opt6)
gggagaaagcuuaccaugggacaaaucguuacauucuuucaagaaguaccccacguaauagaagaagucaugaacauaguacuaauagcacuaucaguucucgcaguacuaaaaggucuauauaauuuugcuacauguggcuuagucggccuaguaaccuuccuacuccuaugcggaagaucaugcaccacuucacucuacaaaggaguauacgaauuacaaacccuagaacuaaacauggaaacacuaaauaugacaaugccacuuucauguaccaaaaacaacagccaccacuauauaaugguaggaaaugaaacaggacuugaauuaacauuaaccaacacaucuauaaucaaucauaaauucugcaaccuaucagaugcacauaagaaaaauuuauacgaucacgcauuaaugucaauaauauccacauuccaccuaucaauaccaaacuuuaaucaauacgaagcaaugucuugcgauuucaacggaggaaaaauaucaguacaauacaaccuuucacacucuuaugcuggagacgcagcaaaucacuguggaacagucgcaaacggagucuuacaaacauuuaugagaauggcauggggaggaucuuacauagcacuagauucaggaugcggaaacugggacugcauaaugacaucauaccaauauuuaaucauacaaaacacaacaugggaagaccacugccaauucucaagaccaucaccuauaggauaccuaggacuuuuaucacaaagaacacgcgacauuuacauauccagaagaagaagaggcacuuucaccuggacacuaucagacucagaaggcaaagacacaccaggaggauacugcuuaacgagauggaugcuaauagaagcagaacuaaaaugcuucggcaacacagcaguagcaaaauguaacgaaaaacaugaugaagaauuuugcgacaugcucagacuauucgauuucaacaaacaagccauacaaagacuaaaagcuccugcacaaaugucaauacaacuaauaaauaaagcaguaaacgcacuaauaaacgaucaacuaauaaugaaaaaccaccuaagagacauaauguguaucccauacugcaacuauucaaaauacugguaccuaaaccacaccacaacaggaagaacaagccuaccaaaaugcuggcuaguaucaaacggaucauauuuaaaugaaacccacuucuccgaugauauagaacaacaagcagauaacaugauaacagaaaugcuacaaaaagaauacauggaacgacaaggaaaaacaccucugggccuaguagaccuauucguauucuccacaucauucuaccuaauauccauauucuuacaccuagucaaaauaccaacacacagacacauaguaggaaaauccugcccaaaaccccauagacucaaucauaugggaauaugcuccuguggacuauacaaacaaccgggaguaccaguaaaauggaaaagauaaggacuaguuauaagacugacuagcccgaugggccucccaacgggcccuccuccccuccuugcaccgagauuaauaaaaaaaaaaaaaaaaaaaaaaaaaaaaaaaaaaaaaaaaaaaaaaaaaaaaaaaaaaaaaaaaugcaucccccccccccccccccccccccccccccccaaaggcucuuuucagagccaccagaauu

SEQ ID NO: 7484 - RNA, 1690 nt, Artificial Sequence
  mRNA product Design i-3 comprising derived and/or modified sequence from LASV(LP;Clade I)__AAF86701__GPCstabilized (opt6)
gggagaaagcuuaccaugggacagauaauaacuuucuuccaagaaguaccucacguaauagaagaaguaaugaacauaguauuaauugcacucucacuacucgccauacuaaaaggacuauacaauauugcuaccugcgguauaauuggauuaguagcauucuuauuccuaugcggaaaaucaugcucacuaacauuaaaaggaggauacgaacuacaaacacuagaacuaaauauggaaacacuaaauaugacaaugccacuaucauguacuaaaaacucaucacaccacuacauuagaguaggcaacgaaacgggacuagaauuaacccuuacgaauacaucuauaauaaaucauaaauuuugcaacuuaucagacgcacacaagaaaaaucuauacgaccacgcccuaaugucaauuauuucaacguuccaccuauccauaccaaacuucaaccaauacgaagcaaugucaugugacuucaaugguggcaaaaucuccguacaauacaauuuaucacacuccuacgcaggagaugcagcagaacauugcggcacaguagccaacggaguacuacaaacauuuaugagaauggcauggggcggcagauacauagcauuagauucaggaugcggcaauugggacugcauaaugacuucauaccaauaccuaauaauacaaaacacaacaugggaagaccacugucaauucucaagaccauccccaauaggauaccuaggacugcuuucccaaagaacaagagauauauauauaucacgacgaagacguggaacauucacauggacauuaucagacucagaaggaaacgaaacaccaggaggcuacugucuaacaagauggaugcuuauagaagcagaacuaaaaugcuucggaaauacagccguagcuaaaugcaacgaaaaacacgaugaagaauuuugcgacauguuaagacuuuucgacuucaauaaacaggcuauccgaagacuaaaagcucccgcacaaaugucaauccaacuaauaaacaaagccguaaacgcacuaauaaacgaccaacuaaucaugaaaaaccacuuaagagauauaaugugcauaccauauugcaauuacucuaaauacugguaccucaaucacacaucaucaggacgaacaucauuaccaaaauguuggcuaaucaguaacggaucauaccuuaaugaaacccaauuuucagacgacauagaacaacaagccgauaacaugaucacagaaaugcuacaaaaagaauauauagaacgacaaggaaaaaccccacucggucuaguagacauauucaucuuuucaacaucauucuaccuaauuuccauuuuccuacaccuaaucaaaauaccuacacaccgacacauaguaggaaaaccauguccaaaaccacauagacuaaaccacaugggaguaugcucaugcggauuauacaaacacccuggaguaccaacaaaauggaaaagauaaggacuaguuauaagacugacuagcccgaugggccucccaacgggcccuccuccccuccuugcaccgagauuaauaaaaaaaaaaaaaaaaaaaaaaaaaaaaaaaaaaaaaaaaaaaaaaaaaaaaaaaaaaaaaaaaugcaucccccccccccccccccccccccccccccccaaaggcucuuuucagagccaccagaauu

SEQ ID NO: 7485 - RNA, 1690 nt, Artificial Sequence
  mRNA product Design i-3 comprising derived and/or modified sequence from LASV(803213;Clade II)__AAF86703__GPCstabilized (opt6)
gggagaaagcuuaccaugggacaaauaauaacauucuuucaagaagucccacacguaauugaagaaguuaugaauauaguacuaaucgcacuaucgcuauuagcaauacuaaaaggaaucuacaacguagcaacaugcggacuauuuggacucauauccuuucugcuauuaugcggcagauccugcucagucaccuauaaaggaguauaugaacuacaaacacuagaacuaaauauggcuaaucuuaauaugacaaugccacuaucaugcacaaaaaacaacucucaccacuauauaaugguaggaaaugaaaccggacuagagcuuacacuaacaaauaccuccauaauaaaccacaaauuuuguaacuuaucagacgcacacaaaaaaaacuuauacgaccacgcacuaaugucuauaauuagcacauuucacuuauccauaccuaacuuuaaccaauaugaagcaaugucaugcgauuuuaacggcggcaaaaucagcguacaauacaacuuaucccauucauuugccguagaugcagcuaaccacugcggaacaaucgcaaauggcguacuacaaacauucaugagaauggcauggggaggaucuuacauugcacuugauucagguugcggaaauugggacuguaucaugacaucauaucaauaucuaauaauacaaaacaccacaugggaagaccacugccaauucucaagaccaucaccaaucggauaccuaggacuauuaucacaaagaacaagagauauauacauaucaagaagacgaagaggaaccuuuaccuggacauuaucagauucagaaggaaacgaagcccccggaggauacugucucacaagauggaugcuuauagaagcagaacuaaaaugcuuuggaaauaccgccguagcaaaaugcaacgaaaaacacgaugaagaauucugugacaugcuacgacuauucgacuucaacaaacaagcuauaaaaagacuaaaaacaccagcacaaaugucaauccaacuaaucaauaaagcaguaaacgcacuaauaaacgaucaacucauaaugaaaaaccaccuaagagauauaauguguaucccauacuguaacuacuccagauacugguaccuaaaucacacaguaacaggaaaaacaucacuaccacgaugcuggcuaguaucuaacggaaguuacuuaaacgaaacacacuucucugacgauauagaacaacaagcagacaacaugauuacugaaaugcuacaaaaagaauacauggacagacaaggaaaaacaccauuaggacuaguagacuuauucguauucuccaccuccuucuaucuaauauccauauuccuccacuuaguaaaaauacccacacauagacacaucgucggaaaaccauguccaaaaccucaccgccucaaccacaugggaauauguuccugcggauuauacaaacaucccggcguaccagucaaauggaaaagauaaggacuaguuauaagacugacuagcccgaugggccucccaacgggcccuccuccccuccuugcaccgagauuaauaaaaaaaaaaaaaaaaaaaaaaaaaaaaaaaaaaaaaaaaaaaaaaaaaaaaaaaaaaaaaaaaugcaucccccccccccccccccccccccccccccccaaaggcucuuuucagagccaccagaauu

SEQ ID NO: 7486 - RNA, 1690 nt, Artificial Sequence
  mRNA product Design i-3 comprising derived and/or modified sequence from LASV(GA391;Clade III)__CAA36645__GPCstabilized (opt6)
gggagaaagcuuaccaugggccaaauaguaacauuuuuccaagaaguaccacacguaauagaagaaguaaugaauaucguccuaauagcacucagcauauuagcaauauuaaaaggacuauauaaugucgcaacauguggacuaauaggucuagucacauuucucuuacuaucaggaagauccugcucccucauauacaaaggaacuuacgaauuacaaacucuagaauuaaacauggaaacacuaaacaugacaaugccacuaucauguaccaaaaacaauucacaccacuacauacgaguaggcaacgaaacaggccuagaauuaacauuaacaaacacaucuauacuaaaccauaaauuuuguaaccuauccgacgcacacaaaaggaaucuauacgaccauucacuaaugagcauaauaucuaccuuccaucuuucuauuccaaacuucaaccaauacgaagccaugucaugcgacuucaacggcggaaaaauaacaguacaauacaacuuaucacacucauucgcaguagaugcagcaggacacugcggaacacuagccaacggaguauuacaaacauucaugagaauggcauggggaggaucuuacauagcacuagacucuggaugcgguaacugggacugcauuaugacaucauaucaauaucuaauaauacaaaauacaacuugggacgaucauugccaauucucacguccaucacccauaggcuauuuaggucuacuaucacaaagaacaagagacauauacauuucgagacgaagaagagguacauucacauggaccuuaucagacucagaagguaacgaaaccccuggaggauacugccuaacaagauggauguuaauagaagccgaacuaaaaugcuucggaaauacagcaguagcaaaauguaacgaaaaacaugacgaagaauuuugcgacaugcuacgacucuucgauuucaacaaacaagcaauaagaagacuaaaaacacccgcacaaauguccauacaacucauaaacaaagcaguaaacgcacucauaaacgaccaacuaauaaugaaaaaucaccuccgagacauaauguguauucccuacugcaacuacucaagauacugguaccuaaaucacacaucaacaggaaaaacuucacuaccaagaugcuggcuuauaucuaacggaucauaccuaaacgaaacaaaauuuagcgacgauauagaacaacaagcagacaacaugauaacagaaauguuacaaaaagaauacauagaucgacaaggaaaaacuccucuaggucuaguagaccuauucguauucucuacaucauucuauuuaauaagcauauuccuacauuuaguaaaaauacccacacaccgccauauaguaggaaaaccauguccaaaaccccacagauuaaaccacauggguauauguucauguggauuauauaaacaaccaggagucccagucagauggaaaagauaaggacuaguuauaagacugacuagcccgaugggccucccaacgggcccuccuccccuccuugcaccgagauuaauaaaaaaaaaaaaaaaaaaaaaaaaaaaaaaaaaaaaaaaaaaaaaaaaaaaaaaaaaaaaaaaaugcaucccccccccccccccccccccccccccccccaaaggcucuuuucagagccaccagaauu

SEQ ID NO: 7487 - RNA, 1693 nt, Artificial Sequence
  mRNA product Design i-3 comprising derived and/or modified sequence from LASV(AV;Clade V)__CCA30314__GPCstabilized (opt6)
gggagaaagcuuaccauggggcaaaucguaacauucuuccaagaaguuccacacguaauagaagaaguaaugaauauaguauuaaucgcauuaucaauacuagcaguauuaaaaggacuauauaauauagcaacaugcggccucaucggacuaauaacauuccucuuacuaugcggaagaagcuguucaucaaaucuuuacaaaggaguuuacgaauuacaaucauuagacuuaaacauggaaacacuaaacaugacuaugccauuaucauguacaaaaaacaauucacaccauuauauaagaguaggcaaugacacaggacuagaauuaacacuaacaaacaccucaauacuaaaccacaaauucugcaacuuaucagacgcccacaaaaaagauuuauacgaccacgcacuaauguccauaauaucaaccuuccaccuaucaauaccuaacuucaaucaauaugaagcaaugucaugugacuucaauggaggaaaaauuucuguacaauacaacuuaucucacucauacgcaauagacgcagccaaccacugcggaacgguugcaaacggcauacuacaaacuuucaugagaauggcuugggguggaucauauaucgcucuagauucuggaugcggcaacugggacugcauaaugacauccuaccaauaccuaauuauacaaaacaccacaugggaaaaccacugccaauucagccgaccaucuccaauuggauaccuaggauuauuaucucaacgaacaagagauauauauaucucaagaagaagaagaggcacauucacuuggacacuaagcgacucugaaggaaacgcaaccccaggcgguuauuguuuaacacguuggaugcuaauagaagcagaauuaaaauguuucggaaacacagcaguagcaaaaugcaacgaaaaacacgacgaagaauuuugugacauguuaagauuauucgacuucaacaaacaagcaauaucacgauuaaaaagcccugcacaaauguccauccaauuaauaaauaaagcuguuaaugcacuaauaaacgaccaauuaauaaugaaaaaccacuuaagagacauaauguguauaccauacugcaacuacucaaaauauugguaucucaaccacacuauaacuggaaaaacaucucuaccaaaaugcuggcucguaucaaacggaucauacuuaaaugaaacccacuucucagacgauauagaacaacaagccgacaauaugaucaccgaaaugcuccaaaaagaauacauggaaagacaaggaaaaacaccacuuggauuagucgaccuauucgucuucucaacaucauucuaccuaauauccauauucuuaagacucguaaaaauacccacacauagacauauaguaggaaaaccaugccccaaaccccacagacuaaaccacaugggaauaugcagcuguggacuauacaaacaaccaggaguacccguaagauggaaacgguagggacuaguuauaagacugacuagcccgaugggccucccaacgggcccuccuccccuccuugcaccgagauuaauaaaaaaaaaaaaaaaaaaaaaaaaaaaaaaaaaaaaaaaaaaaaaaaaaaaaaaaaaaaaaaaaugcaucccccccccccccccccccccccccccccccaaaggcucuuuucagagccaccagaauu

SEQ ID NO: 7488 - RNA, 1690 nt, Artificial Sequence
  mRNA product Design i-3 comprising derived and/or modified sequence from LASV(Togo/2016/7082;Clade VI)__AMR44577__GPCstabilized (opt6)
gggagaaagcuuaccaugggacaaauaaucacauuuuuccaagaaguaccacauguaauagaagaagucaugaacauaguacuaauagcacucucauuauuagcaauacucaaaggcguauacaauguagcaacuuguggaauaauaggucuagucacauuucuauuucuaugcggacgaucaugcucacuaauauauaaaggauccuacgaauuacaaacauuagaauuaaacauggaaacacucaauaugaccaugccacuauccuguaccaaaaacucaucacaccauuacauaagaguaggaaaugaaacaggauuagaauuaacauuaacaaauacaucuauaauaaaucauaaauucugcaaucucuccgacgcccauaaaagaaacuuauacgaccacgcacuaaugucaauacuaucaaccuuccaccuaucaauuccaaacuuuaaccaauaugaagccauguccugcgauuuuaacggaggaaaaauaagcguucaauacaaccuaucccacgcauacgcuguagacgcagcagaacacugcgguaccguagcaaacggaguacuacaaaccuuuaugagaauggccuggggaggaucauauauagcauuagauucaggaugcggcaacugggacugcauuaugaccucuuaccaauaucuaauaauacaaaacacaaccugggaagaucacugccaauucucaagaccaucaccaauaggcuauuuagguuuauuaucacaaagaacuagagauauauauaucucaagaagaagacgcggaacauuuacuuggacauuaucagacuccgaaggcaaugaaacaccaggaggcuacugucuaacacgauggaugcuaauagaagcagaauuaaaauguuuuggaaacacagccguagccaaaugcaacgaaaaacaugacgaagaauuuugcgacaugcuaagacuauucgacuucaacaaacaagcaauccaaagacuaaaaucaccagcacaaaugucuauacaacuaauuaacaaagcagugaaugccuuaauaaacgaucaacucaucaugaaaaaccaucuuagagauaugauguguauaccauauuguaacuauucuaaauacugguaccucaaucauacaucaucaggacgaacaucccuaccuaaauguuggcucguaucuaacggaucauaccuuaaugaaacccacuucagcgacgacauagaacaacaagccgauaacaugauaacagaaauguuacaaaaagaauauauagauagacaaggaaaaacaccacucggauuagucgaucucuucguauucuccacaucuuucuauuuaauuucuauauuuuuacaccuaauaaaaauacccacacacagacauauaguaggaaaaccauguccaaaaccacacagacuaaaucacaugggcauaugcucauguggauuauacaaacaaccuggagucccaacuagauggaaacgauaaggacuaguuauaagacugacuagcccgaugggccucccaacgggcccuccuccccuccuugcaccgagauuaauaaaaaaaaaaaaaaaaaaaaaaaaaaaaaaaaaaaaaaaaaaaaaaaaaaaaaaaaaaaaaaaaugcaucccccccccccccccccccccccccccccccaaaggcucuuuucagagccaccagaauu

SEQ ID NO: 7489 - RNA, 1690 nt, Artificial Sequence
  mRNA product Design i-3 comprising derived and/or modified sequence from LASV(KAK-428;Clade n.d. (VII))__ANH09740__GPCstabilized (opt6)
gggagaaagcuuaccaugggacaaauaguuacauucuuccaagaaguaccacacguaauugaagaagucaugaauauaguauuaaucgcacuuucacuacuagccauacucaaaggauuauacaacuucgcaacaugcggaguuaucggauuaauaacauucuuacucuuaugcggacgaucauguucagcaacauacaaaggccaauacgaacuacaaacacuagaauuaaacauggaauccuuaaacaugacaaugcccuuaucauguaccaaaaacaacucacaucacuauauacgagcagguaauaauaccggacuugaacucacauuaacaaacacuucgaucauaucacacaaauucugcaacuuaucagacgcacacaaaaaaaauuuauacgaccauacuuuaaugucuauaauaaccacauuccacuuaucuauaccaaacuucaaucaauacgaagcaaugucuugcgauuucaacggaggaaaaauaaguauacaauauaaccuaucacacucauacgcaggagacgcagcacaacacuguggaacaguagcaaacggaguacuacaaaccuuuaugagaauggccuggggaggaucuuauuuagcuuuagauucaggaugccgaggaugggauugcauaauaucaucauaccaauacuuaauaauacaaaacaccaccugggacgaccacugccaauucuccagacccaguccuauaggauaccucggauuuguaucacaaaaaaccagagacaucuacauaucaagaagaagacgaggaacauucacauggacacuuucagauagugaaggacacgacaugccaggaggauauugccuaacaagauggauguuaauagaagcagacuuaaaauguuucggaaacacagcaguagcaaaaugcaacgaaaaacacgacgaagaauuuugcgacauguggcgauuauucgauuucaacaaacaagcaauacaaagauuaaaagcacccgcacaaaugaauauacaauuaaucaacaaagccguuaacgcacucauaaacgaccaacuaaugaugaaaaaccauuuacgagacauaaugugcauaccauacugcaacuacuccaaauucugguaccuaaauaacacaacaacaggaagaacaucccuaccucguugcuggcuaaucagcaauggauccuaccuaaaugaaacacacuucucagaugacauagaacaacaagcugauaacaugaucacagaaaugcuacaaaaagaauauauggaucgacaaggaaaaacaccuuuaggauuaguagaccuuuucgucuucucaacuucuuucuaccuaaucacaaucuucuuacauuuaguaaagaucccuacccacagacacauaguuggaaaacccugcccaaaaccacacagacuaaaucacaugggaaucugcucaugcggauuauacaaacaaccagguguaccuguaagauggaaacgauaaggacuaguuauaagacugacuagcccgaugggccucccaacgggcccuccuccccuccuugcaccgagauuaauaaaaaaaaaaaaaaaaaaaaaaaaaaaaaaaaaaaaaaaaaaaaaaaaaaaaaaaaaaaaaaaaugcaucccccccccccccccccccccccccccccccaaaggcucuuuucagagccaccagaauu

SEQ ID NO: 7490 - RNA, 1690 nt, Artificial Sequence
  mRNA product Design i-3 comprising derived and/or modified sequence from LASV(Pinneo-NIG-1969;Clade I)__AIT17836__GPCstabilized (opt6)
gggagaaagcuuaccaugggacaaauuauuacauucuuccaagaaguaccucacguaauagaagaaguaaugaacaucguacuaauagcauuaucacuacuagccauacuaaaaggacuauacaacauagcaacauguggaauaauaggccuuguagccuuccuauuccuaugcggaaaauccugcucacuaacacuaaaagguggcuacgaauuacaaacauuagaacuaaacauggaaacuuuaaauaugacaaugccacucuccugcaccaaaaauucaagucaucacuacaucagaguaggaaacgaaacaggauuagaacuaacauuaaccaauacauccaucauaaaccauaaauucuguaaccuaucagaugcacacaaaaaaaacuuauaugaccacgcauuaaugagcauuauaagcaccuuucaccuaucaauaccaaacuucaaccaauaugaagcaaugucaugugacuuuaacgguggaaaaauaucaguacaauauaaccuaucacauucauacgccggugacgcagccgaacacugcggaacaguagcaaacggaguacuacaaacauuuaugcgcauggccuggggaggacgcuacauagcacuagauucaggaugcggaaauugggacuguaucaugacuuccuaccaauauuuaauaauacaaaacacaaccugggaagaucacugucaauuuucccgaccaucaccaauaggauauuuaggacuacuaagucaaagaacaagggauauauacaucucuagaagaaggagaggaacauuuacauggacccuaucugacuccgaaggaaacgaaacaccaggaggauacugcuuaacacgauggauguuaauagaagcagaacucaaaugcuucggaaacacagccguagcaaaauguaacgaaaaacacgaugaagaauucugugacaugcuacgauuauuugauuucaacaaacaagcaauaagacgacucaaagcaccagcacaaaugucaauacaacuaauaaacaaagcaguaaacgcauuaauaaaugaccaacucauaaugaaaaaucaccuaagagauauaaugugcauaccauauugcaauuacucaaaauacugguacuuaaaccacaccucauccggacgaacaucauuaccaaaaugcuggcuaauaucaaauggaaguuaccuaaacgaaacacaauucucagacgacauugagcaacaagccgauaacaugauuacagaaauguuacaaaaagaauacauagaaagacaaggcaaaacucccuuaggccuuguagacauauucauauuuucuacaucauuuuaccuaauaucaauauuucuacacuuaauuaaaauaccaacgcauagacauaucgucggaaaaccaugcccaaaaccacauagauuaaaucacaugggaguaugcucaugcggauuauacaaacacccuggaguaccaacaaaauggaaacgauaaggacuaguuauaagacugacuagcccgaugggccucccaacgggcccuccuccccuccuugcaccgagauuaauaaaaaaaaaaaaaaaaaaaaaaaaaaaaaaaaaaaaaaaaaaaaaaaaaaaaaaaaaaaaaaaaugcaucccccccccccccccccccccccccccccccaaaggcucuuuucagagccaccagaauu

SEQ ID NO: 7491 - RNA, 1690 nt, Artificial Sequence
  mRNA product Design i-3 comprising derived and/or modified sequence from LASV(ISTH0009-NIG-2011;Clade II)__AIT17404__GPCstabilized (opt6)
gggagaaagcuuaccaugggacaaauaaucacauuuuuccaagaaguaccccacgucauagaagaaguuaugaacauaguacucauagcauuaagccuacuagcaauauuaaaaggcauauacaacguagcaaccugcggauuauucggacuuguaucuuuccuuuuacucuguggaagaucaugcucuacaacauacaagggcgucuacgaacuacaaacauuagaacuugacauggcaucacucaacaugacaaugccacuaucaugcaccaaaaauaacucacaucauuacauaaugguaggaaacgaaacuggacuugaacuaacacuaaccaacacuucaauaaucaaucauaaauucugcaaccuaucagaugcccacaagaaaaaucuauaugaccaugcauuaaugucuauaauaucuaccuuccaccucuccauaccaaauuuuaaccaauaugaagcaaugucaugugauuucaacggaggaaaaaucucuguacaauacaaccuaucucacgcauacgcaguagacgccgcaaaccauugcggaacaauagccaacggagucuuacaaacauucaugcgaauggcauggggaggaucuuauauagcacuggacucaggauguggaucaugggacugcauaaugacaucauaucaauacuuaaucauacaaaauacaacuugggaagaccacugccaauucucacgaccaucacccauaggauaccuaggacuucuaucacaaagaaccagagacauauacauaucuagacguagaagaggaacauucaccuggacacuaucagacucugaaggcaacgaaacacccggaggcuauugccuaacaagauggaugcuaauagaagcagaacuaaaaugcuuuggaaacaccgcaguagcaaaaugcaaugaaaaacacgacgaagaauuuugcgauaugcuaagauuauucgacuuuaacaaacaagcaauacgacgccuaaaaacucccgcccaaauguccauccaacuaauaaacaaagcaguaaacgcauuaauaaaugaccaacuaauaaugaaaaaucaccuaagagauauaaugugcauaccauacuguaauuacuccaaauacugguaccucaaucauaccguaaccggaaaaacaucauuaccccgaugcuggcuaguaucuaauggcucauaccuaaacgaaacacauuucucagacgacaucgaacaacaagcagacaauaugauaacagaacuauuacaaaaagaauacauggacagacaaggaaaaacuccacuaggcuuaguagacuuauucgucuuuucaaccucauucuacuuaauaucaauauuccuccaucuaauaaaaauacccacacaccgacacauaacaggaaaaccaugcccaaaaccacacagauuaaaccacaugggcauauguaguugugguuuauauaaacacccaggaguaccaguuaaauggaaacguuaaggacuaguuauaagacugacuagcccgaugggccucccaacgggcccuccuccccuccuugcaccgagauuaauaaaaaaaaaaaaaaaaaaaaaaaaaaaaaaaaaaaaaaaaaaaaaaaaaaaaaaaaaaaaaaaaugcaucccccccccccccccccccccccccccccccaaaggcucuuuucagagccaccagaauu

SEQ ID NO: 7492 - RNA, 1690 nt, Artificial Sequence
  mRNA product Design i-3 comprising derived and/or modified sequence from LASV(ISTH2010-NIG-2012;Clade II)__AIT17482__GPCstabilized (opt6)
gggagaaagcuuaccaugggacaaauaaucacauucuuccaagaaguuccacacgucauagaagaaguaaugaacauaguucuaauugcccuaucacuacuugcaauacuaaaaggaauauacaacguagcaacaugcggucuuuucggccuaguaucauuccuauuauuaugcggaagaucaugcucaacaacauauaaaggaguauacgaauuacaaacgcucgaacuagauauggcaucauuaaauaugacaaugccacuaucuugcaccaaaaacaacucucaccacuacauaaugguaggaaacgaaaccggccuagaauuaacauuaacuaauacaucaaucauaaaccacaaauucugcaacuuauccgacgcucacaagaaaaaccuauaugaucaugcauuaaugagcauuauaucaacauuccaccuaucuauaccuaacuucaaucaguaugaagcaaugaguugcgacuucaacggaggcaaaauauccguccaauauaacuuaucccaugcauacgcagucgaugcagcaaaccacugcggaaccauagcaaacggaguauuacaaaccuucaugagaauggccuggggaggaucauacauagcacuagacucuggaugcggcuccugggauuguauaaugacauccuaccaauaccucauaauccaaaacauaacaugggaagaucauugccaauucucacgaccaucaccaauaggauaccucggacuauuaucccaaagaacuagagacauauacaucucccgcagaagacgagguacauuuacauggacccucucagacucagaaggaaacgaaacaccaggcggauacugcuuaacacgauggauguuaauagaagcagagcuaaaaugcuucggaaauacugcaguagccaaaugcaacgaaaaacacgacgaagaauuuugcgacauguuaagacuauucgauuucaacaaacaagcaauaagaagacucaaaacaccagcccaaaugucaauacaacuaauaaauaaagcaguaaaugccuuaauuaaugaccaacuaauaaugaaaaaccaucuaagagauauaaugugcauaccuuauugcaacuacaguaaauacugguaccuaaaccauacagucaccggaaaaacuucacuaccaagaugcuggcuaguauccaauggaucauaucuaaacgaaacacacuuuucagacgauaucgaacaacaagcagacaacaugaucacagaacucuuacaaaaagaauacauagauagacaaggcaaaacaccacuaggucuaguagaccuauuuguauucucaacaucauucuaccucauaucaauauuccuccaucuaguaaaaauaccaacucaucgacacguaguaggaaaaccaugucccaaaccccacagauuaaaucauaugggaauaugcucaugcggauuauacaaacauccaggcgucccaguaaaauggaaaagauaaggacuaguuauaagacugacuagcccgaugggccucccaacgggcccuccuccccuccuugcaccgagauuaauaaaaaaaaaaaaaaaaaaaaaaaaaaaaaaaaaaaaaaaaaaaaaaaaaaaaaaaaaaaaaaaaugcaucccccccccccccccccccccccccccccccaaaggcucuuuucagagccaccagaauu

SEQ ID NO: 7493 - RNA, 1690 nt, Artificial Sequence
  mRNA product Design i-3 comprising derived and/or modified sequence from LASV(Lassa virus/H.sapiens-wt/NGA/2015/ISTH_0543;Clade II)__AVO03639__GPCstabilized (opt6)
gggagaaagcuuaccaugggacaaauaauaacauucuuccaagaagucccccaugucauagaagaaguaaugaacauaguauuaauugcauuaucauuacuagcuauacuaaaaggaauauacaacguagccaccugcggacuauucggcuuaguaucauuucuauuacuaugcggaagaucuugcucaacaaccuacaaaggcguauacgaacuucaaacauuagaacucgauauggcaaacuuaaacaugacaaugccauuaucauguacaaaaaacaauucucaccacuacauaaugguaggaaaugaaacagguuuagaacuaacauuaacaaauacaucaaucaucaaucauaaauuuuguaaccuaagcgaugcacacaaaaaaaaccuauaugaucacgcauuaaugucaauaauauccacuuuucacuuaucaauaccaaacuucaaccaauaugaagcaauguccugcgacuuuaauggaggcaaaauaucaguacaauacaacuuaucacacacauacgcaguagacgccgcaaaccacuguggaacaauagcaaacggaguacuacaaacguucaugcgcauggcuuggggaggaucauacauagcauuagacucaggaugcggaucuugggacuguauaaugacaucauaccaauauuuagucauucaaaauacaacaugggaagaccacugccaauucucaagaccuucaccaauaggcuacuuaggacucuuaucccaaagaaccagagacauauauauaucucgacggcgaagaggaacuuucacauggacacucagcgacucagaaggaaaugaaacaccaggaggcuauugccucacaagauggauguuaauagaagcagaacuaaaaugcuucggaaacacagcaguugccaaaugcaacgaaaaacacgaugaagaauucugcgacaugcuaagacuuuucgauuuuaacaaacaagcaauacgaagacucaaaacaccagcccaaaugucaauacaacuaauaaacaaagccguaaaugcccuaaucaaugaccaacuuaucaugaaaaaccaucuaagagacaucaugugcauucccuacugcaauuacucaaaauacugguaucucaaucacacagucacuggaaaaacaucacuaccaagaugcuggcuaguaucaaacgguucuuaucuaaacgaaacacacuucucagacgacauugaacaacaagccgacaacaugauaacugaacuucuacaaaaagaauauauagacagacaaggcaaaacaccacuugguuuaguagacuuauucguauucucaaccucauucuaccuaaucucaaucuuccuucacuuaguuaaaauaccaacacaccgacacauaacuggcaaaccauguccaaaaccacacagacucaaccauaugggaauaugcucuugcggauuauacaaacacccaggugucccaguaaaauggaaaagauaaggacuaguuauaagacugacuagcccgaugggccucccaacgggcccuccuccccuccuugcaccgagauuaauaaaaaaaaaaaaaaaaaaaaaaaaaaaaaaaaaaaaaaaaaaaaaaaaaaaaaaaaaaaaaaaaugcaucccccccccccccccccccccccccccccccaaaggcucuuuucagagccaccagaauu

SEQ ID NO: 7494 - RNA, 1690 nt, Artificial Sequence
  mRNA product Design i-3 comprising derived and/or modified sequence from LASV(Lassa virus/H.sapiens-wt/NGA/2016/ISTH_0009;Clade II)__AVO03571__GPCstabilized (opt6)
gggagaaagcuuaccaugggccaaauaauaacauucuuccaagaaguaccucacguaauagaagaaguaaugaacaucgucuugauagcauuaucauuauuagccauauuaaaagguauauacaauguagcaacauguggacuacuuggauuaguaucuuucuuacuccuaugcggaagaucuugcucuaccacuuacaaagguguauacgaacuacaaacauuagaauuagacauggcaucacuaaacaugacaaugccauuaucaugcacuaaaaauaacagccaccacuacauaaugguaggaaacgaaacaggacuagaacuaacccuaaccaauacaucaauaauaaaucauaaauucuguaacuuaucugaugcacauaagaaaaaccuauaugaccacgcacuaaugagcauuauaucaaccuuccacuuaucuauaccaaauuucaaccaauaugaagccaugucaugcgauuucaacggaggaagaaucucuguacaauacaaccuaucacacuccuaugcaguagacgccgcaaaccauuguggaacaauagcuaacggaguacuacaaaccuucaugagaauggcuuggggagguucauacauagccuuagacaguggaugcgguucaugggacugcauaaugacaucauaucaauaccuaauaauacaaaauacaacuugggaagaccacugccaauuuucaagaccaucaccaauaggauauuuaggucuauuaucacaaagaacaagagacauauacauuucuagacgaagacgaggaacauucacauggacacuaucagacucagaaggaaacgaaacacccggaggcuacugucuuacacgauggaugcuaauagaagcagaacuaaaaugcuucgguaacacugcaguugcaaaauguaacgaaaaacaugaugaagaauuuugcgacaugcuccgauuauucgauuucaacaaacaagcaauacgucgacuuaaaacaccagcucaaauguccauacaauuaauaaacaaagcaguaaaugcauuaauaaaugaccaacuaauaaugaaaaaccaccuaagagauauaaugugcauaccauacugcaacuacucuaaauacugguacuuaaaccacaccguaaccggaaaaacaucacuaccccgcugcuggcuaguaucaaauggaaguuaccuaaacgaaacacacuuuucagacgacauagaacaacaagcagacaacaugauaacagaacuacuacaaaaagaauacaucgauagacaaggcaaaacaccacuuggccuagucgaucuauucguauucagcacaucauuuuaucucauaucaaucuucuuacacuuagucaaaauaccuacacacagacacauaaccggaaaaccaugucccaaaccacacagacuaaaccacaugggaauaugcuccugcggacuauauaaccacccaggaguaccaguaaaauggaaaagauaaggacuaguuauaagacugacuagcccgaugggccucccaacgggcccuccuccccuccuugcaccgagauuaauaaaaaaaaaaaaaaaaaaaaaaaaaaaaaaaaaaaaaaaaaaaaaaaaaaaaaaaaaaaaaaaaugcaucccccccccccccccccccccccccccccccaaaggcucuuuucagagccaccagaauu

SEQ ID NO: 7495 - RNA, 1690 nt, Artificial Sequence
  mRNA product Design i-3 comprising derived and/or modified sequence from LASV(Lassa virus/H.sapiens-wt/NGA/2016/ISTH_0017;Clade II)__AVO03567__GPCstabilized (opt6)
gggagaaagcuuaccaugggacaaauaauaacauucuuccaagaaguaccacacgucauagaagaaguuaugaacauuguacuuauagcacuuucacucuuagcaauccuaaaagguauauacaauguagcuaccugcggacuauuuggacuaguaucauucuuauuacuauguggcagaucaugcucaacaacauacaaaggaguauacgaauuacaaacacuagaacuugacauggcaucacuaaacaugacuaugccuuuauccugcaccaaaaacaacucacaccacuacauaaugguaggaaacgaaacaggccuagaacuaacauuaacaaacacaucaaucauaaaccacaaauucuguaacuuaucagaugcacacaaaaaaaaccucuacgaccacgcucuaauguccauaauaucaacauuccacuuaucuauaccaaacuucaaccaauacgaagcaaugucaugcgacuuuaacggcggaaaaauaucaguacaguacaaccuaagccacacauaugccauagacgcagccaaccauuguggaacaauagcaaauggaguacuacaaacuuucaugagaauggcauggggaggaucauauauagcccuagacucaggauguggaucaugggacuguaucaugacaucauaccaauacuuaauaauacaaaauacaaccugggaagaccacugccaauuuucccgacccucaccuauaggauaucuagguuuacuaucccaaagaacacgagacauauacaucucaagaagaagaagagguaccuucaccuggacacucuccgacagcgaaggaaacgaaaccccuggcggauacugucuuacacgauggauguuaauagaagcagaauuaaaauguuuuggaaauacagcaguugcaaaaugcaaugaaaaacacgacgaagaauucugugacaugcuccgacuauuugauuuuaauaaacaagcaauaagacgacuaaaaaccccagcccaaaugucaauacaacuaauaaacaaagcaguuaacgcacuaauaaacgaccaauuaauaaugaaaaaccaccuaagagacauaaugugcauaccauacuguaacuacagcaaauacugguacuuaaaccacaccguaacaggaaaaacaucauuacccagauguuggcuaguauccaaugguucauacuuaaacgaaacacacuuuuccgacgauauagaacaacaagcagacaacaugauaaccgaacuauuacaaaaagaauacauggacagacaaggaaaaaccccacuaggccuaguagaucuauucguauucucaaccucauucuaccucauaaguauauuucuacaccuaguaagaauaccaacccauagacacguaauaggaaaaccaugcccaaaaccacauagacucaaccauaugggaauaugcagcugcggacuguacaaacauccuggaguaccaguuaaauggaaaagauaaggacuaguuauaagacugacuagcccgaugggccucccaacgggcccuccuccccuccuugcaccgagauuaauaaaaaaaaaaaaaaaaaaaaaaaaaaaaaaaaaaaaaaaaaaaaaaaaaaaaaaaaaaaaaaaaugcaucccccccccccccccccccccccccccccccaaaggcucuuuucagagccaccagaauu

SEQ ID NO: 7496 - RNA, 1690 nt, Artificial Sequence
  mRNA product Design i-3 comprising derived and/or modified sequence from LASV(Lassa virus/H.sapiens-wt/NGA/2018/ISTH_0959;Clade II)__AVV65099__GPCstabilized (opt6)
gggagaaagcuuaccaugggacaaauaaucacauucuuccaagaaguaccacacguaauagaagaaguaaugaauauaguucucauagcauuaucacuccuugcaauauuaaaaggaauauauaacguaguaacuugcggacuauucggccuaguauccuuucuacuacuauguggaagaucaugcuccaccaccuauaaaggaguauacgaacuucaaacacuugaacuagacauggccucauuaaauaugaccaugccauuaaguugcacaaaaaacaacucacaccauuacauaaugguaggaaacgaaacaggacuagaauuaacacuuacaaacacaucuauaaucaaucacaaauucugcaaucuauccgacgcccacaaaaaaaaccuauacgaccaugcacuuaugucaauaauaucaaccuuccaccuuucaauuccaaacuucaaucaauacgaagcaaugucuugcgauuucaacggaggaaaaauaucaguacaauacaaucuaucccaugccuacgcaauagacgcugcaaaucacugcggaacaauagcaaacggcguccuccaaacauucaugagaauggcauggggaggcucauauaucgcauuagacucuggauguggaucaugggauuguaucaugacaaguuaccaauaccuaauuauacaaaauacaaccugggaagaccacugccaauucucaagacccuccccaauaggauaucuaggacuauuaucacaacgaacuagagacauauauauaucacgaagaagaagagguacauucacauggacacuaucagacucagaaggaaacgaaacaccaggcgguuauugcuuaacacgauggaugcuaauagaagcagaacuaaaaugcuuugguaauacagcuguagcaaaaugcaaugaaaaacaugacgaagaauucugugacaugcucagauuauuugauuuuaacaaacaagcaauaagaagguuaaaaacaccugcacaaaugucaauacaauuaauaaacaaagccguuaacgcacuaauaaacgaccaauuaauaaugaaaaaccaucuucgcgacauaaugugcauaccauacugcaacuacucuaaauacugguacuuaaaccacacaguaacaggcaaaacauccuuaccacgaugcuggcuaguaucaaacgguuccuacuuaaacgaaacccacuucucagaugacauagaacaacaagcagacaacaugaucacagaauuauuacaaaaagaauacauagauagacaaggaaaaacaccacuaggccucgucgauuuauucgucuuuucaacaucauuuuauuuaauuucaauauuccuacauuuaguaaaaauaccaacacaccgacacguaauaggaaaaccuuguccaaaaccccacagauuaaaccauaugggaauauguuccugcggccuauauaaacauccaggcguucccgucaaauggaaacguuaaggacuaguuauaagacugacuagcccgaugggccucccaacgggcccuccuccccuccuugcaccgagauuaauaaaaaaaaaaaaaaaaaaaaaaaaaaaaaaaaaaaaaaaaaaaaaaaaaaaaaaaaaaaaaaaaugcaucccccccccccccccccccccccccccccccaaaggcucuuuucagagccaccagaauu

SEQ ID NO: 7497 - RNA, 1690 nt, Artificial Sequence
  mRNA product Design i-3 comprising derived and/or modified sequence from LASV(LASV003-NIG-2008;Clade II)__AIT17580__GPCstabilized (opt6)
gggagaaagcuuaccaugggacaaauaauaacauuuuuccaagaagucccacacguaauagaagaaguaaugaacaucguccuaauagcauuaucauuacuagcaauucuaaaaggaauauacaauguagcaacuuguggccuauucggccuaguaucauuccuauuauuauguggccgaagcugcucaacaaccuacaaagguguauacgaacuacaaacccuagaauuagacauggcaucacuaaauaugacaaugccacuauccugcaccaaaaacaacucccaucacuacauaaugguaggcaacgaaacaggcuuagaacuaacacuaacaaacacuucaauaauaaaccacaaauucugcaaccuauccgacgcccacaagaaaaauuuauaugaccacgcauuaaugucaauaauaucaacauuccacuuauccauacccaauuucaaccaauacgaagcaaugucaugugauuucaacggagguaaaaucagcguacaauacaauuuaucacauacauaugcaguagacgcagcaaaccauuguggcacaauagcaaacggaguauuacaaacauucaugagaauggcuuggggaggaucauacauugcacucgacucaggaugcggaucaugggauugcauaaugacaucauaccaauaccuaauaauacaaaacacaaccugggaagaucacugccaauucuccagaccaucaccaaucgguuauuuaggacuacuaucacaaagaacaagagacauauauauaucacgaagaagacgaggaacauuuaccuggacccuaucagauucagaaucaaaugaaacaccaggcggauacugccuaacaagauggauguuaauagaagcagaauuaaaaugcuuuggaaauacagcaguagcaaaauguaacgaaaaacacgaugaagaauuuugcgauaugcuacgacuauuugacuucaacaaacaagcaauaagacgacuaaaagccccugcacaaaugucaauacaauuaauuaauaaagcaguuaaugcauuaauaaaugaccaacuaauaaugaaaaaccacuuaagagacaucauguguauaccauauugcaacuauagcaaauacugguacuuaaaccacacaguuacaggaagaacaagccuaccccgauguuggcucguauccaacggaucauaccuuaacgaaacacacuuuucagaugacauagaacaacaagcagauaacaugauaacagaauuauuacaaaaagaauacauggaccgacaaggcaaaacaccacuaggccuaguagaccuauuuguauuuuccaccuccuucuaccuaauaucaauuuucuuacacuuaguaaaaaucccuacacaccgacacguaauaggaaaaccaugcccaaaaccacaccgauuaaaccacaugggaauauguucauguggauuauacaaacacccaggaguaccagucaaauggaaaagauaaggacuaguuauaagacugacuagcccgaugggccucccaacgggcccuccuccccuccuugcaccgagauuaauaaaaaaaaaaaaaaaaaaaaaaaaaaaaaaaaaaaaaaaaaaaaaaaaaaaaaaaaaaaaaaaaugcaucccccccccccccccccccccccccccccccaaaggcucuuuucagagccaccagaauu

SEQ ID NO: 7498 - RNA, 1690 nt, Artificial Sequence
  mRNA product Design i-3 comprising derived and/or modified sequence from LASV(LASV035-NIG-2009;Clade II)__AIT17588__GPCstabilized (opt6)
gggagaaagcuuaccaugggacaaauaauaaccuuuuuccaagaaguaccacacguaauagaagaaguaaugaacauaguacuuauagcauuaagccuccuugcuauuuuaaaaggaauauacaauguagcaacauguggacuauucggacuaguaucauuucuuuuauuaugcggaagaucauguuccacaacauacaaaggaguuuacgaauuacaaacauuagaacuagacauggcaucauuaaacaugacaaugccacuauccugcacaaaaaacaacucacaucauuacaucaugguaggaaaugaaacaggauuagaacuuacacuaacaaacacaagcauaauaaaccacaaauucugcaaccuaucagacgcacacaaaaaaaaucuauaugaccacgcacuaaugucaauuauauccacauuucacuuaucaaucccaaacuucaaccaauacgaagcaaugucaugcgacuuuaauggaggaaaaauuucuguacaauauaaccuaucacaugccuacgcuguagaugcugcaaaccacugcgguacaaucgcaaauggaguauuacaaacauucaugagaauggcuuggggaggaucauacauagcauuagacucaggaugcggcucaugggacuguauaaugacaucuuaccaguaucuaauaauacaaaacacaaccugggaagaucacugccaauucucacgacccucaccaauuggauacuuagguuuacuaucacaaagaacccgcgauauauacaucuccagaagacgcagaggaacauuuaccuggacauuaagcgacuccgaaggaaaugaaacaccuggaggauacugcuuaacuagauggauguuaauagaagccgaacuuaaaugcuucggaaauacagcuguugcuaaaugcaacgaaaaacacgacgaagaauucugcgacaugcuaagauuauucgacuucaacaaacaagcuauaagaagacuaaaagcaccagcacaaaugucaauacaauuaauaaauaaagcaguuaacgcauuaauaaacgaucaacuuauuaugaaaaaccaccuaagagacauaaugugcauaccauacuguaacuacucaaaauauugguacuuaaaccacacaguaacaggaaaaacaucacucccaagauguugguuaguaagcaacggcuccuaccuaaacgaaacacauuucagugacgauaucgaacaacaagccgauaauaugaucacagaacuacuacaaaaagaauauaucgauagacaaggaaaaacacccuuaggacuaguagaccucuucguauucucaacauccuucuacuuaauauccauauucuuacaccuaguaaaaauaccaacacauagacacguaauaggaaaaccauguccaaaaccucacagacuaaaccacaugggaauuuguuccuguggacuauauaaacaccccggcguaccaguaaaauggaaacgauaaggacuaguuauaagacugacuagcccgaugggccucccaacgggcccuccuccccuccuugcaccgagauuaauaaaaaaaaaaaaaaaaaaaaaaaaaaaaaaaaaaaaaaaaaaaaaaaaaaaaaaaaaaaaaaaaugcaucccccccccccccccccccccccccccccccaaaggcucuuuucagagccaccagaauu

SEQ ID NO: 7499 - RNA, 1690 nt, Artificial Sequence
  mRNA product Design i-3 comprising derived and/or modified sequence from LASV(LASV1000-NIG-2009;Clade II)__AIT17782__GPCstabilized (opt6)
gggagaaagcuuaccaugggacaaauaauaaccuucuuccaagaaguaccacacguaauugaagaaguaaugaauauaguucuaauagcacucucacuauuagccauacuuaaaggcauauauaauguagcaacaugcggauuauucggauuaguaucauuucuauuacuaugcggacgauccuguagcacaacauacaaaggaguauacgaacuacaaacauuagaauuagauauggcaucacuaaauaugacaaugcccuuaucuuguaccaaaaacaacucacaccacuacauaaugguuggaaacgaaacaggacuagaauuaacacuaacaaacacaucaauaauaaaucacaaauucugcaaccuaucagacgcucauaagaaaaaccuauacgaccacgcccuaauguccauaauaucaaccuuucaccuaucaauacccaauuuuaaccaauacgaagcuaugucaugcgauuucaacggcggaaaaauauccguacaauacaauuuaucacauacauaugcaguugaugccgcaaaucacugcggaacaauagcaaauggcguucuacaaacauuuaugagaauggcuuggggcggaucauacauagcacuugauucuggcugcggaucaugggauugcauaaugacauccuaccaauacuuaauaauacaaaacaccaccugggaagaccacugccaauucucaagaccaucaccuauaggcuacuuaggacuauuaucacaaagaacccgagacauauacauauccagaagacgaagaggcaccuucacauggacacuaucagauucagaaggaaacgaaacaccagguggcuauugcuuaaccagauggaugcuaauagaagccgaauuaaaaugcuuuggaaacacagcaguagcaaaaugcaacgaaaaacaugacgaagaauuuugcgauaugcuuagauuauucgauuuuaauaaacaagcaauaaaacgucuaaaaacaccagcacaaaugagcauucaauuaauaaacaaagccgucaacgcucuaauaaaugaccaacuaauaaugaaaaaccacuuaagagacauaaugugcauaccuuauuguaacuacucaaaauauugguaccuaaaccauacugucacaggaaaaacaucauuacccagaugcuggcuaguaucaaauggaucuuaucuaaaugaaacacacuucucagacgacauagaacaacaagcagacaacaugauaaccgaacuacuucaaaaagaauacauagacagacaaggaaaaacaccauuaggccuaguagaccuauucguauucucuacauccuuuuauuuaauaagcauauuucuacaucuaguaaaaauaccuacacauagacauguaguaggcaaaccaugcccaaaaccacacagacucaaccacaugggaauauguagcuguggauuauacaaacaucccggcguucccguuaaauggaaaagauaaggacuaguuauaagacugacuagcccgaugggccucccaacgggcccuccuccccuccuugcaccgagauuaauaaaaaaaaaaaaaaaaaaaaaaaaaaaaaaaaaaaaaaaaaaaaaaaaaaaaaaaaaaaaaaaaugcaucccccccccccccccccccccccccccccccaaaggcucuuuucagagccaccagaauu

SEQ ID NO: 7500 - RNA, 1690 nt, Artificial Sequence
  mRNA product Design i-3 comprising derived and/or modified sequence from LASV(LASV221-NIG-2010;Clade II)__AIT17624__GPCstabilized (opt6)
gggagaaagcuuaccaugggccaaaucauaaccuuuuuccaagaaguaccucauguaauagaagaaguaaugaacauaguucucaucgcacuaucacuccuagcaauacuaaaaggaauauacaacguugcaaccuguggauuauuuggauuaguaucauuuuuauuacucugcggcagaucuuguucaacaacauauaaaggaguauacgaauuacaaacauuagaauuagacauggcaucacuuaacaugaccaugccacuaucuugcacuaaaaacaauucacaccacuauaucaugguaggaaaugaaacaggauuagaauuaacauuaacaaacacaucaauaauaaaccacaaauucugcaaucuauccgacgcacacaagaaaaacuuauaugaccaugcacuuaugagcauaauaucuacauuucaccuaucaauaccaaauuuuaaccaauacgaggcaaugucuugcgacuuuaacggaggcaaaauaucaguccaauacaaccuaucacacaccuacgcaauagacgcagcaaaccacugcggaacaaucgcuaauggaguauuacaaacauucaugagaauggccuggggcggaagcuacaucgcauuagacucaggaugcggaucaugggacuguaucaugacaucauaccaauaccuuauaauacaaaacacaacaugggaagaccacugccaauucucacgaccaucccccauaggauaccuaggacuacuaucucaaagaacaagagacauauacauaucacgaagacgucgcgguacuuuuacauggacacucucagauuccgaaggcaacgaaacaccaggagguuacugccuaacaagauggaugcuuauagaagcagaauuaaaaugcuuuggaaauacagcuguagcaaaaugcaacgaaaaacacgaugaagaauuuugcgacaugcuaagauuauucgacuuuaauaaacaagcaauaagaagacuaaaaacaccagcccaaaugucaauacaacuaauaaacaaagcuguaaacgcccucauaaacgaccaauuaauaaugaaaaaucacuuaagagacauaaugugcaucccauauuguaacuauucaaaauacugguaucuaaaccauacaguaacaggaaaaaccagcuuaccaagaugcuggcuaguauccaacggaucauacuuaaacgaaacacacuuuucagacgacauagaacaacaagcugacaauaugauaacagaaaugcuucaaaaagaauauauggaccgacaaggaaaaacaccauuaggauuaguagaucucuucguauucucaacaucauucuacuuaauaucaauauuccuacaccucgucaaaauacccacacauagacauguaauaggcaaaccauguccaaaaccacacagacucaaccauaugggaauauguucaugcggucuauauaaacacccaggagucccaguaaaauggaaaagauaaggacuaguuauaagacugacuagcccgaugggccucccaacgggcccuccuccccuccuugcaccgagauuaauaaaaaaaaaaaaaaaaaaaaaaaaaaaaaaaaaaaaaaaaaaaaaaaaaaaaaaaaaaaaaaaaugcaucccccccccccccccccccccccccccccccaaaggcucuuuucagagccaccagaauu

SEQ ID NO: 7501 - RNA, 1690 nt, Artificial Sequence
  mRNA product Design i-3 comprising derived and/or modified sequence from LASV(LASV237-NIG-2010;Clade II)__AIT17638__GPCstabilized (opt6)
gggagaaagcuuaccaugggacaaauaauaacuuucuuccaagaaguaccacacguaauagaagaagucaugaauauaguccuaauagcacucucauuacuagcaauacuaaaaggaauauacaacguagccaccugcggacuauucggauuaguaucauuccuucuuuuaugcgguagaucuugcucaacaacauacaaaggaguuuacgaauuacaaacacuagaacuagauauggcuucacuaaauaugacuaugccacuauccugcacaaaaaacaacucacaucacuacauaauggucggaaacgaaaccggucuagaauuaacauuaacaaacacaucaauuaucaaccauaaauuuugcaaucucuccgacgcacauaaaaaagaccuauacgaucacgcacuaaugucaauuaucucaacuuuccaccuaucaauaccaaauuuuaaucaauacgaagcaaugucaugcgauuuuaauggaggaaaaauaucuguacaauauaacuuaucacacaccuacgcaguagacgcagcaaaccauugcggaacaauagcaaacggaguuuuacaaacuuucaugagaauggcauggggaggauccuacauagcauuagacucaggaugcggaaguugggauuguauaaugacuucauaccaauaccucauaauacaaaauaccacuugggaagaccacugccaauucucacgaccuucaccaaucggauacuuaggucuccuaucacaaagaaccagagacauauacauaucaagacgaagacgcggaacuuucacauggacacuaucagauucugaaggaaacgaaacuccaggaggauacugcuuaacaagauggauguuaauagaagccgaacuaaaaugcuucggaaacacagcaguagcaaaauguaacgaaaaacacgacgaagaauuuugcgacauguuaagacucuucgacuucaauaaacaagcaauaagaagacuaaaaacaccagcacaaaugucuauacaacuaauuaauaaagcaguaaacgcauuaauaaaugaccaacuaauuaugaaaaaccaucuacgcgacauaaugugcauaccauacugcaacuauucuaaauauugguauuuaaaccacacaguaacaggaaaaacaucccuacccagguguugguuaguaagcaauggaucauacuuaaaugaaacacauuucucugaugacaucgaacaacaagcagacaauaugauaacagaacuacuucaaaaagaauacauggacagacaaggaaaaacaccauuaggucuaguagauuuauucgucuucucuacaucauuuuaucuaauaucaaucuucuuacaucuaauaaaaauaccaacccacagacauauaacaggcaaaccaugcccaaaaccucauagacuaaaccacaugggaauaugcucauguggccuauacaaacacccaggcgucccagucaaauggaaaagauaaggacuaguuauaagacugacuagcccgaugggccucccaacgggcccuccuccccuccuugcaccgagauuaauaaaaaaaaaaaaaaaaaaaaaaaaaaaaaaaaaaaaaaaaaaaaaaaaaaaaaaaaaaaaaaaaugcaucccccccccccccccccccccccccccccccaaaggcucuuuucagagccaccagaauu

SEQ ID NO: 7502 - RNA, 1690 nt, Artificial Sequence
  mRNA product Design i-3 comprising derived and/or modified sequence from LASV(LASV253-NIG-2011;Clade II)__AIT17670__GPCstabilized (opt6)
gggagaaagcuuaccaugggccaaauaauaacauucuuucaagaaguaccacacguaauagaagaaguaaugaauaucguacuaauagcucucucacuccuagcaauacuaaaaggaauauacaacguagcuaccugcggccuauuuggccuugucuccuuccuacuccuaugcggacgaucaugcucaacaacauauaaaggagucuacgaacuucaaacauuagaacuagacauggcaucacuaaacaugacaaugccccuaucauguacaaaaaauaauucucaccacuauaucaugguagguaacgaaacaggccuagaacuaacccucacaaacaccucaauaauuaaccacaaauucugcaauuuauccgacgcacauaaaaaaaaccucuaugaccacgcacuaauguccauaauauccacauuccaucucucaauacccaacuucaaccaauacgaagcaaugucaugugacuucaauggaggaaaaauuucaguacaauacaaccucucacauacauacgccguugacgcagcaaaccacugcggcacaauagcuaacggcguccuacaaacauucaugagaauggccuggggaggaucauauauugcuuuagauucaggauguggauccugggauugcauaaugacaucauaccaauaccuuauaauacaaaacacaacaugggaagaccauugccaauucucaagaccaucacccauaggauaccuaggacuauuaucacaacgcacacgagacaucuauauaucaagaagaagacgaggaacauucacauggacacucuccgacuccgaaggaaaugaaacaccaggaggauacugucuaaccagauggauguuaaucgaagcagaacuaaaaugcuucggaaacacagcaguagcaaaaugcaacgaaaaacaugaugaagaauucugcgacaugcuacgauuauucgauuucaauaaacaagccauaagacgacucaaagcaccagcacaaaugucaauacaacuaauaaauaaagcaguuaacgcacuaauuaacgaucaacuaauaaugaaaaaucacuuaagagauauaaugugcauaccauacuguaacuacuccaaauacugguacuuaaaccauacaguaaccggaagaacaagccuaccaagaugcuggcuagugucaaacggaucauaucucaacgaaacacauuucucagacgauaucgaacaacaagcagacaauaugauaacagaauuauuacaaaaagaauacaucgacagacaaggaaaaacuccauuaggauuaguagaucuauuuguauucucaacuucauucuauuuaauaucaauauucuuacacuuaguaaaaaucccaacacacagacacauaauaggcaaaccuugcccuaaaccacacagauuaaaccauaugggaaucugcucaugcggauuauauaaacacccaggagucccagucaaauggaaacgauaaggacuaguuauaagacugacuagcccgaugggccucccaacgggcccuccuccccuccuugcaccgagauuaauaaaaaaaaaaaaaaaaaaaaaaaaaaaaaaaaaaaaaaaaaaaaaaaaaaaaaaaaaaaaaaaaugcaucccccccccccccccccccccccccccccccaaaggcucuuuucagagccaccagaauu

SEQ ID NO: 7503 - RNA, 1690 nt, Artificial Sequence
  mRNA product Design i-3 comprising derived and/or modified sequence from LASV(LASV254-NIG-2011;Clade II)__AIT17674__GPCstabilized (opt6)
gggagaaagcuuaccaugggacaaauaaucacauucuuucaagaaguaccacacguaauagaagaaguaaugaacauaguccuaauagccuuaagucuccuagcaauauuaaaaggaaucuauaauguugcaacaugcggcuuauucggucuaguaucauuucuauuacuaugcggaagaucauguuccacaaccuauaaaggaguauacgaauuacaaacccuggaacuagacaugacaaacuuaaauaugacaaugccacuuaguugcaccaaaaauaauucacaccacuacauaauggucggaaacgaaacaggauuagaauuaacacuaacaaacacaucuauaauaaaccacaaauucugcaauuuaucagaugcucacaagaaaaaccuauacaaucacgcauuaauguccauaauauccaccuuccaucuaucaaucccaaacuuuaaccaauacgaagcaauguccugcgacuuuaacggaggaaaaauaucaguacaauauaacuuaucccacucauaugcaguagaugccgccaaucacugcggaacaauagcaaacggaguacuacaaacauucaugagaauggcuuggggaggaagcuacauugcccuagacucaggauguggaaauugggauuguaucaugacauccuaucaauaccuaauaauacaaaauaccacaugggaagaucacugccaauucucacgaccaucaccaauaggauauuuaggacuccucucccaacgaacucgagacauuuauauuucacgaagacgaagaggaacuuucacauggacucuaucagauagcgaaggaaaugaaacacccggaggauauugccuaacaagauggaugcugauagaagcagaacuaaaauguuucggaaauacagcaguagcaaaaugcaaugaaaaacaugacgaagaauuuugcgauauguuaagauuauucgacuucaacaaacaagcaauacgcagacuuaaaacaccagcacaagcaaacauacaacuaauaaacaaagcaguaaaugcauuaauuaacgaccaacuaauaaugaaaaaccaucuaagagacaucaugugcauaccauauuguaacuauucaaaauauugguaccuaaaucacacaguaacaggaaaaaccucacuaccuagguguugguuaguaucaaacggaagcuaccuaaacgaaacacauuucuccgacgacauagaacaacaagcagacaacaugauaacugaacuauuacaaaaagaauauauggacagacaaggaaaaacgcccuuaggacuuguagacuuauucguauucucaaccucauuuuaccuaauaucaauauuccuacaccucguaaaaauaccaacacacagacaugucauaggaaaaccuugcccaaaaccucacagacuaaaccacaugggaauaugcuccugcggccuauacaaacauccaggaguaccuguaaaauggaaaagauaaggacuaguuauaagacugacuagcccgaugggccucccaacgggcccuccuccccuccuugcaccgagauuaauaaaaaaaaaaaaaaaaaaaaaaaaaaaaaaaaaaaaaaaaaaaaaaaaaaaaaaaaaaaaaaaaugcaucccccccccccccccccccccccccccccccaaaggcucuuuucagagccaccagaauu

SEQ ID NO: 7504 - RNA, 1690 nt, Artificial Sequence
  mRNA product Design i-3 comprising derived and/or modified sequence from LASV(Nig08-A19;Clade III)__ADU56618__GPCstabilized (opt6)
gggagaaagcuuaccaugggucaaauaguaacauucuuccaagaagucccccacguuauagaagaaguaaugaacauagucuuaauagcauuaucaauacuagccauccuuaaaggacuauacaauauagcaaccugcggacuuauuggccuaguaacauuucuacucuuaucaggaagaucaugcuccaugacuuauaaaggaguauacgaacuucaaacacuagaacuuaacaugaauacuuuaaauaugacaaugccauuaucaugcaccaaaaacaacucacaccauuacaucaugguuggcaacgaaacaggauuagaacuaacuuuaacaaacacaucauuacuacaucacaaauucugcaaucuaagcgacgcacauaagaaaaaucuauacgaccacacacuaaugucaauaauaucaacauuucaucuaucaauaccaaacuucaaucaauacgaagcaaugagcugugauuucaacggaggaaaaauaacaguccaauacaaccuaucacacucuuacgcaauagacgcagcaaaccacugcggaacagucgcuaaugggguacuacaaaccuucaugagaauggcauggggcggcucauacaucgcacuugauagcggauguggcaaaugggauugcauuaugacaucauaccaauaccuaauaauccaaaauacaacgugggaagaccacugccaauucaguagaccuucaccaauaggauacuuaggauuacuaucacaacgaaccagagauaucuacauauccagaagaagacgcggcacauucacauggacccucucagacucagaagguaaugaaacaccaggaggauacugcuuaacaagauggaugcuuauagaagcagaauuaaaaugcuucggaaacaccgcuguagcaaaaugcaacgaaaaacacgacgaagaauuuugcgacaugcuaagacuauucgacuucaacaaacaagcaaucagacgauuaaaagcucccgcacaaauguccauacaacuaauaaauaaagcaguaaaugcuuuaauaaacgaccaacuaauaaugaaaaaccaccuaagagacauuaugugcauacccuauugcaacuacucaaaauacugguaucuaaaccauacaucaacugguagaacaucacuaccaagaugcugguuaguaucaaacggauccuacuuaaaugaaacacacuucucugaugacauagaacaacaagcagacaacaugauaacagaaaugcuucaaaaagaauacuuagacagacaagguaaaacaccucucgggcuaguagaccuauucguauucucaacaucauucuaccuuauaucaauauuccuacauuuaguaaaaaucccaacacaccgacauaucguaggaaaaccaugcccaaaaccacacagauuaaaucacaugggaauauguaguugcggauuauacaaacaacccggaguaccuguacgcuggaaaagauaaggacuaguuauaagacugacuagcccgaugggccucccaacgggcccuccuccccuccuugcaccgagauuaauaaaaaaaaaaaaaaaaaaaaaaaaaaaaaaaaaaaaaaaaaaaaaaaaaaaaaaaaaaaaaaaaugcaucccccccccccccccccccccccccccccccaaaggcucuuuucagagccaccagaauu

SEQ ID NO: 7505 - RNA, 1693 nt, Artificial Sequence
  mRNA product Design i-3 comprising derived and/or modified sequence from LASV(G1180-SLE-2010;Clade IV)__AIT17168__GPCstabilized (opt6)
gggagaaagcuuaccaugggacaaauagucacuuuuuuccaagaaguaccacauguaaucgaagaaguaaugaacauaguacuaauagcacuuuccauacuagcuguccuaaaaggacucuacaacuucgccacaugcggacuaguaggccuauuaacauuccuauuauuaugcggccguuccugcacagcaucaagauacaaagguguauacgaacuccaaacacuagaauuaaauauggaaacauuaaacaugacaaugccucuaucaugcacaaaaaacaacucacaucauuacauaaugguaggaaacgaaacaggacuagaacuaacauuaacaaacacaucaauaaucaaucacaaauucugcaauuuaagcgacgcucacaaaaaaaacuuauacgaccacgcauuaaugucaauaauaucaacuuuccaccuuucaaucccaaacuucaaccaauacgaagcaaugucaugugacuucaacggcggaaaaauaucaguucaauacaacuuaucucacucauacgcuggagacgcagcaaaucacuguggaacaguagcaaacggaguucuacaaacauucaugagaauggcauggggaggaucauauauagcauuagacucaggaugcggaucaugggacugcauuaugaccucauaccaauaccuaauaauacaaaacacaacaugggaagaccacugccaauucucuagaccaaguccaauaggauacuuaggacuucuaucacaaagaacacgcgacauauacauaucccgcagacgaagagguacauuuacauggacacuaagcgauuccgaaggaaaagacacaccaggaggauauugccuaacacgcuggaugcucauagaagcugaacuaaaaugcuucggaaauacagcuguagcaaaauguaacgaaaaacacgacgaagaauuuugugacaugcuaaggcuauucgacuucaacaaacaagcaauccaaagauuaaaagcacccgcucaaaugucaauacaacuaauaaacaaagcaguaaacgcacuaauaaacgaccaacuaauaaugaaaaaccaucucagagauauaaugugcauuccauacugcaacuauucaaaauacugguaucuaaaucacacaacaaccgguaaaacaucacuaccaaaaugcugguuaguaagcaacggaucauauuuaaacgaaacacacuucucugacgauauagaacaacaagcagacaauaugauaacagaaauguuacaaaaagaauacauggaaaggcaaggaaaaaccccacuaggauuaguagaccuauuuguauucucaacaaguuuuuacuuaauaucaaucuuucuacaucuaguaaaaauaccaacccacagacacauaguaggaaaauccugccccaaaccucacagacuaaaccacaugggcauaugcuccugcggacuauacaaacaacccggaguaccagucaaauggaaaagauaaggacuaguuauaagacugacuagcccgaugggccucccaacgggcccuccuccccuccuugcaccgagauuaauaaaaaaaaaaaaaaaaaaaaaaaaaaaaaaaaaaaaaaaaaaaaaaaaaaaaaaaaaaaaaaaaugcaucccccccccccccccccccccccccccccccaaaggcucuuuucagagccaccagaauu

SEQ ID NO: 7506 - RNA, 1693 nt, Artificial Sequence
  mRNA product Design i-3 comprising derived and/or modified sequence from LASV(G1442-SLE-2011;Clade IV)__AIT17180__GPCstabilized (opt6)
gggagaaagcuuaccaugggacaaauaguuaccuuuuuccaagaaguaccucauguaauagaagaagucaugaauauaguccuaauagcauuaucaauauuagcaguauuaaaaggacuuuacaacguagcaaccuguggacuaauaggucuaguaacauuucuacucuuaugcggaagaucauguacuacaacacuauacaaaggaguauacgaauuacaaacucuagaacuaaauauggaaacacuaaacaugacaaugccacucucauguaccaaaaacaacucacaucacuacauucgaguaggaaaugaaacaggucuagaauuaacauuaacaaacacaucaauaauaaaccauaaauucugcaaccucucagacgcacacaagaaaaacuuauacgaccaugcauuaaugucaauaauuuccacauuccauuuauccauaccaaauuuuaaucaauacgaagcaauguccugcgacuucaacggaggaaaaauauccguucaauauaauuuaagucacucuuaugcaggagacgcagcaaaucacuguggaacaguagccaacggagucuuacaaacauucaugagaauggcauggggagguucauacaucgcccuagacucaggcugcggaaauugggauugcauaaugacauccuaucaauaccuaauaauacaaaacacaaccugggaugaccacugucaauucucaagaccaucuccaauaggauauuuaggauuacuaucacaaagaacaagagacguauacauaagcagaagaagaagaggaacauuuacauggacuuuaucagauucagaaggaaaagacacacccggcggcuacugccugaccagauggaugcuaauagaagcagaauuaaaauguuucggcaacacagcaguagcaaaaugcaaugaaaaacacgacgaagaguucugcgauaugcuaagacuuuucgacuucaauaaacaagcaauucaacgauuaaaagcuccagcacaaauguccauacaacuuauaaacaaagccguaaacgcccuaauuaaugaucaauuaauaaugaaaaaccaccuaagagacauaauguguauaccuuacuguaauuacaguaaauacugguacuuaaauaauacugccacaggaaaaacaucauuaccaaaaugcugguuaauaucaaacggaucauacuuaaacgaaacacacuucucagaugacaucgaacaagaagcugacaacaugauuacagaaauguuacaaaaagaauacauggaaagacaaggaaaaacaccuuuaggucuaguagaucuauucgucuucuccacaucauucuaucucauaucuaucuuucuacaccuaguaaaaauaccaacacacagacacauagucggaaaauccugcccaaaaccacacagauuaaaccacaugggaauuugcucaugcggacuauacaaacaaccaggaguaccaguaagauggaaaagauaaggacuaguuauaagacugacuagcccgaugggccucccaacgggcccuccuccccuccuugcaccgagauuaauaaaaaaaaaaaaaaaaaaaaaaaaaaaaaaaaaaaaaaaaaaaaaaaaaaaaaaaaaaaaaaaaugcaucccccccccccccccccccccccccccccccaaaggcucuuuucagagccaccagaauu

SEQ ID NO: 7507 - RNA, 1693 nt, Artificial Sequence
  mRNA product Design i-3 comprising derived and/or modified sequence from LASV(G3010-SLE-2013;Clade IV)__AIT17344__GPCstabilized (opt6)
gggagaaagcuuaccaugggucaaaucguaacauuuuuccaagaaguaccacacgugaucgaagaaguaaugaauauaguacucauagcauuaaguauauuagcuguacuaaaaggccuauauaacuucgccacaugcggucuaguaggucuaguaacauuucuacuauuaugcggaagauccugcacaacaucccuauacaaaggagucuacgaauuacaaacauuagaauuaaacauggaaacacugaacaugacaaugccauuaucaugcaccaaaaacaacucacaccacuacaucauggucggaaaugaaacaggacuagaacuaacacuaacaaacacauccauaauaaaccacaaguuuugcaacuuaucagacgcacauaagaaaaaccucuauaaucacgcacuuauguccauaauauccacauuccaccuauccauaccaaacuucaaccaauacgaagcaaugucaugcgacuucaacggaggaaaaauuucaguacaauacaacuuaucacacucauacgcgggagacgcagcaucucauugcggaacaguagcaaacggaguauuacaaacauuuaugcgaauggcuuggggaggcucauauauagcacuagacucaggaugcggaaaaugggacugcauaaugacauccuaccaauaccuaauaauccaaaauacaacaugggaagaucauugucaauucuccagacccucaccaauaggauaccuuggacuacuaucacaaagaacaagagacauauacauaucaagaagaagacgaggaacauuuaccuggacacuaucagacucugaaggaaaagacacaccaggaggcuauugccuaacaagauggauguuaauagaagcagaacuaaaauguuucggaaauacagccguagcaaaauguaacgaaaaacaugacgaagaauuuugugauauguuacgacuauucgacuucaauaaacaagcaauacaaagacuaaaaacaccagcacaaaugucaauacaauuaauaaacaaagcaguuaacgcacuaauuaaugaucaacuaauaaugaaaaaccauuuaagagacauaauguguauaccuuauugcaauuacucaaaauacugguauuuaaaccacacaacaaccggcaaaacuucuuuaccaaaaugcuggcuaguaucuaacggaucauaucuuaacgaaacacacuucucagaugacauagaacaacaagcagacaacaugauuacagaaauguuacaaaaagaauauauggaaagacaaggaaaaacaccauugggcuuaguugauuuauuuguauucucaaccagcuucuacuuaauaucaauauuccuacaccuaguaaaaauaccuacacaccgacacauaguaggaaaaucaugccccaaaccacacagacuaaaucacaugggaauauguuccuguggacuauauaaacaaccaggaguaccaguaagguggaaaagauaaggacuaguuauaagacugacuagcccgaugggccucccaacgggcccuccuccccuccuugcaccgagauuaauaaaaaaaaaaaaaaaaaaaaaaaaaaaaaaaaaaaaaaaaaaaaaaaaaaaaaaaaaaaaaaaaugcaucccccccccccccccccccccccccccccccaaaggcucuuuucagagccaccagaauu

SEQ ID NO: 7508 - RNA, 1693 nt, Artificial Sequence
  mRNA product Design i-3 comprising derived and/or modified sequence from LASV(G502-SLE-2009;Clade IV)__AIT17126__GPCstabilized (opt6)
gggagaaagcuuaccaugggacaaauaguaaccuucuuccaagaaguaccacacguaaucgaagaagucaugaauauaguucuaauagcacucagcaucuuagcaguccuaaaaggacuauacaauuuugcaacaugcggucuaguaggacuacuuacauuccuucuauuauguggaagauccugcacaacaggacuauauaaaggaguauaugaauuacaaacacucgaauuaaacauggaaacacuaaacaugacaaugccacuaucaugcacuaaaaauaacucacaucauuauaucaugguuggaaaugaaacagguuuagaacuaacacuaacaaauacaagcauaaucaaucacaaauucugcaacuuaucugaugcucacaagaaaaacuuauaugaccacgcacuaaugagcaucauaucaacauuucacuuaucaaucccaaauuucaaccaauaugaagcaaugucaugcgauuucaacggaggaaaaauaucaguacaauacaaccucucacauucuuaugcuggagaugcagcagaucacugcggaacaguagcaaacggaguauuacaaacauucaugcgaauggcauggggaggaucauacauagcucucgacuccggaugcggaagaugggauugcauaaugacauccuaucaauaccuuauaauacaaaacacaacaugggaagaccacugccaauucucaagaccaaguccaauaggauaccuaggacuauuaucacaacgaacaagagacauuuacauaucucgacgcagaagaggaaccuucaccuggacauuauccgacucagaaggaaaagauacaccaggaggauacugcuuaacaagauggaugcuaauagaagccgaacucaaaugcuucggaaauacagcaguagccaaaugcaacgaaaaacacgaugaagaauuuugugacaugcuaagacuauucgacuucaacaaacaagcuauacaaagauuaaaagcacccgcccaaauguccauccaacuaauaaauaaagcuguaaacgcacuaaucaaugaccaacucguaaugaaaaaucaucuaagagacauaauguguauacccuacuguaacuacucacgauacugguaccuaaaccauacaacaacaggaagaacaucacuuccaaaaugcugguuagucucuaauggaucauaccuaaacgaaacacacuuuuccgacgauauagaacaacaagcagauaauaugauaacugaaauguuacaaaaagaauacauggaaagacaaggaaaaacuccccuaggucuaguagaccucuucguauuuucaacaucuuuuuaucuaaucucaauauucuuacaccuaguaaaaauaccaacacacaggcauauagucggaaaauccuguccaaaaccacacaggcuaaaccacaugggaauaugcucuuguggacuauacaaacaaccaggagucccaguaaaauggaaaagauaaggacuaguuauaagacugacuagcccgaugggccucccaacgggcccuccuccccuccuugcaccgagauuaauaaaaaaaaaaaaaaaaaaaaaaaaaaaaaaaaaaaaaaaaaaaaaaaaaaaaaaaaaaaaaaaaugcaucccccccccccccccccccccccccccccccaaaggcucuuuucagagccaccagaauu

SEQ ID NO: 7509 - RNA, 1693 nt, Artificial Sequence
  mRNA product Design i-3 comprising derived and/or modified sequence from LASV(G733-SLE-2010;Clade IV)__AIT17154__GPCstabilized (opt6)
gggagaaagcuuaccaugggacaaauaguaaccuucuuccaagaaguaccucacguaauagaagaaguaaugaauauaguauuaauagcauuauccauccucgcaguacuuaaagguuuauacaacuuugcaaccugcggcauagucggucuaguauccuuucucuuauuaugcggaagaucauguacaacauccuuauacaaaggaguauacgaacuacaaacauuagaauuaaacauggaaacucucaacaugacaaugccauuaucauguaccaaaaacaauagccaucauuauauaaugguaggaaacgaaacaggacucgaacuaacacuaacaaacacaucaauaauaaaccacaaauucugcaaccuuucagacgcacacaagaaaaaccuauacgaucacgcacuaaugucuauaauaucaacauuccaccuaagcauaccaaauuucaaucaauacgaagccauguccugugacuucaauggaggaaaaauaucaguacaauacaaccuaucacauuccuacgcaggagacgcagcaaaccauugcggaacaauagcaaacggaguucuacaaacauucaugagaauggcauggggaggaagcuacauagcacuagacucaggcugcgaccgaugggauugcauaaugacauccuaccaauaccuaauaauacaaaacacaacaugggaagaccauugccaauucucccgcccaucaccaauaggauacuuaggacuacuaucacaaagaacaagagacauuuauauaucuagacgaagaagaggaacauuuacauggacacuaucagauuccgaaggaaaagacacaccuggcggcuauugucuaaccagauggauguuaauagaagcagaacucaaaugcuuuggaaacacagcaguagccaaaugcaacgaaaaacacgacgaagaauuuugcgacauguuaagacucuucgauuuuaacaaacaagcaauacaaagauuaaaagcacccgcacaaaugucaauacaauuaauaaauaaagcuguaaacgcacuaauaaacgaccaauuaaucaugaaaaaccaucucagagauauaauguguauaccauacuguaauuauucuaaauacugguauuuaaaccacacaaccaccggaaaaacaucauuaccuaaaugcuggcuaguaagcaacgguucuuaucuaaacgaaacacacuuuucagacgacauagaacaacaggcagauaauaugauaaccgaaauguuacaaaaagaauacauggaaagacaaggaaaaacaccauuaggucuaguagaucuauucguauucucaacuagcuucuaccuuauaucaauuuuccuacauuuaguaaaaauacccacacauagacauguaguaggaaaaucauguccaaaaccacacagauuaaaccauaugggaaucuguucuugcggacuauacggacaaccagguguuccaguaaaauggaaaagauaaggacuaguuauaagacugacuagcccgaugggccucccaacgggcccuccuccccuccuugcaccgagauuaauaaaaaaaaaaaaaaaaaaaaaaaaaaaaaaaaaaaaaaaaaaaaaaaaaaaaaaaaaaaaaaaaugcaucccccccccccccccccccccccccccccccaaaggcucuuuucagagccaccagaauu

SEQ ID NO: 7510 - RNA, 1693 nt, Artificial Sequence
  mRNA product Design i-3 comprising derived and/or modified sequence from MOPV/LASV reassortant(IGS-1;Clade IV)__AFY05576__GPCstabilized (opt6)
gggagaaagcuuaccaugggccaaaucguaaccuucuuucaagaaguaccucauguaauugaagaaguaaugaauauaguucuuauagcacuaucaguauuagcaguucuaaaaggauuauauaacuucgccacauguggucuaguaggccuaguaaccuuuuuacuacuauguggaagaucaugcaccacaucauuauauaaaggaguauacgaacuucaaacccuagaacuaaauauggaaacacuaaacaugacaaugccauuaucaugcacgaaaaauaacucccaccacuacauuaugguaggaaacgaaacaggucuagaauuaacacucacaaauacaucaauuauaaaccacaaauuuugcaaucucuccgaugcgcacaagaaaaauuuauaugaccacgcacuaaugucaauaauaucaacauuucaccuaagcauaccaaacuucaaccaauaugaagccaugucaugcgauuucaacggaggaaaaaucucaguacaauacaaccuaucccauucauacgcaggagaugcagcaaaucacugcggcacaguagcaaacggcguacuacaaacauuuaugcgcauggccugggguggcucauacauagcucuagauucugguugugguaauugggauuguauaaugacaucuuaccaauaucuaauaauccaaaauacaacaugggaagaccacugccaauucucaagaccaucaccaauaggauauuuagguuuauuaucacaaagaacaagagacaucuauaucucacgaagaagacgaggaacauucacauggacacucucagacucugaaggugaagacacaccaggaggauacugccuaacacgauggauguuaauagaagcagaacuaaaaugcuucggaaauacagcaguugcaaaaugcaacgaaaaacacgaugaagaauuuugcgauauguuacgauuauuugacuuuaacaaacaagcaauacaacgacuaaaagcccccgcacaaaugucaauacaacuaauaaacaaagcaguaaaugcacugauaaaugaucaacuaauaaugaaaaaucacuuaagagacaucauguguaucccauauugcaacuacucaaaauauugguaucuaaaucacacuaccacaggaagaacaucccuaccaaaaugcuggcucguaucuaacggaaguuaccuaaacgaaacacacuuuucagaugauaucgaacaacaagcagacaacaugauaacagaaaugcuacaaaaagaauauauggaaagacaaggaaaaacaccacucggcuuagucgaccucuucgucuuuucaacaucauucuaccuaauaucaaucuuccuacaccucguaaaaauaccaacacacagacauauaguaggaaaaucgugcccaaaaccacauagacuuaaccauaugggaauauguucauguggucuuuacaaacaaccaggcgugccaguaaaauggaaacguuaaggacuaguuauaagacugacuagcccgaugggccucccaacgggcccuccuccccuccuugcaccgagauuaauaaaaaaaaaaaaaaaaaaaaaaaaaaaaaaaaaaaaaaaaaaaaaaaaaaaaaaaaaaaaaaaaugcaucccccccccccccccccccccccccccccccaaaggcucuuuucagagccaccagaauu

SEQ ID NO: 7511 - RNA, 1693 nt, Artificial Sequence
  mRNA product Design i-3 comprising derived and/or modified sequence from LASV(LM765-SLE-2012;Clade IV)__AIT17814__GPCstabilized (opt6)
gggagaaagcuuaccaugggacaaauaguaacauucuuucaagaaguaccacauguaauagaagaaguaaugaacaucguauuaauagcauuaaguauacuagccguacuaaaaggacuauauaauuucgccacaugcggacucguaggccuagucaccuuccuacuucuaugcggaagaucuuguacaacaucauuauacaaaggagucuacgaacugcaaacauuagaauuaaacauggaaacacuaaacaugacaaugccacuaucaugcaccaaaaacaauucacaucacuacaucauggugggaaacgaaacaggauuagaacuaacacuuacaaauacaagcauaauagaccacaaauucugcaaccuaucagaugcacacagaaagaacuuauaugaucacgcacuaauguccauaauaucaacauuucaccuauccauaccaaacuucaaccaauaugaagcaaugucaugcgacuucaacggaggaaaaauaucaguacaauacaacuuaucacacaguuacgcaaaagacgcagcagaucauuguggaacaguagcaaacggaguacuacaaacauucaugcgaauggccuggggaggaagcuacauagcgcuagacucaggauguggacgaugggauugcauaaugacuucauaucaauacuuaaucauccaaaacacuacaugggaagaucacugucaauucuccagacccucccccauaggauaccuaggacuauuaucacagagaaccagagauauauauauaucaagaagaagaagaggaacauucacauggacccuaucagacucagaaggaaaagacaccccaggaggauacugcuuaacacgauggaugcucaucgaagcugaauuaaaaugcuucggaaauacagcagucgcaaaaugcaaugaaaaacacgacgaagaauuuugugacaugcuaagauuauucgacuucaacaaacaagccauacaacgacuaaaagcaccagcccaaaugucaauacaauuaauaaacaaagcaguaaacgcauuaauaaaugaccaacuaauaaugaaaaaucaccuuagagauauaauguguauuccauacugcaacuauagcaaauacugguacuuaaaucacaccacaacaggaaaaacaagccucccuaaauguuggcuaguauccaauggaucauaucuuaaugaaacacauuucucagaugauauagaacaacaagcagacaacaugauaaccgaaauguuacaaaaagaauauauggaaagacaaggaaaaacaccauuaggucuaguagauuuauucguauuuucaacaucauucuaucuaauaucaauuuuccuacaucuaguaaaaauacccacccacagacauauaguaggaaaaccaugcccaaaaccacacagacuaaaccacaugggaaucugcucauguggacucuauaaacaaccaggaguaccaguuaaauggaaaagauaaggacuaguuauaagacugacuagcccgaugggccucccaacgggcccuccuccccuccuugcaccgagauuaauaaaaaaaaaaaaaaaaaaaaaaaaaaaaaaaaaaaaaaaaaaaaaaaaaaaaaaaaaaaaaaaaugcaucccccccccccccccccccccccccccccccaaaggcucuuuucagagccaccagaauu

SEQ ID NO: 7512 - RNA, 1693 nt, Artificial Sequence
  mRNA product Design i-3 comprising derived and/or modified sequence from LASV(LM776-SLE-2012;Clade IV)__AIT17824__GPCstabilized (opt6)
gggagaaagcuuaccaugggacaaauaguaacauucuuccaagaaguaccucacgucauagaagaagucaugaacauaguccuaauagcccuaucaauacucgcaguacuaaaaggauuauacaauuuugcuacuuguggauuaguaggauuaguaacauucuuacuacucugcggccgaucaugcacuacaucaguauacaaaggaguauacgaacuacaaaccuuagaauuaaauauggaaacauuaaacaugacaaugccacuaucaugcaccaaaaacaacucacaucauuacauaaugguuggaaaugaaacaggccuagaauuaacacuaacaaacacaucaaucauaaaccacaaauucugcaaucugucagacgcacacaagaaaaaccuauaugaccacgcauuaaugucuauaaucucuacauuccauuuaagcauaccaaacuuuaaccaauacgaagcaaugucaugcgacuucaacggaggaaaaauaucaguccaguacaaucuaucacacucauacgcaggagaugcagcaaaccauuguggaacugucgccaacggcguauuacaaacauucaugcgaauggcauggggcggaucauacauagcacuagacucuggaugcggaaaaugggacugcauaaugacaucauaccaauaccuaauaauucaaaacacaacaugggaagaucacugucaauuuucacgaccaucuccaaucggauaucuaggacuacuuucacaaagaaccagagacauauauauaucucgucgccgcagaggaacauuuaccuggacauuaagugacuccgaaggaaaagauaccccaggaggcuauugucuaaccagauggaugcuaauagaagcagaacuaaaaugcuucggaaauacagcuguagcaaaauguaacgaaaaacaugacgaagaauuuugcgauauguuaagacuauucgacuucaauaaacaagcaauacaacgauuaaaagcaccagcacaaaugucaauacaauuaauaaauaaagccgucaaugcucuaauaaacgaccaacuaauaaugaaaaaccauuuacgcgacauaaugugcauacccuacugcaauuacucaaaauauugguaccuaaaucacacaacaaccggaaaaacaucauuaccuaaauguuggcucguaucaaacggauccuaucuaaaugaaacacacuuuucagacgauauagaacaacaagcagauaacaugauuacagaaaugcuucaaaaagaauauauggaaagacaaggcaaaacaccacuaggucuaguagaccucuucguauuuucaaccucauucuacuuaauaucaauauuccuacaucuaguuaaaauaccaacacaccgucacauagucggaaaaucuugcccaaaaccacacagacuaaaccauaugggaauaugcucaugcgguuuauacaaacaaccaggaguaccaguaagauggaaacgauaaggacuaguuauaagacugacuagcccgaugggccucccaacgggcccuccuccccuccuugcaccgagauuaauaaaaaaaaaaaaaaaaaaaaaaaaaaaaaaaaaaaaaaaaaaaaaaaaaaaaaaaaaaaaaaaaugcaucccccccccccccccccccccccccccccccaaaggcucuuuucagagccaccagaauu

SEQ ID NO: 7513 - RNA, 1693 nt, Artificial Sequence
  mRNA product Design i-3 comprising derived and/or modified sequence from LASV(Mad39;Clade IV)__ANH09722__GPCstabilized (opt6)
gggagaaagcuuaccaugggacaaauaguaaccuuuuuccaagaaguuccacauguaauagaagaaguaaugaacauaguccuaauagcacuauccauauuagccguacuaaaagguuuauacaauguagccacaugcggacucauaggccuuguaacauuucuacuccuaugcggacgcucaugcacaacaacacuauacaaaggaguauaugaacuacaagcacuagaacucaacauggaaacacuaaacaugacaaugccauuauccugcacaaaaaauaacucucaccacuauaucagaguuggaaacgaaacaggacuagaacuuacauuaacuaacacaucacuaauaaaccacaaauucugcaaucuaucugaugcacacaaaaaaaaccuuuacgaccacgcacuaaugucaauuauaucaacauuccaccuaucaauaccaaacuucaaucaauacgaagcaaugucuugcgacuucaacgauggaaaaauaucaguucaauacaaucuaucacacacauacgccggagacacagccaaccacuguggaacagucgcaaauggcguuuuacaaacauuuaugcgaauggcauggggaggaucuuacauagcacuagacucagguuguggaggaugggauugcauaaugacaucauaucaauaccuaauaauucaaaacacaacaugggaagaucacugccaauuuucaagaccauccccaauaggauaucuaggacuuuuaucacaaagaacgagagacauauacauaucacgaagaagaagaggaacuuucacauggacgcucuccgacuccgaagguaaagacacaccaggaggauacugcuuaacuagauggauguuaauagaagcagaauuaaaaugcuuuggaaauacagcaguagcaaaaugcaacgaaaaacaugaugaagaauucugugacaugcuucgacuauuugacuucaauaaacaagcaauacaaagacuaaaagcaccagcacaaaugucaauccaauuaauaaacaaagcaguaaaugcauugauaaaugaccaauuaauaaugaaaaaucaucuaagagacauaaugugcauaccauauugcaauuacucuaaauauugguaccuaaaccacacugucacuggaaaaaccucacuaccaaaauguugguuaguauccaacggcucauaccuaaacgaaacccauuucuccgaugacauagaacaacaagccgacaacaugauaacagaaaugcuccaaaaagaguacauggaaagacaagguaaaaccccuuuaggauuagucgaccuauucguauucucaacauccuucuaccuaauaucaaucuucuuacaucuuguaaaaauaccaacucaucgccacgucguuggaaaaccaugccccaaaccacaucgacucaaccauauggguauauguuccuguggcuucuacaaacaaccaggagucccaguacgauggaaaagauaaggacuaguuauaagacugacuagcccgaugggccucccaacgggcccuccuccccuccuugcaccgagauuaauaaaaaaaaaaaaaaaaaaaaaaaaaaaaaaaaaaaaaaaaaaaaaaaaaaaaaaaaaaaaaaaaugcaucccccccccccccccccccccccccccccccaaaggcucuuuucagagccaccagaauu

SEQ ID NO: 7514 - RNA, 1693 nt, Artificial Sequence
  mRNA product Design i-3 comprising derived and/or modified sequence from LASV(Z0947-SLE-2011;Clade IV)__AIT17840__GPCstabilized (opt6)
gggagaaagcuuaccaugggacaaauaguaacauucuuccaagaaguaccacacguaauagaagaaguaaugaauaucguucucauagcucuuuccauccuagcuguacuaaaaggauuauauaauuucgccacaugcggccuaguaggcuuaguaacauucuuauuacucugcgguagauccugcacaauaucacuauacaaaggaguauacgaauuacaaacccuagaacuuaacauggaaacacuaaacaugacaaugccauuauccuguacaaaaaacaauucucaccacuacauaaugguaggaaacgaaacaggucucgaacuaacucucacaaauaccuccauaauaaaccacaaauucugcaaccucucugaugcucacaaaaaaaaccuauacgaccaugcucuaauguccauaauaucaacuuuucauuuaucaaucccaaacuucaaccaauacgaagcaauguccugugacuuuaacggaggcaaaauuucagugcaauacaacuuaucacacucauacgccggagacgcugcuaaucacugcgguacaguagcaaacggaguauuacaaacauuuaugcgaauggcauggggaggaagcuacaucgcacucgacuccggaugugacagaugggacuguauaaugacaucauaccaauaccuaauaauacaaaacacuacaugggaagaccacugccaauuuucacgcccaucaccaaucggauacuuaggacuacuaucacaaagaaccagagacauauacauuuccagaagaagaagaggaacauucaccuggacccuaucagauucagaaggcaaagauacucccgguggauacugccuaacaagauggaugcuaauagaagcugaauuaaaaugcuucggaaacacagcaguagcaaaaugcaaugaaaaacacgaugaagaauucugcgauaugcuccgccuuuuugacuucaauaaacaggcaauacaacgauuaaaagcacccgcacaaaugaguauacaacuaauaaacaaagcaguaaacgcacuaauaaacgaucaauuaauaaugaaaaaucaucucagagacaucaugugcauaccauauugcaacuauagcaaauacugguacuuaaaccacacaaccacaggcaaaacaucacuaccaaaaugcuggcuaguaucuaacggaucauacuuaaaugaaacacauuucagcgaugauauagaacaacaagcagacaacaugauaacagaaaugcuacaaaaagaauacauggaacgacaaggaaaaaccccauuaggacuaguagacuuauucguauucaguacaucauuuuaccucauaaguaucuuccuacaccuugucaaaauaccaacacaucgacacauaguaggaaaaccaugccccaaaccacauagacuaaaccacaugggaauuugcuccuguggacuauauaaacaacccggcguaccaguaaaauggaaacgauaaggacuaguuauaagacugacuagcccgaugggccucccaacgggcccuccuccccuccuugcaccgagauuaauaaaaaaaaaaaaaaaaaaaaaaaaaaaaaaaaaaaaaaaaaaaaaaaaaaaaaaaaaaaaaaaaugcaucccccccccccccccccccccccccccccccaaaggcucuuuucagagccaccagaauu

SEQ ID NO: 7515 - RNA, 1693 nt, Artificial Sequence
  mRNA product Design i-3 comprising derived and/or modified sequence from LASV(Josiah;Clade IV)__NP_694870__GPCstabilized (opt11)
gggagaaagcuuaccaugggccaaaucguaaccuucuuccaagaagucccccacgucaucgaggaagucaugaacauaguccucauagcgcucucaguacucgccguccuaaaaggccucuacaacuucgcaaccugcggacucguaggacugguaacauuccuucuacuaugcggaagaucaugcacuaccucacuauacaaaggagucuacgaacuacaaacccuagaacugaacauggaaacccucaacaugaccaugccccuauccugcaccaaaaacaacagccaucacuacauaaugguaggcaacgaaaccggccuugaacuaacccuaacaaacacauccaucauaaaccacaaauucugcaaccucuccgacgcccacaagaaaaaccucuacgaccacgcucucaugaguaucauauccaccuuucaccuguccaucccaaauuuuaaccaguaugaagccauguccugcgacuucaacggcggaaaaaucuccguacaauacaaccucucccacuccuacgccggcgacgcagccaaccacugcggcaccgucgccaacggcguccuccagaccuucaugcgaauggccuggggaggcuccuacaucgcacucgacuccggaugcggcaauugggacugcaucaugaccuccuaccaauaccucaucauccaaaauaccaccugggaagaccacugccaauucucccgcccaucccccaucggauaccucggacuacuaucccaacggacccgcgacaucuacaucagccgacguaggcgcggaacauucaccuggacgcuaagcgacuccgaaggcaaagacacccccggaggcuacugccugacccgcuggaugcuaaucgaagcagaacuaaaaugcuucggcaacaccgccgucgccaaaugcaacgaaaaacacgacgaggaguucugugacaugcuacgccucuucgacuucaacaaacaagccauacagcgacucaaagcaccggcccaaaugagcauccagcuaaucaacaaagccgucaacgcacucauaaacgaccagcucauaaugaaaaaccaccuacgcgacaucaugugcauccccuacugcaacuacucaaaauacugguaccugaaccacacaacuaccggccgcacaucccucccaaaaugcugguuagucuccaacggcucauaccucaaugaaacccacuucagcgacgacaucgaacaacaagccgacaacaugaucacagaaaugcuccaaaaagaauacauggaacgacaaggaaaaacaccccucggccucgucgaccuauuugucuucuccacaucguucuaccuaauauccaucuuccuccaccucguaaaaauccccacccaucgccacaucgucggcaaauccugccccaaaccacaccgccucaaccauaugggcaucugcuccugcggucucuacaaacaacccggcguucccgucaaauggaaacgcuaaggacuaguuauaagacugacuagcccgaugggccucccaacgggcccuccuccccuccuugcaccgagauuaauaaaaaaaaaaaaaaaaaaaaaaaaaaaaaaaaaaaaaaaaaaaaaaaaaaaaaaaaaaaaaaaaugcaucccccccccccccccccccccccccccccccaaaggcucuuuucagagccaccagaauu

SEQ ID NO: 7516 - RNA, 1690 nt, Artificial Sequence
  mRNA product Design i-3 comprising derived and/or modified sequence from LASV(LP;Clade I)__AAF86701__GPCstabilized (opt11)
gggagaaagcuuaccaugggccaaauaauaacauucuuccaagaagucccccacgucaucgaagaagucaugaauaucguacucaucgcccucucgcuccucgcuauccugaaaggccucuacaacaucgccacaugcggcaucauaggccucgucgccuuccuauuucucugcggcaaaucuugcucccucacccuaaaaggaggcuacgaacuccaaacacuagaacucaacauggaaacccucaauaugaccaugccccuuuccugcaccaaaaacuccucccaccacuacauccgcguaggcaacgaaaccggccucgaacucacacucaccaacacaagcaucaucaaccacaaauucugcaaccugucugacgcucacaagaaaaaucuuuacgaucacgcacucaugucgaucauaucaacauuccaccucucgauccccaacuucaaccaauacgaagccauguccugcgacuucaacggcggcaaaaucagcguccaauacaaccucucccacuccuacgccggcgacgcagcagaacacugcggcaccguggcgaacggaguacuccaaaccuucaugcgcauggccuggggcggacgcuacauagcccucgacuccggcuguggcaacugggacugcaucaugaccuccuaccaauaccucaucauccagaauaccaccugggaagaccacugccaauucucccgccccucaccaauaggcuaccucggccuccuaucccaacgaacacgcgacaucuacaucucaagacgcagacgcggcaccuucaccuggacccucucagacucugaaggcaacgaaacccccggaggcuacugccucacacgauggaugcucaucgaagccgaacucaaaugcuucggaaacaccgccguggccaaaugcaacgaaaaacacgacgaggaguucugcgacaugcuccgacucuucgacuucaacaaacaagccauacgccgacuaaaagcccccgcgcaaaugagcauccaacucaucaacaaagccgucaacgcccucaucaaugaucaacucaucaugaaaaaccaccuccgcgacauaaugugcaucccauacugcaacuacucaaaauacugguaccuaaaccacacuuccucaggacgcaccucacuccccaaaugcuggcucaucuccaacggcuccuaccuuaacgaaacacaguucucggacgacaucgaacaacaagcagacaacaugaucaccgaaaugcuacaaaaagaauacaucgaacgccaaggcaaaacaccccuaggccuagucgacauuuucauauucuccaccuccuucuaccucaucucaauuuuccuccaccuaaucaaaauccccacacaucgccacaucguaggaaaaccuugccccaaaccacacagacuaaaccacaugggcgucugcuccugcggccucuacaagcacccaggcguucccacaaaauggaagcgcuaaggacuaguuauaagacugacuagcccgaugggccucccaacgggcccuccuccccuccuugcaccgagauuaauaaaaaaaaaaaaaaaaaaaaaaaaaaaaaaaaaaaaaaaaaaaaaaaaaaaaaaaaaaaaaaaaugcaucccccccccccccccccccccccccccccccaaaggcucuuuucagagccaccagaauu

SEQ ID NO: 7517 - RNA, 1690 nt, Artificial Sequence
  mRNA product Design i-3 comprising derived and/or modified sequence from LASV(803213;Clade II)__AAF86703__GPCstabilized (opt11)
gggagaaagcuuaccaugggccaaaucaucaccuucuuccaggaggucccacacgucaucgaggaagucaugaacaucguccucaucgcccucucccuccuagccauccucaaaggcaucuacaacgucgcaaccugcggacucuucggacuaauauccuuccuccuccuuugcggccgcuccuguucgguaaccuacaaaggcguauacgaacugcaaacacuagaacucaacauggccaaccucaacaugaccaugccccuuuccugcaccaagaauaacucccaccacuacaucauggucggcaacgaaaccggucuagaacucacccuaaccaacacuagcauaaucaaccacaaauucugcaaccuaagcgaugcccacaagaaaaaccucuacgaccacgcccuaaugucgaucaucuccacauuucaccuauccauccccaacuucaaccaauacgaagccauguccugcgacuucaacgguggcaaaaucuccguccaauacaaccucucccacagcuucgccgucgacgcagcgaaccauugcggcaccaucgccaacggcguacuacaaacuuucaugcgcauggccuggggcgggagcuacaucgcccucgacuccggcugcggaaacugggacugcauaaugaccucauaccaauaccucauaauccaaaacacaaccugggaagaccacugccaguucucucgaccaucaccaauaggcuaccuaggccuccuaucucaacgcacccgcgacaucuacaucucccgccgccgccgcggcacauucacauggacccucuccgacagcgaaggcaacgaagccccuggcggauacugccucacccguuggaugcucauagaagcagaacucaaaugcuucggcaacacggccgucgcuaaaugcaacgaaaaacacgacgaagaguucugcgacaugcuccgacucuucgacuucaacaaacaagccaucaaacgucucaaaacgcccgcccaaauguccauccagcucaucaacaaagcagucaacgcccucaucaaugaccaacucaucaugaaaaaccaccuacgcgacaucauguguauccccuacugcaacuacagccguuacugguaccuaaaccacacaguaaccggcaaaacaucacucccacgcugcuggcuagucuccaacggcuccuaccucaacgaaacccacuucuccgacgacaucgaacaacaggccgacaacaugaucaccgagaugcuccaaaaggaguacauggaccgccaaggcaaaacaccccucggccucguagaccuauuuguauucuccaccuccuucuaccuaaucuccauauuccuccaucucguaaaaauucccacccaccgacacaucgucggaaagccaugccccaaaccacaccgacucaaccacaugggcaucugcucgugcggccuauacaagcacccaggcguaccuguaaaauggaaacgcuaaggacuaguuauaagacugacuagcccgaugggccucccaacgggcccuccuccccuccuugcaccgagauuaauaaaaaaaaaaaaaaaaaaaaaaaaaaaaaaaaaaaaaaaaaaaaaaaaaaaaaaaaaaaaaaaaugcaucccccccccccccccccccccccccccccccaaaggcucuuuucagagccaccagaauu

SEQ ID NO: 7518 - RNA, 1690 nt, Artificial Sequence
  mRNA product Design i-3 comprising derived and/or modified sequence from LASV(GA391;Clade III)__CAA36645__GPCstabilized (opt11)
gggagaaagcuuaccaugggccaaaucguuaccuucuuccaagaaguaccacacguaaucgaagaagucaugaacaucguauuaaucgcccucucaauccucgcuauccucaaaggccuuuacaacguagcuaccugcggccucaucggccuaguaaccuuccuccuccucuccggccgcuccugcucccuuaucuacaaaggcacauacgaacuucaaacccucgaacuaaauauggaaacccuaaacaugacuaugccccuauccugcaccaaaaacaacucgcaccacuacauccgagucggcaaugaaacaggccucgaacucacccuuaccaacacaucgauccuaaaccacaaguuuuguaaccucuccgacgcgcacaaacgcaaccucuacgaccacucccucaugucaaucaucuccaccuuccaccuaucuauacccaacuucaaccaauacgaagcaaugucuugcgacuucaacggcggaaaaaucaccguccaguacaaucuaucacacucauucgcagucgacgccgccggucacugcggaacccucgccaacggaguacuucaaacauucaugcgcauggcauggggcggcuccuacaucgcccuagacucaggcugcggcaacugggacugcauaaugaccuccuaccaauaccucauuauccaaaacaccaccugggacgaccacugccaauucucccgaccuucacccaucggcuaccucgggcuacuaucccaacgaacccgagacaucuacaucucccgcaggcgccgcggcacauucaccuggacccuauccgacagcgaaggcaacgaaacccccgguggcuacugccucacccgcuggaugcucauagaagccgaguuaaaaugcuucgguaacacagccgucgcaaaaugcaacgaaaaacacgacgaagaguucugcgacaugcuccgacuuuucgacuucaauaaacaagccauccgccgccuuaagaccccagcccaaaugucaauccaacucaucaacaaagccguaaacgcccucaucaacgaucaacucaucaugaaaaaccaccuccgugacaucaugugcauacccuacugcaacuacucccgcuauugguaccucaaccacaccuccacaggcaagaccucacucccccgcugcuggcucauauccaauggcucuuaucuaaacgaaaccaaauucucagacgacaucgaacaacaagcugacaacaugaucaccgaaaugcuccaaaaagaauacauagaccgccaaggaaaaacaccccucggccucguagaccucuucgucuucuccaccuccuucuaucucaucucgaucuuccuccaccucgucaaaauacccacccaccgacacauagucggaaaacccugccccaaaccacaccgccucaaccacaugggcaucugcuccugcggccuauacaaacaacccggcguccccgugcgcuggaaacgauaaggacuaguuauaagacugacuagcccgaugggccucccaacgggcccuccuccccuccuugcaccgagauuaauaaaaaaaaaaaaaaaaaaaaaaaaaaaaaaaaaaaaaaaaaaaaaaaaaaaaaaaaaaaaaaaaugcaucccccccccccccccccccccccccccccccaaaggcucuuuucagagccaccagaauu

SEQ ID NO: 7519 - RNA, 1693 nt, Artificial Sequence
  mRNA product Design i-3 comprising derived and/or modified sequence from LASV(AV;Clade V)__CCA30314__GPCstabilized (opt11)
gggagaaagcuuaccaugggccaaauaguaaccuucuuccaagaaguuccccacgucaucgaagaagucaugaacaucguccuaauagcccucucaauccuagccguacuaaagggccucuacaacaucgcaaccugcggccucaucggccuaaucaccuuccuacuccugugcggacgcucaugcagcuccaaccuauacaaaggcgucuacgaacuccaaucccuugaccucaacauggaaacucucaacaugaccaugcccuuguccugcaccaaaaacaacucacaccacuacauacgcguaggcaacgacaccggucucgaacuaacccuaaccaacaccucuauccucaaccacaaauucugcaaccuaucagacgcacacaagaaagaccucuacgaccacgcacucaugucgaucauauccaccuuccaccucucaauacccaacuucaaccaauacgaagccaugucaugcgacuuuaacggaggcaaaaucuccguacaauauaaccucucacacuccuacgccaucgacgccgcaaaccacugcggaaccgucgccaacggcauccuccaaacuuucaugcgcauggccuggggaggaucuuacaucgcccuugacagcggaugcgguaacugggauugcaucaugaccuccuaccaauaccucauuauccaaaauacuaccugggaaaaccacugccaguucucccgccccagccccaucggauaccuaggucuacucucccaacgaacccgcgauaucuacaucucccgaagacgccgcggcaccuuuaccuggacacuauccgacucagaagguaacgccaccccagggggauacugccucacgagauggaugcucaucgaagcagaacuuaaaugcuucggcaacaccgccguagcaaaaugcaacgaaaaacacgacgaagaguucugcgacaugcuccgacucuucgacuucaacaaacaagccauaucacgucucaaauccccagcccaaauguccauacaacucauaaacaaagccguuaacgcacucaucaacgaccaacucaucaugaaaaaccaccuccgcgacauaaugugcauacccuacugcaacuacuccaaauacugguaccugaaccacaccauaaccggcaaaacuucacucccuaaaugcuggcucgucucgaacggaucauaccucaacgaaacucacuucuccgacgacaucgaacaacaagccgacaacaugaucaccgaaaugcuccaaaaagaauacauggaacgccaaggcaaaaccccacugggccucgucgaccucuucguauuuuccaccucauucuaccucaucuccaucuuccuccgccucguaaaaauccccacccaccggcacaucgucggaaaacccugccccaaaccccaucgacucaaccacaugggaauuugcucuugugggcuuuacaaacaaccaggcguacccguccgauggaaacgcuaaggacuaguuauaagacugacuagcccgaugggccucccaacgggcccuccuccccuccuugcaccgagauuaauaaaaaaaaaaaaaaaaaaaaaaaaaaaaaaaaaaaaaaaaaaaaaaaaaaaaaaaaaaaaaaaaugcaucccccccccccccccccccccccccccccccaaaggcucuuuucagagccaccagaauu

SEQ ID NO: 7520 - RNA, 1690 nt, Artificial Sequence
  mRNA product Design i-3 comprising derived and/or modified sequence from LASV(Togo/2016/7082;Clade VI)__AMR44577__GPCstabilized (opt11)
gggagaaagcuuaccaugggacaaaucaucaccuucuuccaagaagucccccacguaaucgaagaagucaugaacaucguacucauagcccucucccuacuagccauccucaaaggcgucuacaacgucgccacaugcggcaucauaggccucgucaccuuccuauuccucugcggccgcuccuguucccucaucuacaaaggcucguaugaauuacagacccucgaacucaacauggaaacccucaacaugaccaugccccucucaugcaccaaaaacagcucacaccacuacauccguguuggcaacgaaaccggacucgaauuaacccuuaccaacacauccaucaucaaccacaaguucugcaaccucucagacgcucacaaacgcaaccucuacgaccacgcccucauguccauccucuccaccuuccaccuuuccauccccaacuuuaaccaauacgaagccauguccugcgacuucaacggcggcaaaaucuccguccaauacaaccugucccacgccuacgccgucgacgccgccgaacacugcggcacagucgcaaacgguguccuacaaaccuucaugcguauggccuggggcggcuccuacauagcccuagacucuggauguggaaacugggacugcauaaugaccuccuaucaauaccuaaucauccaaaacacuacaugggaagaccacugccaauuuucccgacccucacccauaggcuaccucggccuccucucccaacgcacccgcgacauauacaucucucgucgccgccgcggcacauucaccuggaccuuaagugacucagaaggaaacgaaacccccggaggauacugccucacacgauggaugcucaucgaagcugaacuuaagugcuucggcaacacugccgucgccaaaugcaacgaaaaacacgacgaagaguucugcgacaugcuccgauuauucgacuucaacaagcaagccauccagcgacucaaaucccccgcccaaaugucgauccagcucauaaacaaagccgucaacgcccuuaucaacgaccaacucauaaugaaaaaccaccucagagacaugaugugcauaccguacugcaacuacuccaaguacugguaucucaaccacacauccuccggaagaaccucacuccccaaaugcuggcucguaucgaacggcucuuaccuaaacgaaacacacuuuagugacgacauugaacaacaagccgacaacaugaucaccgaaaugcuccaaaaagaauacaucgacagacaaggcaaaacaccccucggacucgucgaccuauucguauucucaaccucauucuaccucauauccaucuuucuccaccuaauaaaaauacccacccaccgacacaucgucggcaaacccugccccaaaccucaccgccuaaaccacaugggcaucugcuccugcggccucuacaagcaacccggaguccccacccgcuggaaacgauagggacuaguuauaagacugacuagcccgaugggccucccaacgggcccuccuccccuccuugcaccgagauuaauaaaaaaaaaaaaaaaaaaaaaaaaaaaaaaaaaaaaaaaaaaaaaaaaaaaaaaaaaaaaaaaaugcaucccccccccccccccccccccccccccccccaaaggcucuuuucagagccaccagaauu

SEQ ID NO: 7521 - RNA, 1690 nt, Artificial Sequence
  mRNA product Design i-3 comprising derived and/or modified sequence from LASV(KAK-428;Clade n.d. (VII))__ANH09740__GPCstabilized (opt11)
gggagaaagcuuaccaugggccaaaucguaaccuucuuccaggaaguaccccacgucaucgaagaaguuaugaacaucguacucaucgcccucucccuccuagcgauccuuaaaggacucuacaacuucgcaaccugcggcgucaucggacucauaacguuccuacuacucugcggacgcuccuguuccgccacguacaaaggccaauacgaacuccagacacuagaacucaacauggaaagccuaaacaugacgaugccccuauccugcaccaaaaacaacucacaccacuacauccgcgccgggaauaacaccggccuagaacuaacacucacaaacaccucgaucaucucccacaaauucugcaaccuaucagacgcccacaagaaaaaccucuacgaccacacgcucaugucaauuauuaccaccuuccaccucucgauaccaaacuucaaucaauacgaagccaugucaugcgacuucaacgguggcaaaaucucuauccaguacaacuugucccacuccuacgccggcgacgcggcccagcacugcggcaccguugcaaacggcguacugcagaccuucaugcgaauggccuggggaggcuccuaccucgcccuagacuccggcugccgcggaugggacugcaucaucuccaguuaccaauaccucaucauccaaaacaccacaugggacgaccacugccaauucucacgccccuccccgaucggcuaccucgguuucgucucccagaaaacgcgcgacauauacaucagccgccgacgucgcggcaccuucacauggacccucagcgacagcgaaggccacgacaugcccggcggcuacugccuaacccgauggaugcuaaucgaagccgaucucaagugcuucggcaacaccgccgucgcaaaaugcaacgaaaaacacgacgaagaguucugcgauauguggcgacucuucgacuucaacaaacaggccauccaaaggcuaaaggccccagcccaaaugaacauucaacuuauaaacaaagcagucaacgcccuuaucaacgaccaacucaugaugaagaaccaccuacgcgacaucaugugcauccccuacuguaacuacuccaaauucugguaccucaacaacaccaccaccggccgcaccucucucccacgcugcuggcucaucagcaacggcuccuaccuaaacgaaacccacuucuccgacgacaucgaacaacaagccgacaacaugauaacugaaaugcugcaaaaagaauacauggaccgucaaggcaaaacaccccucggccucgucgaccucuucguuuucuccaccagcuucuaccucaucaccaucuuccuacaccuugucaagauacccacccaccgccacaucgucggcaaacccugucccaaaccccaccgacucaaccacaugggaaucugcuccugcggccuauacaaacaaccaggcguccccguacgcuggaaacgcuaaggacuaguuauaagacugacuagcccgaugggccucccaacgggcccuccuccccuccuugcaccgagauuaauaaaaaaaaaaaaaaaaaaaaaaaaaaaaaaaaaaaaaaaaaaaaaaaaaaaaaaaaaaaaaaaaugcaucccccccccccccccccccccccccccccccaaaggcucuuuucagagccaccagaauu

SEQ ID NO: 7522 - RNA, 1690 nt, Artificial Sequence
  mRNA product Design i-3 comprising derived and/or modified sequence from LASV(Pinneo-NIG-1969;Clade I)__AIT17836__GPCstabilized (opt11)
gggagaaagcuuaccaugggacaaauaaucaccuucuuccaagaagugccccacgucauagaagaagucaugaauaucguccucaucgcacucucccuacucgccauacucaaagggcuguacaacauagcaaccugcggcaucauagggcucguugccuuccucuuccuuugcggcaaaucgugcucccucacccucaaaggcggcuacgaacuacaaacccucgaacucaauauggaaacccuaaacaugaccaugccacuauccuguacaaagaacucaucccaucacuacauccgcguaggcaaugaaacaggccucgaacucacacuaacuaacacguccauaauaaaccacaaauucugcaaccucucagacgcccacaagaaaaaccucuacgaccacgcccucauguccaucaucuccaccuuucaccuauccauucccaacuucaaccaauacgaagccauguccugcgacuucaacggcgguaaaaucucaguacaauacaaccucucacacuccuacgccggcgacgcagccgaacacugcggcaccguagccaacggcguacuacaaacauucaugcgcauggccuggggcggccgcuacauagcacuggacuccggcugcggaaacugggacugcaucaugacauccuaccaauaccucauaauccaaaacaccacaugggaagaccacugccaauucucccgcccaucacccaucggcuaccugggacuccuaucacaacgcacccgagacaucuacaucucccgacgccggcgcggcaccuucacauggacauuaucagacucugaaggcaaugagaccccaggaggcuacugccucacccgcuggaugcucaucgaagccgaacuaaaaugcuucggcaauaccgccguagccaaaugcaacgaaaaacacgaugaagaguucugcgacaugcuccgccuauucgacuucaacaaacaagcaaucagacgccucaaagccccagcccaaauguccauacagcuaauaaacaaagcagucaacgcucucaucaacgaccaacucaucaugaaaaaccaucuccgcgacaucauguguauccccuacugcaacuacagcaaauacugguaucuuaaucacaccuccuccggccgaaccucucuccccaaaugcuggcucauauccaacggauccuaccucaacgaaacccaguucagcgacgacaucgaacaacaagcggacaauaugaucaccgaaaugcuacagaaagaauacaucgaacgccaaggcaaaacaccacucggccuagucgacaucuucaucuucuccaccuccuucuaccucauuagcaucuuccuacaccucauaaaaauccccacacaccgccacaucgucggaaaaccgugccccaaaccucaccgucuuaaccacaugggcgucugcuccugcggccucuacaaacaccccggcguccccaccaaauggaaacgcuaaggacuaguuauaagacugacuagcccgaugggccucccaacgggcccuccuccccuccuugcaccgagauuaauaaaaaaaaaaaaaaaaaaaaaaaaaaaaaaaaaaaaaaaaaaaaaaaaaaaaaaaaaaaaaaaaugcaucccccccccccccccccccccccccccccccaaaggcucuuuucagagccaccagaauu

SEQ ID NO: 7523 - RNA, 1690 nt, Artificial Sequence
  mRNA product Design i-3 comprising derived and/or modified sequence from LASV(ISTH0009-NIG-2011;Clade II)__AIT17404__GPCstabilized (opt11)
gggagaaagcuuaccaugggucagaucauuaccuucuuccaggaagucccacacgucaucgaagaagucaugaacaucguacucaucgcccucagucuacucgcgauccuaaaaggcaucuacaacgucgcaaccugcggacucuuuggccuagucucuuuccuccuucucugcggacggucaugcuccaccaccuacaaaggcgucuacgaacuccaaacccucgaacuugacauggcaucccuaaauaugaccaugccgcucuccugcaccaaaaauaacucucaccacuacaucauggucggaaacgaaaccggccucgaacucacccuaacaaacacauccauuaucaaccacaaauuuugcaaccucuccgacgcucauaagaaaaaccucuacgaccacgcccucauguccaucauaucaaccuuccaccuaucaauaccaaacuucaaccaauacgaagccaugagcugcgacuucaacggaggaaagauaucaguccaauacaaccucucccacgccuacgcagucgacgcagccaaccacugcggcacaaucgccaacggcguacuacaaaccuucaugcgcauggccuggggcgguuccuacaucgcccucgacagcggaugcggaagcugggacugcauaaugacauccuaccaauacuuaaucauccaaaacaccacuugggaagaccacugccaauucucacgccccuccccaauaggauaccucggccuacucucgcaacgcacccgugacauauacauaucccgacgccgccgcggcaccuucacauggacccuauccgacagcgaaggcaacgaaacgccuggcggcuacugccucacccgcuggauguuaaucgaagccgagcuaaaaugcuucggcaacacagccguagccaaaugcaacgaaaaacacgacgaagaguucugcgacaugcucagacucuucgacuucaacaaacaagccauacgacgccucaaaaccccagcacaaauguccauccaacuaaucaacaaagccgucaacgcccuuauaaacgaccagcuuauaaugaaaaaccaccuccgcgacaucaugugcauccccuacugcaacuacagcaaauacugguaccuaaaccacacggucaccggcaaaacgucccucccccgcugcuggcuagucuccaacgguuccuaccucaacgaaacccacuucagcgacgacaucgaacaacaggccgacaacaugaucaccgaacuccuccaaaaagaauacauggaccgccaaggcaaaacaccccuaggccucgucgaccucuuugucuucagcaccucauucuaccucauaucuaucuuccuacaccuuaucaaaauccccacccacagacacaucaccggcaagcccugccccaaaccccaccgccucaaccacauggguaucugcagcugcggccucuacaaacacccuggcguacccguaaaguggaaacgcuaaggacuaguuauaagacugacuagcccgaugggccucccaacgggcccuccuccccuccuugcaccgagauuaauaaaaaaaaaaaaaaaaaaaaaaaaaaaaaaaaaaaaaaaaaaaaaaaaaaaaaaaaaaaaaaaaugcaucccccccccccccccccccccccccccccccaaaggcucuuuucagagccaccagaauu

SEQ ID NO: 7524 - RNA, 1690 nt, Artificial Sequence
  mRNA product Design i-3 comprising derived and/or modified sequence from LASV(ISTH2010-NIG-2012;Clade II)__AIT17482__GPCstabilized (opt11)
gggagaaagcuuaccaugggccaaaucauaacauucuuccaggaagucccgcacgucaucgaagaggucaugaacaucguacuaaucgcccugucccuccuagccauacuaaaaggcauauacaacguagccacaugcggccuauucggccuugucuccuuccuccuccucuguggccgcuccugcucaaccaccuacaaaggcguauacgaacuccaaacacuagaacucgacauggccucccucaacaugaccaugccccucucauguaccaagaacaacucacaccauuacaucauggucggcaacgaaaccggccuggaacucacccucacuaauaccagcaucaucaaccauaaauucugcaaccuauccgacgcccacaagaaaaaccucuacgaccacgcacuaaugucgaucaucucaaccuuccaccuaucuauccccaacuucaaccaauaugaggccauguccugcgacuucaacggcggcaaaauaagcguacaauacaaccucucccacgccuacgcugucgaugccgcuaaccacugcggaaccaucgcuaacggaguccuacaaaccuucaugcgaauggccuggggcggcagcuacaucgcccuagacuccggaugcggcagcugggacugcaucaugaccuccuaccaauaccuaaucauccaaaacaucaccugggaagaccacugccaauucagccgcccaucaccaaucggcuaccucggccuucucucucaacgaacccgagacaucuacaucucccgccgccgccgcggaaccuucaccuggacucucucugacucagaaggcaacgaaaccccaggaggauauugccucacccguuggaugcucaucgaagcagaacucaaauguuucggcaacaccgccgucgccaaaugcaacgaaaaacacgacgaagaguucugcgacaugcuccgacucuucgacuucaacaaacaagccauccggcgacucaaaacccccgcgcaaauguccauacagcucaucaacaaagccguaaacgcccucaucaacgaccagcuuaucaugaaaaaccaccuucgcgacaucaugugcauccccuacugcaacuacuccaaauauugguaccucaaccacaccguaaccgguaaaacgagccucccccgcugcuggcucgucuccaacggcuccuaccucaaugaaacccacuuuuccgacgacaucgaacaacaagccgacaacaugaucaccgaacuccuucaaaaagaauacauagaccgccaagguaaaaccccgcucggccuaguagaccuuuucguauucucaaccucuuucuaccuaaucuccaucuuccuccaccucgucaaaauccccacccaccgacacgucguagguaaaccaugccccaaaccccaccgacucaaucacauggguaucugcuccugcggacucuacaaacaucccggcguacccgucaaauggaaacgcuaaggacuaguuauaagacugacuagcccgaugggccucccaacgggcccuccuccccuccuugcaccgagauuaauaaaaaaaaaaaaaaaaaaaaaaaaaaaaaaaaaaaaaaaaaaaaaaaaaaaaaaaaaaaaaaaaugcaucccccccccccccccccccccccccccccccaaaggcucuuuucagagccaccagaauu

SEQ ID NO: 7525 - RNA, 1690 nt, Artificial Sequence
  mRNA product Design i-3 comprising derived and/or modified sequence from LASV(Lassa virus/H.sapiens-wt/NGA/2015/ISTH_0543;Clade II)__AVO03639__GPCstabilized (opt11)
gggagaaagcuuaccaugggccaaaucaucaccuucuuccaggaaguaccacacgucaucgaagagguaaugaacauaguccucaucgcacucucccuacucgccauauuaaaaggcaucuacaacguagcaaccugcggccuauucggccuagucucauuccuccuccucugcggccgcuccugcuccaccaccuacaaaggaguuuacgaacuccaaacccucgaacucgacauggcaaaccuaaacaugacaaugccucucuccugcaccaaaaacaacucacaccacuacaucauggucggcaacgagaccggccucgaacucacuuuaaccaacaccucaaucaucaaccacaaauucugcaaccuaucggacgcccacaagaaaaaccucuacgaccacgcccugaugucaaucaucucaacauuccaccucuccauacccaacuucaaccaauacgaagcaauguccugcgacuucaacggcggcaaaaucucuguacaauacaaccugucacacaccuacgccgucgacgccgccaaccacugcggaaccaucgccaacggcguccuacaaacauucaugcgcauggcguggggcggauccuacauagcucucgacuccgguugcggcuccugggacuguaucaugacauccuaccaauaccucgucauacaaaacacaaccugggaagaccacugccaauucucccgccccucuccaaucggcuaccugggccuccucagccaacgcacccgugacaucuacaucuccagacgcagacgcggaaccuucacauggacccucucagacuccgaaggcaacgagacccccggcggcuacugccuaaccagauggaugcugaucgaagcagaacugaaauguuucgguaacacugcaguagccaaaugcaacgaaaaacacgacgaagaguucugcgacaugcucagacuuuucgacuucaacaaacaagccauccgccgacuaaaaacccccgcccagaugucuauccaacucaucaacaaagccgucaacgcacucaucaacgaucaacucaucaugaaaaaccaccuccgcgacauuaugugcauaccuuacugcaacuacuccaaauauugguaccucaaccacacagucaccggcaaaaccagccucccccgcugcuggcucgucucaaacggcagcuaccuaaacgaaacccacuucucugaugacauugaacaacaggccgacaacaugauuacagaacuccuacaaaaggaauacaucgacagacaaggaaaaaccccucucggccuaguagaccucuucgucuucucaacauccuucuaccuaaucagcaucuuccuccaccucgucaaaauccccacccaccgccacauaaccggcaaacccugccccaaaccucaccgacucaaccacaugggaaucugcucauguggccucuacaaacaccccggcguacccgucaaauggaaacgcuaaggacuaguuauaagacugacuagcccgaugggccucccaacgggcccuccuccccuccuugcaccgagauuaauaaaaaaaaaaaaaaaaaaaaaaaaaaaaaaaaaaaaaaaaaaaaaaaaaaaaaaaaaaaaaaaaugcaucccccccccccccccccccccccccccccccaaaggcucuuuucagagccaccagaauu

SEQ ID NO: 7526 - RNA, 1690 nt, Artificial Sequence
  mRNA product Design i-3 comprising derived and/or modified sequence from LASV(Lassa virus/H.sapiens-wt/NGA/2016/ISTH_0009;Clade II)__AVO03571__GPCstabilized (opt11)
gggagaaagcuuaccaugggacaaaucaucaccuucuuccaagaagucccccacgucaucgaagaagucaugaauaucguccucauagcccuaucucuccuugcuauccucaaaggcaucuacaacgucgcaaccugcggccuacuagggcucgucuccuuccuacuacucugcggccgcuccugcucaaccaccuacaaaggcgucuacgaacuucaaacucucgaacucgauauggccucucuuaacaugacaaugccccucuccugcaccaaaaacaacucccaccacuacaucaugguuggcaaugaaacaggccucgaacucacccuaacaaacaccuccaucaucaaccacaaauucuguaaucucuccgacgcccacaagaaaaaccuauacgaccacgcccuuaugucuauaaucagcaccuuccaccucuccauacccaacuuuaaccaguacgaagccauguccugcgacuuuaacggcggacgcauauccguccaauacaaccugucacacuccuacgccguggacgcugccaaccacugcggcacaauugccaacggcguccugcaaaccuucaugcgcauggccuggggcggcuccuacauagccuuagacuccggaugcggcuccugggacugcaucaugacgucauaccaauaccucaucauacaaaacaccaccugggaagaccacugccaauuuucccgccccagcccaaucggcuaccucggccuucuaucccaacgaacccgcgacaucuacaucucacgccgccgccgcggcaccuucaccuggacccucuccgacuccgaaggcaacgaaacaccaggcggcuacugucucacacgcuggaugcucaucgaagccgaacuaaaaugcuucggcaacaccgccgucgccaaaugcaacgaaaaacacgacgaagaauuuugcgacaugcuacgacuuuucgacuucaacaaacaagcuauccgccgccuaaaaacccccgcucaaauguccauacaacucaucaacaaagccgucaacgcccucaucaacgaccaacuaaucaugaaaaaccaucuccgagacaucaugugcauccccuauuguaacuacuccaaauacugguaccuaaaccacaccguuaccgguaagacaucccuaccacgcugcuggcuagucucaaacggcuccuaccuaaacgaaacccacuucuccgacgacauagaacagcaagcagacaacaugaucacugaacuccuucaaaaagaauacaucgaccgccaagguaaaacaccccucggccucgucgaccuauucgucuucuccaccuccuucuaucuaauauccaucuuccuccaccucgucaaaauccccacccaucgccauaucacuggaaaacccugccccaaaccacaucgacuaaaccacauggguaucugcuccugcggccuauacaaccaccccggcgucccagucaaguggaaacgcuagggacuaguuauaagacugacuagcccgaugggccucccaacgggcccuccuccccuccuugcaccgagauuaauaaaaaaaaaaaaaaaaaaaaaaaaaaaaaaaaaaaaaaaaaaaaaaaaaaaaaaaaaaaaaaaaugcaucccccccccccccccccccccccccccccccaaaggcucuuuucagagccaccagaauu

SEQ ID NO: 7527 - RNA, 1690 nt, Artificial Sequence
  mRNA product Design i-3 comprising derived and/or modified sequence from LASV(Lassa virus/H.sapiens-wt/NGA/2016/ISTH_0017;Clade II)__AVO03567__GPCstabilized (opt11)
gggagaaagcuuaccaugggccagauuaucaccuucuuccaggaaguaccacacgucaucgaagaaguaaugaacaucguacucaucgcccuaucccuacucgcaauccucaaaggcaucuacaacguagcaaccugcggccucuucggacucguuuccuuccuccuccuuugcggccgcucaugcuccacaaccuacaaaggcgucuacgaacuacaaacacucgaacucgacauggccucccucaacaugaccaugccccucagcugcaccaaaaacaacagccaccacuacaucauggucggcaacgaaacaggacuugaacucacccucacaaacaccucaaucaucaaccacaaguucugcaaccuaagcgacgcgcacaagaaaaaccuauacgaccacgcccuaaugucaaucaucagcaccuuccaccucucgauucccaacuucaaccaauaugaagcaauguccugcgacuucaacggaggcaaaaucagcguccaguacaaccuaagccacacauacgccauagacgccgcaaaccacugcggcaccaucgccaauggcguccuccaaaccuucaugcgcauggccuggggaggcuccuacauagcacucgacuccggcugcggcucaugggacugcaucaugacauccuaccaauaccucaucauccaaaacacgacaugggaagaccacugccaauucucacgccccucccccauaggcuaccuaggccuccuaucacaacgcacccgcgacaucuacaucuccagacgacgucgagguaccuucaccuggacacucagcgacucagaaggcaacgaaacccccggcggauacugccucacccgcuggaugcuaauagaagcagaacucaaaugcuuuggcaacaccgcugucgcaaaaugcaacgaaaagcacgacgaagaguuuugcgacaugcuccgccucuucgacuucaacaaacaagccauccgucgccucaaaacacccgcccaaauguccauccagcuaaucaauaaagccguuaacgcacuuaucaacgaccaacucaucaugaaaaaccaccucagagacauuaugugcaucccauacugcaacuacuccaaauacugguaccuuaaccacacagucaccggcaaaaccucacuuccccgcugcuggcuagucuccaacggcucauaccucaacgaaacacacuuuagcgacgacauugaacagcaggcagacaacaugaucacagaacuacuccaaaaagaauacauggaccgccaaggaaaaacaccccuaggccuuguagaccuuuucgucuucuccaccuccuucuaccuaaucucaaucuuccuccaccucguucgaauccccacccaccgacaugucauaggaaaacccugccccaaaccccaccgacucaaccacaugggcaucuguuccugcggccucuauaaacaucccggaguccccguuaaauggaaacgcuaaggacuaguuauaagacugacuagcccgaugggccucccaacgggcccuccuccccuccuugcaccgagauuaauaaaaaaaaaaaaaaaaaaaaaaaaaaaaaaaaaaaaaaaaaaaaaaaaaaaaaaaaaaaaaaaaugcaucccccccccccccccccccccccccccccccaaaggcucuuuucagagccaccagaauu

SEQ ID NO: 7528 - RNA, 1690 nt, Artificial Sequence
  mRNA product Design i-3 comprising derived and/or modified sequence from LASV(Lassa virus/H.sapiens-wt/NGA/2018/ISTH_0959;Clade II)__AVV65099__GPCstabilized (opt11)
gggagaaagcuuaccaugggccaaaucaucacauucuuccaagaaguaccccacgucaucgaagaagucaugaacaucguucuaauagcccucucccuacuagccauccucaaaggcaucuauaacguagugaccugcggccuauuuggccucgucagcuuccuccuccuaugcggacgauccugcuccaccacauacaaaggagucuacgaacuacaaacacucgaacuugacauggccucccucaacaugaccaugccccucuccugcaccaaaaacaacucccaccauuacaucauggucggcaacgaaaccggccuagaacugacccucacaaauaccuccaucaucaaccacaaauucugcaaccuaagcgacgcccacaagaaaaaucucuacgaucacgcacucaugagcaucauauccaccuuccaccucuccauaccuaacuucaaccaauaugaagccaugucaugcgacuucaacggcggaaaaaucuccguccaauacaaccucagccacgccuacgccaucgacgccgccaaccacugcggaaccauagcgaacggagucuuacaaaccuucaugcgaauggcauggggcggcagcuacaucgcacucgacuccggaugcggcucaugggacugcaucaugaccuccuaccaauaccugauaauccaaaauaccaccugggaagaccauugccaauucagccgccccucccccauaggcuaccugggacuccuuucccaaagaacccgcgacaucuacaucucacgacggcgccgcggcacauucaccuggacccucuccgacagcgaaggcaaugaaaccccaggcggauacugccucacucgcuggaugcuaauagaagccgagcuaaaaugcuucggcaacaccgccgucgcaaaaugcaaugaaaaacacgaugaagaguucugcgacaugcuccgccuauucgacuucaacaaacaagccaucagacggcucaaaacaccagcccaaauguccauccaacucauuaacaaagccgucaacgcccuaaucaaugaccaacucauaaugaaaaaccaccuccgggacaucaugugcauaccauacugcaacuacuccaaauacugguaccucaaucacaccgucaccggcaaaaccucacuaccccgaugcuggcucgucuccaauggcucauaccuaaacgaaacucacuucucagacgacaucgaacaacaagccgacaacaugaucacagaacuccuacaaaaagaauacaucgaccgccaaggcaaaacaccccucggacucguagaucuauucguauucuccaccucauucuaccucaucuccaucuuccuccaccucgucaaaauaccaacccaccgccacgucauaggcaagcccugccccaaaccccaccgccucaaucacaugggcaucugcuccugcggccucuacaaacacccuggggucccaguaaaauggaaacguuagggacuaguuauaagacugacuagcccgaugggccucccaacgggcccuccuccccuccuugcaccgagauuaauaaaaaaaaaaaaaaaaaaaaaaaaaaaaaaaaaaaaaaaaaaaaaaaaaaaaaaaaaaaaaaaaugcaucccccccccccccccccccccccccccccccaaaggcucuuuucagagccaccagaauu

SEQ ID NO: 7529 - RNA, 1690 nt, Artificial Sequence
  mRNA product Design i-3 comprising derived and/or modified sequence from LASV(LASV003-NIG-2008;Clade II)__AIT17580__GPCstabilized (opt11)
gggagaaagcuuaccaugggucaaaucauaacauucuuccaagaaguuccacacgucaucgaagaagucaugaacaucguccucauagcccucucccuccucgcaauucucaaaggcaucuacaauguagccaccuguggccuauucggacucgucagcuuccuacuccuaugcggccgcuccugcuccaccaccuacaaagguguauacgagcuacaaacacucgaacucgacauggccucacucaacaugaccaugccacucuccugcaccaaaaacaacucccaccacuauaucauggucgguaacgaaacuggccucgaacuaacgcucacaaacacauccauaauaaaucacaaauucugcaaucucucagacgcccacaagaaaaaccuuuacgaccacgcccucaugucaaucaucuccaccuuccaccucuccauccccaacuucaaccaguacgaagcaaugucaugcgacuucaacggcggaaaaaucuccguccaauacaaccucucacacaccuacgccgucgacgcagccaaccacugcgguaccauagcaaacggaguacuccaaacauucaugcgcauggccuggggcggcuccuacauugcccuggacucaggcugcggcuccugggauugcaucaugacaagcuaccaauaucucaucauccaaaacaccacaugggaagaucacugucaauucucccgccccucaccaaucggauaccucggucuucucucccaacgaacccgcgacaucuacaucucccgccgucgacgcggcaccuucaccuggacccucuccgacuccgaauccaaugaaacucccggaggcuacugccucacucgcuggaugcuaaucgaagccgaacucaaaugcuuuggcaacaccgccguugcaaaaugcaacgaaaaacacgacgaggaguucugcgacaugcuacgccuuuucgacuuuaacaaacaagccauacgacgccucaaagcccccgcacaaauguccauccaacucaucaacaaagcagucaacgcccucaucaacgaucaacucauaaugaaaaaccaccuucgcgauaucaugugcauucccuacuguaacuacucgaaauacugguaccucaaccacaccgucaccggccgcaccucacucccccgcuguuggcucgucuccaacggcucuuaccucaacgaaacccacuucucagacgacaucgaacaacaagccgacaacaugaucaccgaacuccuccagaaagaauacauggaccgacaaggcaaaacuccacucggacucguagaccucuucgucuucucuaccuccuucuaccucauauccaucuuccuccacuuggucaaaauccccacacaccgccaugucaucggaaaaccaugccccaaaccacaccgccucaaucacaugggaauaugcagcugcggccucuacaaacaccccggcguacccgucaaauggaaacgcuaaggacuaguuauaagacugacuagcccgaugggccucccaacgggcccuccuccccuccuugcaccgagauuaauaaaaaaaaaaaaaaaaaaaaaaaaaaaaaaaaaaaaaaaaaaaaaaaaaaaaaaaaaaaaaaaaugcaucccccccccccccccccccccccccccccccaaaggcucuuuucagagccaccagaauu

SEQ ID NO: 7530 - RNA, 1690 nt, Artificial Sequence
  mRNA product Design i-3 comprising derived and/or modified sequence from LASV(LASV035-NIG-2009;Clade II)__AIT17588__GPCstabilized (opt11)
gggagaaagcuuaccaugggccaaaucaucaccuucuuccaagaagucccucacgucaucgaagaagucaugaacaucguccucauagcccucucucuacucgccauccucaaaggcaucuacaacgucgcaaccugcggccucuucgggcucguaucguuccuccuccucugcggaagauccugcucaaccaccuacaaaggcgucuacgaacuccaaacccucgaacucgacauggccucacuuaacaugaccaugccccucuccugcaccaaaaacaacucccaccauuacaucauggucgguaacgagaccggccuagaacuaacacucaccaacaccucuauaaucaaccacaaauucugcaaccuaucagacgcccacaagaaaaaccuuuacgaccacgcccuuauguccaucaucuccaccuuccaccuauccauacccaacuucaaccaauacgaagccauguccugcgacuucaauggcggcaaaaucuccguccaauacaaccucucccacgcauacgccgucgacgccgccaaccacuguggcaccaucgccaacgggguacuacaaaccuucaugcgcauggccuggggagguucguacaucgcccucgacucaggaugcggcucaugggacugcaucaugaccuccuaucaauaccucaucauccaaaacaccaccugggaagaccacugccaauuuucaagacccucccccauaggcuaccuaggccugcucucacaacgcacccgagacaucuacaucucccgccgacgacgcggaacauucacauggacucucuccgacucagagggcaacgaaacccccggcggcuacugccuaaccagauggaugcuaaucgaggccgaacucaaaugcuucggcaacaccgccgucgcaaaaugcaacgaaaaacacgacgaagaguucugcgacaugcuccgacucuucgacuucaacaaacaagccauucgacgccuaaaagcccccgcacagaugucaauccaacucaucaacaaagccguaaacgcccuaaucaacgaccaacuaaucaugaaaaaccaccuccgcgacaucaugugcaucccuuauugcaauuacuccaaauacugguaccucaaccacaccgucaccggaaaaacaucccuaccccgaugcuggcuaguauccaacggcuccuaccucaaugaaacgcacuucucagacgacaucgaacaacaagccgauaacaugauaaccgaacuucuccaaaaagaauacaucgacagacagggcaaaacaccccucggacucgucgaccuauucguauucucuaccucauucuaccuaauuucgaucuuccuccaccucgucaaaauacccacccaccgacacguuaucggcaaacccugccccaagccccaccgccucaaccacaugggcauaugcuccugcggccucuacaaacacccaggcguccccgucaaguggaaacgcuaaggacuaguuauaagacugacuagcccgaugggccucccaacgggcccuccuccccuccuugcaccgagauuaauaaaaaaaaaaaaaaaaaaaaaaaaaaaaaaaaaaaaaaaaaaaaaaaaaaaaaaaaaaaaaaaaugcaucccccccccccccccccccccccccccccccaaaggcucuuuucagagccaccagaauu

SEQ ID NO: 7531 - RNA, 1690 nt, Artificial Sequence
  mRNA product Design i-3 comprising derived and/or modified sequence from LASV(LASV1000-NIG-2009;Clade II)__AIT17782__GPCstabilized (opt11)
gggagaaagcuuaccaugggccaaauaaucaccuucuuccaagaaguaccucacgucauagaagaagucaugaacaucguccucaucgcccucucccuccucgccauacucaaaggcaucuacaacgucgcaaccuguggccucuucggccucgucucauuccuccuacucugcggcagaucaugcucaaccacauacaaaggcguauacgaacuucagacccucgaacucgacauggccucccucaacaugaccaugccccucuccugcaccaagaacaacucccaucacuacaucauggucggcaacgaaaccggacuagaacucacacuuacgaacaccuccaucaucaaccacaaauucugcaaccuaagcgacgcccacaagaaaaaccuguacgaccacgcucucauguccauaaucuccaccuuccaccucuccauccccaacuucaaccaauacgaagcaaugagcugcgacuucaacggcggcaaaauaucaguccaauacaaccuaucccacaccuacgccgucgacgccgcaaaccacugcggcacaaucgccaacggcguccuccaaaccuucaugcgcauggccuggggcgguagcuacaucgcccucgacuccggcugcggaucaugggacuguaucaugacauccuaucaguaccuaaucauccaaaacaccaccugggaagaccacugccaauuuucccgacccucccccauagguuaccucgggcuccucucccaacgcacacgcgacaucuacaucucucgcagacgccgcggaaccuucaccuggacacucucagacucagaaggcaacgaaacucccggaggauacugccucacacgcuggaugcucaucgaagccgaacucaaaugcuucggaaacaccgcaguagcaaaaugcaacgaaaaacacgacgaagaauuuugcgacaugcucagacuauucgacuucaacaaacaagcuauaaaacgccucaaaacccccgcccaaauguccauccaacucaucaacaaagccgucaacgcacuaaucaacgaccaacuaaucaugaagaaccaccuacgcgacaucaugugcaucccuuacugcaacuacuccaaauacugguaccucaaccacacagucaccggaaaaacuucauuaccccgaugcuggcuggucuccaacggcuccuaccucaacgaaacgcacuucuccgacgacaucgaacaacaagccgacaacaugauaaccgaacuccuccaaaaagaauauaucgaccgccaaggcaaaacuccccucggccucgucgaccucuucguguucucuacauccuucuaccucaucucaaucuuccuacaucucguaaaaauuccaacccaccgccauguaguaggcaaacccugccccaaaccccaccgccucaaccacauggggaucugcucuugcggccuguacaaacaccccggcgucccaguuaaauggaaaagguagggacuaguuauaagacugacuagcccgaugggccucccaacgggcccuccuccccuccuugcaccgagauuaauaaaaaaaaaaaaaaaaaaaaaaaaaaaaaaaaaaaaaaaaaaaaaaaaaaaaaaaaaaaaaaaaugcaucccccccccccccccccccccccccccccccaaaggcucuuuucagagccaccagaauu

SEQ ID NO: 7532 - RNA, 1690 nt, Artificial Sequence
  mRNA product Design i-3 comprising derived and/or modified sequence from LASV(LASV221-NIG-2010;Clade II)__AIT17624__GPCstabilized (opt11)
gggagaaagcuuaccaugggccaaauaaucaccuucuuccaagaaguuccccacguaaucgaggaagucaugaacaucguccucaucgcccuaucccuacuugcuauacucaaaggcauauacaaugucgcaaccugcggccucuucgggcuaguaucuuuccuccuacucugcggccguuccugcuccaccaccuacaaaggcgucuacgaacuccaaacacucgagcucgacauggccucccucaacaugacaaugccccuauccuguaccaagaacaacucccaccacuacaucaugguugguaacgaaacaggccuagagcucacacucaccaacaccuccauuaucaaccacaaauucuguaaccucuccgacgcccauaagaaaaaccucuacgaccacgcccucaugagcaucaucuccaccuuccaccucuccauccccaacuucaaccaauacgaagccauguccugcgacuucaacggaggcaaaaucuccguccaauacaaccucucccacacuuacgccaucgacgccgcgaaccacugcggaaccaucgccaacggcguucuccaaaccuucaugcgcauggccuggggaggcucauacaucgcacuagacuccggaugcggcuccugggacuguaucaugaccuccuaccaauaccucauuauacaaaauacaaccugggaagaccacugccaauucucccgaccauccccaaucggauaccucggccuccucucacaacgaacccgagacaucuacaucucucgccgccgccgaggcacauucacguggacacucuccgacuccgagggcaacgaaacccccggaggcuauugccuaacucgcuggaugcucaucgaagccgaacuaaaaugcuucggcaacaccgccgucgcaaaaugcaacgaaaaacacgacgaagaguucugcgacaugcuccgacucuucgacuucaacaaacaggccauccgccgccuuaaaaccccagcacaaauguccauccaacugaucaacaaagccguaaaugcucuaaucaacgaccaacucauaaugaaaaaccaccuccgagacaucaugugcauccccuacuguaacuacuccaaauacugguaccucaaccacaccguaacaggaaaaaccucccuaccacgcugcuggcucgucagcaacggcuccuaccuaaacgaaacccacuuuucugacgacauagaacaacaagccgacaacaugauaacggaaaugcuacaaaaagaauacauggaccggcaaggcaaaaccccgcucggccucguagaccucuucgucuucuccaccuccuucuaccucaucuccaucuuccuccaccucgucaagauccccacccacagacacguaaucggcaaaccuugccccaaaccccacagguugaaccacaugggcaucugcuccugcggccuauacaaacacccaggcguaccagucaaguggaaacgcuaaggacuaguuauaagacugacuagcccgaugggccucccaacgggcccuccuccccuccuugcaccgagauuaauaaaaaaaaaaaaaaaaaaaaaaaaaaaaaaaaaaaaaaaaaaaaaaaaaaaaaaaaaaaaaaaaugcaucccccccccccccccccccccccccccccccaaaggcucuuuucagagccaccagaauu

SEQ ID NO: 7533 - RNA, 1690 nt, Artificial Sequence
  mRNA product Design i-3 comprising derived and/or modified sequence from LASV(LASV237-NIG-2010;Clade II)__AIT17638__GPCstabilized (opt11)
gggagaaagcuuaccaugggccaaauaaucaccuucuuucaagaagucccccacgucaucgaagaggucaugaacauuguccucauagcccuaucccuacucgcaauccucaaaggcauuuacaacgucgcuaccugcggccuauucggccuagucagcuuccuccucuuaugcggccgcuccugcucaacaacauacaaaggcguuuacgaguuacaaacccucgaacuagacauggccucucuaaacaugaccaugccccuuuccugcacuaaaaacaacucucaccacuauauuaugguaggcaacgagacaggccuugaacucacccucaccaacaccuccaucauaaaccacaaauucugcaaccuauccgacgcccacaaaaaggaccuuuacgaccacgcccucaugucaaucauaagcaccuuccaccucagcauucccaacuucaaucaauacgaagccauguccugcgauuucaacggcggcaaaaucuccguccaauacaaccuuagccacaccuacgccgucgacgccgccaaccacugcggaaccaucgcaaacggcguacuccagacauucaugcgcauggccuggggcgguuccuacaucgcccucgacucuggcugcggcuccugggacugcaucaugaccuccuaccaauaccucauaauccaaaacacaacaugggaagaccacugccaauucucccguccaucucccaucgguuaccucggccuacuuucccaacgaacccgagacaucuacaucagccgacgucgucgcggcacauucaccuggacacuauccgacucugaaggcaacgaaacccccggcggauauugccuaacccgauggaugcucauagaagccgaacucaaaugcuucggcaacaccgccgucgccaaaugcaacgaaaaacacgacgaagaguucugcgacaugcuacgccucuucgacuucaacaaacaagccauccgucgccuaaaaaccccagcccaaaugucaauacagcucaucaacaaggccgucaacgcccucaucaacgaccaacucaucaugaagaaccaccuccgugacaucaugugcauccccuacugcaacuacucaaaauauugguaccuuaaccacacagucacgggcaaaaccucccucccccgcugcuggcucgucuccaacggauccuaccucaacgaaacucacuucuccgacgacaucgaacaacaagccgacaacaugaucaccgaacuacuccaaaaagaauacauggaccgccaaggcaagacuccccucggccucgucgaccucuucguuuucuccaccuccuucuaccucaucagcaucuuccuacaccucaucaaaaucccgacccaccgccacaucaccggcaaacccugcccgaaaccccaccggcuaaaccacaugggcaucugcuccugcggccucuauaaacaccccgguguccccgucaaauggaaacgauaaggacuaguuauaagacugacuagcccgaugggccucccaacgggcccuccuccccuccuugcaccgagauuaauaaaaaaaaaaaaaaaaaaaaaaaaaaaaaaaaaaaaaaaaaaaaaaaaaaaaaaaaaaaaaaaaugcaucccccccccccccccccccccccccccccccaaaggcucuuuucagagccaccagaauu

SEQ ID NO: 7534 - RNA, 1690 nt, Artificial Sequence
  mRNA product Design i-3 comprising derived and/or modified sequence from LASV(LASV253-NIG-2011;Clade II)__AIT17670__GPCstabilized (opt11)
gggagaaagcuuaccaugggccaaaucaucaccuucuuccaagaaguaccacacguaaucgaagaagucaugaacauaguccucauagcacucucccuacucgccauacuuaaaggaauuuacaacguagcaaccugcggucucuucggccuugucuccuuccucuuacugugcggccgaagcugcuccacaacauacaaaggagucuacgaacuacagacccucgaacucgacauggcaucccucaacaugaccaugccccuauccuguaccaaaaacaacucacaccacuacaucaugguagguaacgaaacaggacuugaacuaacccucaccaacacuucaaucauaaaccacaaauucugcaaccucuccgacgcccacaaaaaaaaccucuacgaccacgccuugauguccaucauauccaccuuccaccucuccaucccaaacuuuaaccaauacgaagccauguccugcgacuucaacggaggcaaaauaucaguacaauauaaccuaucccacaccuacgcagucgacgccgccaaccacugcggcaccauagccaacggaguccugcagacauucaugcgaauggcaugggguggaucuuacaucgcucuagacuccgggugcggcuccugggacugcaucaugaccucauaucaauaccucaucauacaaaacaccaccugggaggaccacugucaauucucccgcccuucccccauaggcuaccuggggcuccuaucccaaagaacccgcgacauauacauaucccgccgucgucgaggcaccuucacauggacccucagcgacucagaaggcaacgaaacccccggcggcuacugccucacccguuggaugcuaauagaagcagaacucaaaugcuucggcaacaccgcggucgccaaaugcaacgagaaacacgacgaagaauucugcgacaugcuccgccuauucgacuucaacaaacaagcaauccgccgccuuaaagcccccgcccaaaugucaauccaacucaucaacaaagccguaaacgcacucaucaacgaccaacucaucaugaaaaaccaccuccgcgacauaaugugcauccccuacugcaacuacuccaaauacugguaccucaaccacaccgucaccggccgcaccucucucccccggugcuggcuugucucaaacggcuccuaccucaaugaaacccacuucuccgacgacauagaacaacaagccgacaacaugaucacagaacuccuccaaaaagaauacaucgaccgccaaggcaaaaccccccucggacuagucgaccucuucguuuucuccaccuccuucuaccucaucuccaucuuccuccaccucgucaaaauacccacccaccgucacaucaucggcaaaccaugccccaaaccccaccgccucaaccacaugggcauaugcuccugcggacuguacaaacaccccggaguaccaguaaaauggaaacgcuaaggacuaguuauaagacugacuagcccgaugggccucccaacgggcccuccuccccuccuugcaccgagauuaauaaaaaaaaaaaaaaaaaaaaaaaaaaaaaaaaaaaaaaaaaaaaaaaaaaaaaaaaaaaaaaaaugcaucccccccccccccccccccccccccccccccaaaggcucuuuucagagccaccagaauu

SEQ ID NO: 7535 - RNA, 1690 nt, Artificial Sequence
  mRNA product Design i-3 comprising derived and/or modified sequence from LASV(LASV254-NIG-2011;Clade II)__AIT17674__GPCstabilized (opt11)
gggagaaagcuuaccaugggccaaaucaucaccuucuuccaagaagucccccacgucauugaagaagucaugaacaucguccucauugcccugucccuacucgccauccucaaaggcaucuacaacgucgcaaccugcggucuauuuggccucgucagcuuccuccugcuaugcggccguuccugcuccaccaccuacaaaggcgucuacgaacuucaaacccucgaacucgacaugacaaaucuaaacaugaccaugccccugucuugcaccaaaaacaacagccaccacuacaucauggucggcaacgaaaccggccuagaacucacccuaaccaacacauccaucaucaaccacaaauucugcaaccucuccgacgcccauaagaaaaaccucuauaaccacgcccucauguccauaaucucaacauuccaccucucaauaccaaauuuuaaccaauaugaagccauguccugcgacuucaacggcggcaaaaucucaguacaauacaaucucucccacucuuacgccguagacgcagccaaccacugcggaaccauagccaacgguguccuccagaccuucaugcgcauggccuggggaggaucauacaucgcccucgacagcggcugcggaaacugggacugcaucaugaccuccuaccaauaccucaucauucaaaacaccaccugggaagaccacugccaguucucccgccccagcccaaucggauaccuaggccuccucucccaaagaacccgcgacaucuacaucucccguagacgacguggcacauucaccuggacacuaucugacuccgaaggcaacgaaacccccgguggauacugccucacccgcuggaugcucauugaagccgaacucaaaugcuucggaaacacagcagucgccaaaugcaacgaaaaacaugacgaagaguucugcgacaugcuccgccucuucgacuucaacaaacaagccaucagacgccucaaaacccccgcacaagccaacauacaacucaucaauaaagccgucaaugcacucauaaacgaccaacucaucaugaaaaaccaccuccgagacauaauguguauccccuacugcaacuauuccaaauacugguaccuuaaccacaccgucaccgguaaaaccucccucccccgcugcuggcucguauccaacggcuccuaccucaacgaaacccacuucuccgacgacaucgaacaacaagcagacaacaugaucaccgaacuucuacaaaaagaauacauggacagacagggcaaaacgccgcucggacucgucgaccuauucgucuucagcaccuccuucuaccuaauauccaucuuccuacaccuggucaaaauucccacgcaccgacacguaaucggaaaacccugucccaaaccccaccgacucaaccauaugggcaucugcagcugcggccuuuacaaacaccccggcguccccgucaaauggaaacgcuaaggacuaguuauaagacugacuagcccgaugggccucccaacgggcccuccuccccuccuugcaccgagauuaauaaaaaaaaaaaaaaaaaaaaaaaaaaaaaaaaaaaaaaaaaaaaaaaaaaaaaaaaaaaaaaaaugcaucccccccccccccccccccccccccccccccaaaggcucuuuucagagccaccagaauu

SEQ ID NO: 7536 - RNA, 1690 nt, Artificial Sequence
  mRNA product Design i-3 comprising derived and/or modified sequence from LASV(Nig08-A19;Clade III)__ADU56618__GPCstabilized (opt11)
gggagaaagcuuaccaugggccaaaucgucacauucuuccaagaaguuccccacgucauagaagaagucaugaauaucguccuaaucgcccucuccauccucgccauucucaaaggacuauacaacaucgcaaccugcggccucaucggccuugucacauuccuucuacucuccggccgauccugcucaaugaccuacaagggagucuacgaacuacaaacacucgaacuaaacaugaacacccuaaacaugacuaugccccucuccugcaccaaaaacaacagccaccacuacaucauggucgggaacgaaaccggacuagagcuaacccucaccaacaccucccuccuccaccacaaguucugcaaccuauccgacgcccacaagaaaaaccucuacgaccacacccucaugucaauaaucuccaccuuccaccucuccauccccaacuucaaccaauacgaagccaugucgugcgacuuuaacggcggcaaaauaacaguccaauacaaccucucccacucguacgccauagacgccgccaaccacugcggcaccgucgcaaacggaguccuacaaaccuucaugcgcauggcauggggcggaucauacaucgcccucgacuccggcugcggcaaaugggacugcaucaugaccagcuaccaauaccucaucauccaaaacacaaccugggaggaccacugccaauucucgcgucccucacccaucggcuaccucggacuccucucccaacgcacccgcgacaucuacauaagccgacgccgccgcggcaccuucaccuggacacuuuccgacuccgaagguaacgaaacccccggaggauacugccucacgcgcuggaugcugauagaagcagaacucaaaugcuucggcaacaccgccgucgccaaaugcaacgaaaaacacgaugaagaguucugcgacaugcuucgccuuuucgauuucaacaaacaagcuauacgccgccucaaagccccagcccaaaugucaauccaacuaauuaacaaagcagucaacgcucucaucaacgaccaacucauaaugaaaaaccaccuaagagacaucaugugcauccccuacugcaacuacuccaaauacugguaucucaaccacacuuccaccggacgaaccagccucccacgcugcuggcuaguauccaacggcucauaccucaacgaaacucacuucucggacgacaucgaacaacaagcagacaacaugaucaccgaaaugcuccaaaaagaauaccucgaccgacaaggcaaaaccccucuagggcucguugaucucuucgucuucucaacaucuuucuaccucaucuccauauuccuucaccucgucaagauccccacacaccgccacaucguaggaaaacccugcccaaaaccacaccgacucaaucacaugggcaucugcagcugcggccucuacaagcaacccggcguacccguccgcuggaagcgcuagggacuaguuauaagacugacuagcccgaugggccucccaacgggcccuccuccccuccuugcaccgagauuaauaaaaaaaaaaaaaaaaaaaaaaaaaaaaaaaaaaaaaaaaaaaaaaaaaaaaaaaaaaaaaaaaugcaucccccccccccccccccccccccccccccccaaaggcucuuuucagagccaccagaauu

SEQ ID NO: 7537 - RNA, 1693 nt, Artificial Sequence
  mRNA product Design i-3 comprising derived and/or modified sequence from LASV(G1180-SLE-2010;Clade IV)__AIT17168__GPCstabilized (opt11)
gggagaaagcuuaccaugggccaaauagucaccuucuuccaagaaguaccccacgucaucgaagaagucaugaacauaguccucauagcccucuccauacucgccguccucaaaggccuuuacaacuucgcaaccugcggccuagucggccugcuaaccuuccuacuacucugcggcagauccuguaccgccucacgcuacaaaggagucuacgaguuacaaacacucgaacucaacauggaaacccucaacaugacaaugccccucuccugcacgaaaaauaauucacaccacuacaucauggucggcaacgaaaccggccucgaacucacccucaccaacacaagcaucaucaaccacaaauucugcaaccuaucagacgcacacaagaaaaaccuguacgaccacgcccuaauguccaucaucucuacauuccaccuguccaucccaaacuucaaccaauacgaagcaaugagcugcgacuucaacggcgggaaaaucuccguccaauacaacuuaagccacagcuacgccggagacgccgcaaaccacugcggaacagucgcaaacggcguccuucaaaccuucaugcgcauggccuggggcggcuccuacauugcacuggacuccggcugcggcuccugggacugcaucaugaccuccuaucaauaccuaauaauacaaaacacaaccugggaagaccauugccaauucucccgcccaucacccaucggauaccuaggccuacucucccaacgaacucgagacaucuacaucucccgacgccgccgaggcaccuucaccuggacccucuccgacucagaaggcaaagacacucccggcggauacugccucacccgcuggaugcuuaucgaagccgaacucaaaugcuucggcaacacagccgucgccaaaugcaacgaaaaacacgacgaagaguucugugacaugcuccgacucuucgacuucaacaaacaagccauccaacgccuaaaagcaccagcacaaauguccauccaacucaucaacaaagccgucaaugcccucauuaacgaccaacucaucaugaaaaaccaccuccgagacaucaugugcaucccuuacugcaacuacuccaaauacugguaccuaaaccacaccacaaccggaaaaacaucccuccccaaaugcuggcuuguauccaacggcucauaucucaacgaaacccacuucuccgacgacaucgaacaacaagcagacaacaugauaacagaaaugcuacaaaaagaauacauggaacgacaaggaaaaacaccccuaggcuuggucgaucuauucgucuuuagcacaucauucuaccucauaucaauauuccuccaccucguaaaaauccccacccaccgccacauagucggcaaauccugcccaaaaccacaccgacucaaccacaugggcauauguucaugcggccucuacaaacaacccggcguacccgugaaauggaaacgcuagggacuaguuauaagacugacuagcccgaugggccucccaacgggcccuccuccccuccuugcaccgagauuaauaaaaaaaaaaaaaaaaaaaaaaaaaaaaaaaaaaaaaaaaaaaaaaaaaaaaaaaaaaaaaaaaugcaucccccccccccccccccccccccccccccccaaaggcucuuuucagagccaccagaauu

SEQ ID NO: 7538 - RNA, 1693 nt, Artificial Sequence
  mRNA product Design i-3 comprising derived and/or modified sequence from LASV(G1442-SLE-2011;Clade IV)__AIT17180__GPCstabilized (opt11)
gggagaaagcuuaccaugggccaaaucgucaccuucuuccaagaaguaccccacguaaucgaagaagucaugaacaucguccucaucgcacucuccauccuagccguccuaaaaggacuuuacaacguugccacaugcggucuaaucggacucgucaccuuccuccuccugugcggccgcucauguaccaccacacucuacaaaggcgucuacgaacuccaaacacuagaacucaauauggagacccuuaacaugacaaugccccuaagcugcaccaaaaacaauucucaccacuacauccggguagggaaugaaacagggcuagaacucacccucaccaacaccuccaucaucaaccacaaauucugcaaccuauccgacgcccacaagaaaaaccuauacgaccacgcccucauguccaucaucagcaccuuucaccuauccauacccaacuucaaccaauacgaagccauguccugcgacuucaacggcggcaaaauauccguacaauacaaccuaucccacucuuacgccggcgacgcagccaaccacugcggcacagucgcaaacgguguccuacaaacauucaugcgcauggcauggggcggauccuacaucgcccuugacuccggcugcgguaacugggacugcaucaugaccuccuaccaauaccucaucauccaaaacaccacaugggacgaccacugccaauucagcagacccagcccuauaggcuaccuaggccuacucucacaacgcacccgcgacguuuacaucagccgacgacgccgcggaaccuucaccuggacccucuccgacagcgagggcaaagacaccccaggcggcuacugccucacccgcuggaugcucauagaagccgaauuaaaaugcuucggcaacaccgccguagccaaaugcaacgaaaaacacgacgaagaguucugcgacaugcuccgccucuucgacuucaacaaacaagccauucaacgucucaaagcccccgcccaaauguccauccaacucauaaacaaagccguaaacgcccucaucaacgaccaacucaucaugaaaaaccaucugcgagacaucaugugcaucccguacugcaauuacucaaaauacugguaccuaaacaacaccgcuacaggcaaaacaucccuccccaaaugcuggcucaucuccaacggauccuaucuaaacgaaacccacuucuccgacgacaucgaacaagaagccgauaacaugaucaccgaaaugcuccaaaaagaauacauggaacgccaagguaaaacuccccucggccuugucgaccuauucguuuucucaaccucauuuuaccucauauccauauuccuccaccuaguuaaaauacccacccaccgccacaucgucggaaaauccugccccaaaccccaccgccucaaccacaugggcaucugcucaugcggucuauacaaacaacccggaguaccaguccgcuggaaacgcuaaggacuaguuauaagacugacuagcccgaugggccucccaacgggcccuccuccccuccuugcaccgagauuaauaaaaaaaaaaaaaaaaaaaaaaaaaaaaaaaaaaaaaaaaaaaaaaaaaaaaaaaaaaaaaaaaugcaucccccccccccccccccccccccccccccccaaaggcucuuuucagagccaccagaauu

SEQ ID NO: 7539 - RNA, 1693 nt, Artificial Sequence
  mRNA product Design i-3 comprising derived and/or modified sequence from LASV(G3010-SLE-2013;Clade IV)__AIT17344__GPCstabilized (opt11)
gggagaaagcuuaccaugggccagauagucaccuucuuucaagaagucccccacguaauagaagaggucaugaacaucguccuaauagcccucucaauccuagccguccuaaaaggccuauacaacuucgccacaugcggccuagucggccuaguaaccuuccuccuacugugcggccgcucuugcacgaccagccucuacaaaggagucuacgaacuacaaacccucgaacucaacauggaaacccuaaacaugaccaugccccucuccugcaccaaaaacaacucccaccacuacaucauggucggaaacgaaacaggccuagaacucacccuaaccaacaccucaauaaucaaccacaaguucugcaaccucucagacgcccauaagaaaaaccuauacaaccacgcacuaauguccaucauuuccaccuuucaccuaucuauccccaacuucaaccaauacgaagccaugucuugcgacuucaauggcggcaaaaucucaguccaauauaaccucagucacuccuacgccggagacgcagccucccacugcggcaccgucgccaacggcguacuccaaaccuucaugaggauggcauggggcggaagcuacaucgcccucgacuccggcugcggcaaaugggauugcaucaugacauccuaccaauaucucaucauacaaaacaccaccugggaggaccacugccaauucucccgccccagccccaucgguuaccucggccuacucucccagcgcacccgcgacaucuacaucucccgcagacgccgcggaaccuucaccuggacccuuuccgacuccgaaggcaaagacacacccggcggcuacugccucacucgauggaugcucaucgaagccgaacugaaaugcuuuggcaacacugccgucgccaaaugcaacgagaaacacgacgaagaauuuugcgacaugcuccgccucuucgacuucaacaaacaagccauucaacgccuuaaaacccccgcgcaaauguccauacaacucaucaacaaggccguaaacgcacucaucaaugaccaacuaaucaugaagaaccaccuccgagacauaaugugcauccccuacugcaacuacuccaaauacugguaucucaaccacacaacaaccggcaagaccucccuccccaaauguuggcucguaucaaacggauccuaccucaacgaaacccacuucuccgacgacaucgaacaacaagcagacaacaugaucaccgagaugcuacaaaaggaauacauggaacgccaaggaaaaacgccccuaggacucgucgaccucuucguauucagcaccuccuucuaccugaucuccaucuuccuccaucuugucaaaaucccaacccaccgccacaucgucggcaagucaugccccaaaccacaccgacuaaaccacaugggaauauguucaugcggccucuacaaacagccgggcguccccgugcgcuggaaaagaugaggacuaguuauaagacugacuagcccgaugggccucccaacgggcccuccuccccuccuugcaccgagauuaauaaaaaaaaaaaaaaaaaaaaaaaaaaaaaaaaaaaaaaaaaaaaaaaaaaaaaaaaaaaaaaaaugcaucccccccccccccccccccccccccccccccaaaggcucuuuucagagccaccagaauu

SEQ ID NO: 7540 - RNA, 1693 nt, Artificial Sequence
  mRNA product Design i-3 comprising derived and/or modified sequence from LASV(G502-SLE-2009;Clade IV)__AIT17126__GPCstabilized (opt11)
gggagaaagcuuaccaugggccaaaucgucaccuucuuucaagaagucccccacguuaucgaagaaguuaugaacaucguacucaucgcccucuccauccuagccgucuuaaaagggcucuacaacuucgcaaccugcggccucguaggccuacucaccuuccugcuccucugcggccgaucaugcacaaccggacuuuacaagggcguauacgaacugcaaacccucgaacuaaacauggaaacccucaacaugacuaugccccucuccugcaccaaaaacaacagccaccacuacauaauggucggcaacgaaacaggacuagagcucacccuaaccaacaccucgaucaucaaccacaaguucugcaaccuauccgacgcccacaagaaaaaccucuacgaccacgcgcucauguccauaaucuccaccuuccaccugucaauacccaacuucaaucaauacgaagcaauguccugcgacuucaacggaggcaaaaucuccguacaauacaaucugucccacuccuacgccggagacgccgccgaccacugcggcacaguagccaacggcguacuccaaacuuucaugcgaauggcauggggcggcuccuacaucgcucucgacucaggcugcggacgaugggacugcaucaugaccucauaccaauaccuaaucauccaaaacaccaccugggaagaccacugccaauucucccgacccucgccaaucggauaccugggccugcucucccaacgcacccgcgacaucuacauuucccgccgcagacgcggaaccuucaccuggacccucagcgacuccgagggcaaagacacacccgguggcuacugccuaacacgcuggaugcugaucgaagccgaacucaaaugcuucggaaacaccgccguugcaaaaugcaacgaaaaacacgacgaagaguucugcgacaugcuccgacucuucgacuucaacaaacaagccauacaacgccucaaagcccccgcccaaauguccauacaacucauaaauaaagccgucaacgcccucaucaacgaccagcuaguaaugaaaaaucaccuccgagacaucaugugcauaccauacugcaacuacuccagauacugguaccuaaaccacaccaccaccggccgcaccucccucccuaagugcuggcuaguauccaacggcucauaccucaacgaaacacacuucucagacgacaucgagcaacaagccgacaacaugaucacggaaaugcuacaaaaagaauacauggaacgccaaggaaaaaccccacucggccucgucgaccucuucgucuucuccacuucauucuaccuaaucucaaucuuccuacaccucguaaaaaucccuacccacagacacaucguaggcaaauccugccccaaaccccaccgacuaaaccacaugggaauaugcucuugcggacucuacaaacaacccggcguacccguaaaauggaaaagauaaggacuaguuauaagacugacuagcccgaugggccucccaacgggcccuccuccccuccuugcaccgagauuaauaaaaaaaaaaaaaaaaaaaaaaaaaaaaaaaaaaaaaaaaaaaaaaaaaaaaaaaaaaaaaaaaugcaucccccccccccccccccccccccccccccccaaaggcucuuuucagagccaccagaauu

SEQ ID NO: 7541 - RNA, 1693 nt, Artificial Sequence
  mRNA product Design i-3 comprising derived and/or modified sequence from LASV(G733-SLE-2010;Clade IV)__AIT17154__GPCstabilized (opt11)
gggagaaagcuuaccaugggccaaaucguaaccuucuuucaagaagucccccacgucaucgaagaaguuaugaacauaguucuaaucgcccuaucaauccucgccguccucaaaggccucuacaacuucgcaaccugcggaaucguuggucuuguaucauuccuccuacuuugcggacgguccugcaccacuucccuuuacaaaggagucuacgaacuccaaacccucgaacucaacauggaaacccuaaacaugaccaugccccucucaugcaccaagaacaacucccaccacuacaucauggucggcaacgaaaccggccucgagcucacccugacaaacacaucaaucauuaaccacaaguucugcaaccuuuccgacgcccacaagaaaaaccucuacgaccacgcccucauguccauaauauccaccuuccaccucuccauccccaacuucaaccaauacgaagccauguccugcgacuucaacggcggaaaaaucucaguccaauacaaccucucccacuccuaugccggagacgccgccaaccacugcggcaccauagcaaacggcguccuccaaaccuucaugcgcauggccuggggcggcagcuacauagcccucgacagcggcugcgaccgaugggacugcauuaugacuucauaccaauaccuaaucauccaaaacacaaccugggaagaccacugccaauucucacgccccucccccauaggauaccucggccuacuaucccaacgcacccgcgacaucuacaucucccgacgccgccgaggcacguuuaccuggacauuguccgacuccgagggcaaagacacacccggcggcuacugccuaacccgauggaugcucaucgaagccgaacucaaaugcuucggcaacaccgccgucgccaaaugcaaugagaaacacgacgaagaguucugcgauaugcuccgccuauucgacuucaacaaacaagcuauccaacgccucaaagcucccgcccaaaugagcauccaacucaucaacaaagccguuaacgcccucaucaacgaccaacucauaaugaaaaaccaccuccgggacaucaugugcauccccuacugcaacuacaguaaauacugguaccuuaaccacaccacaacaggaaagaccuccuuacccaaaugcuggcucguauccaacggauccuaccuaaacgaaacacauuucuccgacgacaucgaacaacaagccgacaacaugaucacagaaaugcuccaaaaagaauacauggaacgccaaggaaaaaccccacuuggccucgucgaccuauucguauuuagcaccucuuucuaccucaucuccaucuuccuccaccuagucaagauacccacccaccgccacgucgucggcaaaagcugccccaaaccccaccgacuuaaccacaugggcauaugcuccugcggacucuauggccaacccggcguccccguuaaguggaaaagguaaggacuaguuauaagacugacuagcccgaugggccucccaacgggcccuccuccccuccuugcaccgagauuaauaaaaaaaaaaaaaaaaaaaaaaaaaaaaaaaaaaaaaaaaaaaaaaaaaaaaaaaaaaaaaaaaugcaucccccccccccccccccccccccccccccccaaaggcucuuuucagagccaccagaauu

SEQ ID NO: 7542 - RNA, 1693 nt, Artificial Sequence
  mRNA product Design i-3 comprising derived and/or modified sequence from MOPV/LASV reassortant(IGS-1;Clade IV)__AFY05576__GPCstabilized (opt11)
gggagaaagcuuaccaugggccaaaucgucaccuucuuccaagaagucccacacgucauagaagaagucaugaauaucguccuuaucgcacuauccguacuagcaguccuuaaaggacuuuacaacuucgcaaccugcggccugguaggccuaguaaccuuccuccuccucugcggacgcucaugcaccaccagccucuacaaaggaguauacgaacuacaaacccucgaacucaacauggaaacccuuaacaugaccaugccccucuccugcacaaagaacaacucccaccacuauauaauggucggcaacgaaacaggccuggaacucacccuaacaaacaccuccauaaucaaccacaaauucugcaaccucuccgacgcccacaagaaaaaccuauacgaccacgcccuaaugucgauaaucuccacauuccaccucagcaucccaaacuucaaccaauacgaagccauguccugcgacuucaacggcggcaaaaucucuguccaauacaaccuaucacacuccuacgccggugacgccgccaaccauugcgggaccgucgccaacggcguccuccaaaccuucaugagaauggccuggggcggaucguacaucgcccuagacagcggaugcgguaacugggacugcaucaugaccagcuaccaauaccucaucauacaaaacacuaccugggaggaccacugccaguucucacgccccuccccuauaggcuaccucggccugcucagccaacgcacccgcgacauauacaucucccgacgacgacgaggcaccuucaccuggacacucuccgauuccgaaggcgaagacaccccuggcggauacugccugacacgauggaugcucauagaggccgaacucaaaugcuucggcaacacagcagucgcaaaaugcaacgaaaaacacgacgaagaguucugcgacaugcuccgccuauucgacuucaacaaacaagccauccaacgauuaaaagccccagcccaaauguccauacaacucaucaacaaagccgucaacgcacuaauaaacgaccagcuaaucaugaaaaaccaccuccgagacaucaugugcauaccauacugcaacuacuccaaauacugguaccucaaccacacaaccacuggacgcaccucucuccccaaaugcuggcucgucucaaacggcagcuaccuuaacgaaacccacuucuccgacgacaucgaacaacaagccgacaacaugaucaccgaaaugcuacaaaaagaauacauggaaagacagggcaagacaccccucggccuagucgaccucuucguauucuccaccuccuucuaccuaaucucaaucuuccuacaccuagucaaaauccccacccaccgccacauaguaggcaaauccugccccaaaccccaucgccucaaccacaugggcauaugcucaugcggucucuacaaacaacccggcguccccgucaaguggaaacgaugaggacuaguuauaagacugacuagcccgaugggccucccaacgggcccuccuccccuccuugcaccgagauuaauaaaaaaaaaaaaaaaaaaaaaaaaaaaaaaaaaaaaaaaaaaaaaaaaaaaaaaaaaaaaaaaaugcaucccccccccccccccccccccccccccccccaaaggcucuuuucagagccaccagaauu

SEQ ID NO: 7543 - RNA, 1693 nt, Artificial Sequence
  mRNA product Design i-3 comprising derived and/or modified sequence from LASV(LM765-SLE-2012;Clade IV)__AIT17814__GPCstabilized (opt11)
gggagaaagcuuaccaugggacaaaucgucaccuucuuccaagaagucccgcacgucaucgaggaagucaugaacauaguccucauagcccucucgauacuagccguccuaaaaggccuauacaacuucgcaaccugcggccucguaggccucgucaccuuccuccuccucugcggccgaucguguaccaccucacuauacaaaggagucuacgaacuccaaacucuggaacuuaacauggagacccucaacaugaccaugccccucuccugcaccaaaaacaauucccaccauuacaucauggucggaaacgaaacaggacucgaacuaacccucacgaacacuuccaucauagaucacaaauucugcaaccucagcgacgcccaccgcaaaaaccucuacgaccacgccuuaaugagcaucaucucaacauuccacuuauccauacccaacuucaaccaauacgaagccaugucaugcgauuucaacggcggcaaaaucucaguccaauacaaccuaucccacucuuacgccaaagacgccgccgaccacugcggcacagucgccaacggcguccuccaaaccuucaugcgcauggccuggggcggaagcuacaucgcacucgacucaggcugcggccgcugggacugcauaaugacauccuaccaguaccuuauaauccaaaacacaacaugggaagaccacugucaauucagcagacccagccccaucggauaccuaggccuacucucccaacgcacacgcgacauauacauaucacgccgccgucgcggcaccuucacauggacccuaucagauuccgagggcaaagacacacccggaggcuacugccucacucguuggaugcuaaucgaagcugaacucaaaugcuucgguaacacugccgucgccaaaugcaaugaaaaacacgacgaagaauuuugcgacaugcuccgccucuucgacuucaacaaacaagccauacagcgacuaaaggcccccgcccaaauguccauucaacugaucaacaaagccgucaacgcccuaaucaacgaccaacucaucaugaaaaaccaccuccgcgacauaaugugcaucccauacugcaacuacuccaaguacugguaccuaaaccacaccaccaccggcaaaaccucccuccccaaaugcuggcucgucucuaacggaucuuaccuuaacgaaacccacuucucagacgauaucgagcaacaagcugacaacaugaucaccgaaaugcuccaaaaagaauacauggaaagacaaggcaaaacaccccuaggacucgucgaccucuucgucuucucuaccuccuucuaccucauaucaaucuuucuccaccucgucaagaucccuacccaccgccacaucgucggcaaaccaugccccaaaccccaccgccucaaccacaugggcauaugcuccugcggccucuacaaacagccaggcgucccggucaaauggaaacgauagggacuaguuauaagacugacuagcccgaugggccucccaacgggcccuccuccccuccuugcaccgagauuaauaaaaaaaaaaaaaaaaaaaaaaaaaaaaaaaaaaaaaaaaaaaaaaaaaaaaaaaaaaaaaaaaugcaucccccccccccccccccccccccccccccccaaaggcucuuuucagagccaccagaauu

SEQ ID NO: 7544 - RNA, 1693 nt, Artificial Sequence
  mRNA product Design i-3 comprising derived and/or modified sequence from LASV(LM776-SLE-2012;Clade IV)__AIT17824__GPCstabilized (opt11)
gggagaaagcuuaccaugggccaaaucgucacauucuuccaagaagucccccacgucaucgaagaagucaugaacaucguccucaucgcccucucaauccuagccguccucaaaggccuauacaacuucgcuaccugcggccucgucggccucguaaccuuccuccuccuaugcggccgaucuugcaccaccucugucuacaaaggagucuacgaacuccaaacacucgaacuaaacauggaaacccugaacaugacaaugccccucuccuguaccaagaacaacucccaccacuacaucaugguuggcaacgaaaccggccuagaacuuacccucaccaacacuucaaucauaaaccacaaauucugcaaccucuccgacgcccacaagaaaaaccucuacgaccacgcacucauguccaucaucucaaccuuccaccucagcaucccaaacuucaaccaauacgaagccaugucaugcgacuucaacggcggcaaaaucucuguacaauacaaccuaucccacuccuacgccggcgacgcagccaaccacuguggaaccgucgcaaacggcguccuacagacguucaugcgcauggccuggggcggcucauauaucgcccucgacuccggaugcggcaaaugggacugcaucaugaccucauaccaauaccucauaauacaaaacaccacaugggaagaccauugccaguuuucccgcccuuccccgauaggauaccucggccuccuaucccaacgcacccgcgacauuuacaucucacgccgccgccgaggcacauuuacauggacccucucugacuccgaaggcaaagacacccccggaggcuacugccuaacucgcuggaugcucauagaggccgaacucaaaugcuucggcaacacagccguagccaaaugcaacgaaaaacacgaugaagaguucugcgauaugcuccgccucuucgacuucaacaaacaagcaauccaaagacuaaaagcccccgcacaaaugagcauucaacucaucaacaaagcagucaacgcccuuauaaacgaccaacuaaucaugaaaaaccaucuacgcgacaucaugugcauccccuacugcaacuacucaaaauacugguaccuaaaccacacaacaacuggcaaaaccagccuccccaaauguuggcucgucucuaacggcucauaccucaacgaaacccacuucucagacgacaucgaacaacaagccgacaacaugaucaccgaaaugcuccaaaaagaauacauggaacgccagggcaaaacuccacucggccuaguagaccucuucgucuucuccacaaguuucuaccucaucuccauauuccuacaccuagucaaaauccccacccaccgacacaucguaggcaaaucuugccccaaaccucaucgccuaaaccacaugggaaucugcagcugcggucucuacaaacaacccggcgucccaguccgauggaaacgauaaggacuaguuauaagacugacuagcccgaugggccucccaacgggcccuccuccccuccuugcaccgagauuaauaaaaaaaaaaaaaaaaaaaaaaaaaaaaaaaaaaaaaaaaaaaaaaaaaaaaaaaaaaaaaaaaugcaucccccccccccccccccccccccccccccccaaaggcucuuuucagagccaccagaauu

SEQ ID NO: 7545 - RNA, 1693 nt, Artificial Sequence
  mRNA product Design i-3 comprising derived and/or modified sequence from LASV(Mad39;Clade IV)__ANH09722__GPCstabilized (opt11)
gggagaaagcuuaccaugggccaaaucgucacauucuuccaagaagucccccacgucaucgaagaagucaugaacaucgugcuaauagcacucuccauccuagccguccuaaaaggccucuauaacgucgcaaccugcggccugaucggccuugucaccuuccuacuccucugcggacgauccuguaccaccacccuuuacaaaggcgucuacgaacuccaagcccucgaauuaaauauggaaacccugaacaugaccaugccccucuccugcaccaaaaauaacucccaucacuacauucgagucggcaacgaaaccggacucgaauuaacccucaccaacacaucccuaaucaaccacaaauucugcaaccucucagacgcccacaagaaaaaccucuacgaccacgcccuuauguccaucaucucaacauuccaccucucaauacccaacuucaaccaauacgaagcaauguccugcgacuucaacgacggcaaaaucucuguccaauacaaccucucacacaccuacgccggcgacacagcaaaccacugcggcaccgucgcaaacggcguacuccaaacauucaugcgaauggcuuggggcggauccuacaucgcacuagacucaggaugcggcggcugggacuguaucaugacauccuaccaauacuuaaucauacaaaacacuaccugggaagaccacugucaauucucacgucccucuccgaucggcuaccucggccuccucucccaacgaacccgcgacaucuauaucucccgccgccgccgcggcaccuucacauggacgcuaagcgauucagagggcaaagacacccccggcggcuacugccugacccgcuggaugcuuaucgaagcagaacucaaaugcuucggcaacacagcagucgccaaaugcaacgaaaaacacgacgaggaguucugcgacaugcuccgccuauucgacuucaacaaacaagccauccaacgccucaaagccccagcacaaauguccauucaacuaaucaacaaagccguaaaugcccucaucaacgaccaacucauuaugaaaaaccaccuucgugacaucaugugcauaccauacugcaacuacuccaaauacugguaccucaaccacaccguuaccggcaaaaccucacucccaaaaugcuggcucgucuccaauggcucguaccuaaacgaaacccacuucagcgacgacaucgaacaacaagccgacaacaugaucaccgaaaugcuacaaaaagaauacauggaacgccaaggcaagacaccccugggccuaguggaccuuuucgucuucuccaccuccuucuaccucauauccauauuccuccaccucgucaaaaucccaacacaccgccacguaguaggaaaacccugcccaaaaccccaccgccucaaccacaugggcaucugcagcugcggauucuacaaacaaccuggcgucccaguccguuggaaacgauaaggacuaguuauaagacugacuagcccgaugggccucccaacgggcccuccuccccuccuugcaccgagauuaauaaaaaaaaaaaaaaaaaaaaaaaaaaaaaaaaaaaaaaaaaaaaaaaaaaaaaaaaaaaaaaaaugcaucccccccccccccccccccccccccccccccaaaggcucuuuucagagccaccagaauu

SEQ ID NO: 7546 - RNA, 1693 nt, Artificial Sequence
  mRNA product Design i-3 comprising derived and/or modified sequence from LASV(Z0947-SLE-2011;Clade IV)__AIT17840__GPCstabilized (opt11)
gggagaaagcuuaccaugggucaaaucgucacauuuuuccaagaagucccacacguaauagaagaagucaugaacaucguacuuauagcacucuccauccuugcaguccuuaaaggccucuauaacuucgccacuugcggacucgucggccuaguaacauuccuacuacuguguggccgcuccugcaccaucucacucuacaagggcguauacgaacuccaaacacuugaacucaacauggaaacccuaaacaugaccaugccccucuccugcaccaaaaacaacucucaccacuacauaauggucggaaacgaaacaggacuagaacucacccucaccaacaccucaauaaucaaccacaaauucugcaaccuuuccgaugcacacaagaaaaaccucuacgaccacgcacucauguccauaaucuccaccuuccaccucucaauccccaacuucaaccaauacgaagcaaugucgugcgacuucaacggcgggaaaaucuccguccaauacaaccucucccacuccuacgcuggagacgccgcaaaccacugcgguaccguggccaacgguguccuccagaccuucaugcgcauggccuggggcggauccuacauagcccucgacucagguugugaccgaugggauugcaucaugacauccuaccaauaccucaucauccaaaacaccaccugggaagaccacugccaauucucccgucccucccccauaggcuaccucggccuccucucccaacgcacccgcgauaucuacaucagccgccgacgccgcggcaccuucaccuggacccuuucugacuccgaaggaaaagacacccccggcggcuacugccuaacucgauggaugcucaucgaagccgaacuaaaaugcuucggcaacaccgccgucgccaaaugcaacgaaaaacacgacgaagaguucugcgacaugcuucgccucuucgacuucaacaaacaagccauccagcgccucaaagcccccgcacaaauguccauacaacuaaucaacaaagccgucaacgcccuaauaaacgaccaacucaucaugaaaaaccaccuccgcgauauaaugugcauuccauacugcaacuacuccaaauacugguaucuaaaccacacaaccaccggcaaaaccucccuacccaaaugcuggcucgucuccaacggaucguaucuaaacgaaacucacuucuccgacgacaucgaacaacaagccgacaacaugaucacugagaugcuccagaaagaauacauggaacgacaaggcaaaacaccacuaggccucgucgaccucuucgucuucuccacauccuucuaccucaucucaaucuuccuccaccucguaaaaaucccaacccaccgccacaucgucggaaaacccugccccaagccacaccgccuaaaccacaugggcaucugcuccugcggacucuacaagcaacccggaguacccgucaaauggaaacgauagggacuaguuauaagacugacuagcccgaugggccucccaacgggcccuccuccccuccuugcaccgagauuaauaaaaaaaaaaaaaaaaaaaaaaaaaaaaaaaaaaaaaaaaaaaaaaaaaaaaaaaaaaaaaaaaugcaucccccccccccccccccccccccccccccccaaaggcucuuuucagagccaccagaauu

SEQ ID NO: 7547 - protein, 569 aa, Artificial Sequence
  derived and/or modified protein sequence (wt) from LASV(Josiah;Clade IV)__NP_694869__NP
MSASKEIKSFLWTQSLRRELSGYCSNIKLQVVKDAQALLHGLDFSEVSNVQRLMRKERRDDNDLKRLRDLNQAVNNLVELKSTQQKSILRVGTLTSDDLLILAADLEKLKSKVIRTERPLSAGVYMGNLSSQQLDQRRALLNMIGMSGGNQGARAGRDGVVRVWDVKNAELLNNQFGTMPSLTLACLTKQGQVDLNDAVQALTDLGLIYTAKYPNTSDLDRLTQSHPILNMIDTKKSSLNISGYNFSLGAAVKAGACMLDGGNMLETIKVSPQTMDGILKSILKVKKALGMFISDTPGERNPYENILYKICLSGDGWPYIASRTSITGRAWENTVVDLESDGKPQKADSNNSSKSLQSAGFTAGLTYSQLMTLKDAMLQLDPNAKTWMDIEGRPEDPVEIALYQPSSGCYIHFFREPTDLKQFKQDAKYSHGIDVTDLFATQPGLTSAVIDALPRNMVITCQGSDDIRKLLESQGRKDIKLIDIALSKTDSRKYENAVWDQYKDLCHMHTGVVVEKKKRGGKEEITPHCALMDCIMFDAAVSGGLNTSVLRAVLPRDMVFRTSTPRVVL

SEQ ID NO: 7548 - protein, 569 aa, Artificial Sequence
  derived and/or modified protein sequence (wt) from LASV(LP;Clade I)__AAF86702__NP
MSNSKEIKSFLWTQSLRRELSGYCSNIKLQVVKDAQALLHGLDFSEVSNVQRLMRKQKRDDADLKRLRDLNQAVNNLVELKSTQQKNVLRVGTLSSDDLITLAADLEKLKSKVIRTERPLSSGVYMGNLSSQQLDQRRALLSMIGMSGGPQGNRTGGDGVVRVWDVKNAELLNNQFGTMPSLTLACLTKQGQVDLNDAVQALTDLGLIYTAKYPNSSDLDMLTQSHPILGMVDTKKSSLNISGYNFSLGAAVKAGACMLDGGNMLETIKVSPQTMDGILKSILKVKRSLGMFISDTPGERNPYENILYKICLSGEGWPYIASRTSITGRAWENTLVDLESDNKPPKLNSAGSNKSLQAAGLNAGLTYSQLMTLKDCMLQLDPSSKTWIDIEGRPEDPVEIALFQPSSGCYIHFFREPTDLKQFKQDAKYSHGIDVTDLFSTQPGLTSAVIEALPRNMVLTCQGSDDIKKLLESQGRRDIKLIDISLSKADSRKFENAVWDQYKDLCHMHTGVVVEKKKRGGKEEITPHCALLDCIMFDAATTGSLNITTLRAVLPRDMVFRTSTPKVVL

SEQ ID NO: 7549 - protein, 569 aa, Artificial Sequence
  derived and/or modified protein sequence (wt) from LASV(803213;Clade II)__AAF86704__NP
MSASKEVKSFLWTQSLRRELSGYCSNIKLQVVKDAQALLHGLDFSEVNNVQRLMRKQKRDDGDLKRLRDLNQAVNNLVELKSTQQKSILRVGTLTSDDLLTLAADLEKLKSKVIRTERPLSSGVYMGNLSTQQLEQRRALLNMIGMVGGAQGTQPGRDGVVRVWDVKNPDLLNNQFGTMPSLTLACLTKQGQVDLNDAVLALTDLGLIYTAKYPNSSDLDRLSQSHPILNMVDTKKSSLNISGYNFSLGAAVKAGACMLDGGNMLETIKVTPQTMDGILKSILKVKRSLGMFVSDTPGERNPYENILYKICLSGDGWPYIASRTSIVGRAWENTTVDLESDGKPQKVGTAGSNKSLQSAGFPTGLTYSQLMTLKDSMMQLDPSAKTWIDIEGRPEDPVEIALYQPMSGCYIHFFREPTDLKQFKQDAKYSHGIDVADLFPAQPGLTSAVIEALPRNMVLTCQGSDDIKKLLDSQGRRDIKLIDISLSKVDSRKFENAVWDQCKDLCHMHTGVVVEKKKRGGKEEITPHCALMDCIMFDAAVSGGLNIPVLRAVLPRDMVFRTSSPKVVL

SEQ ID NO: 7550 - protein, 570 aa, Artificial Sequence
  derived and/or modified protein sequence (wt) from LASV(GA391;Clade III)__CAA36646__NP
MSASKEVRSFLWTQSLRRELSGYCSNIKLQVVKDAQALLHGLDFSEVSNVQRLMRKQKRDDGDLKRLRDLNQAVNNLVELKSTQQKSVLRVGTLSSDDLLILAADLEKLKSKVTRTERPLSSGVYMGNLSSQQLDQRRALLNMIGMTGVSGGGKGASDGIVRVWDVKNAELLNNQFGTMPSLTLACLTKQGQVDLNDAVQALTDLGLIYTAKYPNSSDLDRLSQSHPILNMIDTKKSSLNISGYNFSLGAAVKAGACMLDGGNMLETIKVSPQTMDGILKSILKVKKSLGMFVSDTPGERNPYENILYKICLSGDGWPYIASRTSIVGRAWENTVVDLEQDNKPQKIGNGGSNKSLQSAGFAAGLTYSQLMTLKDFKCFNLIPNAKTWMDIEGRPEDPVEIALYQPSSGCYVHFFREPTDLKQFKQDAKYSHGIDVTDLFAAQPGLTSAVIEALPRNMVITCQGSEDIRKLLESQGRRDIKLIDITLSKADSRKFENAVWDQFKDLCHMHTGVVVEKKKRGGKEEITPHCALMDCIMFDAAVSGGLDAKVLRVVLPRDMVFRTSTPKVVL

SEQ ID NO: 7551 - protein, 569 aa, Artificial Sequence
  derived and/or modified protein sequence (wt) from LASV(AV;Clade V)__CCA30315__NP
MSASKEVKSFLWTQSLRRELSGYCSNIKLQVVKDAQALLHGLDFSEVSNVQRLMRKQRRDDSDLKRLRDLNQAVNNLVELKSTQQKSVLRVGTLSSDDLLTLAADLEKLKSKVTRTERPLSSGVYMGNLSSQQLDQRRALLNLIGMTNGSQGSQAGRDGVVRVWDVKNAELLNNQFGTMPSLTLACLTKQGQVDLNDVVQALTDLGLIYTAKYPNTSDLDRLTQSHPILNMIDTKKSSLNISGYNFSLGAAVKAGACMLDGGNMLETIKVSPQSMDGILKSILKVKRALGMFVSDTPGERNPYENILYKICLSGDGWPYIASRTSIVGRAWENTVVDLETDGKPQKIGSGNSNKSLQSAGFSAGLTYSQLMTLKDAMLQLDPNAKTWMDIEGRPEDPVEVALYQPISGCYIHFFREPTDLKQFKQDAKYSHGIDIADLFAAQPGLTSAVIEALPRNMVITCQGSEDIKKLLESQGRKDIKLIDIALSKIDSRKFENAVWDQYKDLCHMHTGVVVEKKKRGGKEEITPHCALMDCIMFDAAVSGGLNTLVLRAVLPRDMVFRTSTPRVVL

SEQ ID NO: 7552 - protein, 569 aa, Artificial Sequence
  derived and/or modified protein sequence (wt) from LASV(Togo/2016/7082;Clade VI)__AMR44578__NP
MSNSKEVKSFLWTQSLRRELSGYCSNIKLQVVKDAQALLHGLDFSEVSNVQRLMRKQKRDDGDLKRLRDLNQAVNNLVELKSVQQKSILRVGTLTSDDLLTLAADLEKLKSKVTRTERPLSSGVYMGNLSSQQLDQRRALLSMIGMSGGNQNSQPKGDGVVRVWDVKNADLLNNQFGTMPSLTLACLTKQGQVDLNDAVQALTDLGLIYTAKYPNSSDLDRLSQSHPILNMIDTKKSSLNISGYNFSLGAAIKTGACMLDGGNMLETIKVTPQTMDGILKSILKVKRSLGMFISDTPGERNPYENILYKICLSGDGWPYIASRTAIIGRAWENTVVDLESDSKPQKIGSNGSNKSLQSAGFAPGLTYSQLMTLKDSMLQLDPNAKTWIDIEGRPEDPVEVALFQPISGCYIHFFREPTDLKQFKQDAKYSHGIDVTDLFAAQPGLTSAVIEALPRNMVLTCQGSDDIKKLLDSQGRRDIKLIDVSLNKIDSRKFENAVWDQYKDLCHMHTGVVVEKKKKGGKEEITPHCALLDCIMFDAAVSGGLNATVLRAVLPRDMVFRTSSPKVVL

SEQ ID NO: 7553 - protein, 569 aa, Artificial Sequence
  derived and/or modified protein sequence (wt) from LASV(KAK-428;Clade n.d. (VII))__ANH09741__NP
MSNSKEVKSFLWTQSLRRELSGYCTNIKLQVVKDAQALLHGLDFSEVSNVQRLMRKQKRDDNDLKRLRDLNQAVNNLVELKSVQQKSVLKVGTLNSDDLLTLAADLEKLKSKVVRTERPLSSGVYMGNLSSQQLDQRRALLNMIGMAGGSQGNQPSRDGVVRVWDVKNADLLNNQFGTMPSLTLACLTKQGQVDLNDVVLALTDLGLIYTAKYPNSSDLDRLSQNHPVLNMIDVNKSSLNISGYNFSLGAAVKAGACMLDGGNMLETIKISPQTVDGILKSILKVKRALGMFVSDTPGERNPYENILYKVCLSGNGWPYIASRTSIVGRAWENTVVDLESNKNQPKVGNNGSNKMLQSSGFATGLTYSQLMTLRDSMLQLDPTAKTWIDIEGRPEDPVELALFQPSSGCYIHFFREPTDLKQFKQDAKYSHGIDVNDLFSAQPGLTSAVLEALPRNMVLTCQGSDDIRKLLDSQDRKDIKLIDISLSKADARKFENDVWDQFKDLCHMHTGIVVEKKKKGGKQEMTPHCALLDCIMFDAAVSGGLNVPTLRAVLPTDMVFRTITTKVVL

SEQ ID NO: 7554 - protein, 569 aa, Artificial Sequence; identical to SEQ ID NO: 7548
  derived and/or modified protein sequence (wt) from LASV(Pinneo-NIG-1969;Clade I)__AIT17837__NP

SEQ ID NO: 7555 - protein, 569 aa, Artificial Sequence
  derived and/or modified protein sequence (wt) from LASV(ISTH0009-NIG-2011;Clade II)__AIT17405__NP
MSVSKEVKSFLWTQSLRRELSGYCSNIKLQVVKDAQALLHGLDFSEVSNVQRLMRKQKRDDSDLKRLRDLNQAVNNLVELKSTQQKSILRVGTLTSDDLLTLAADLEKLKSKVIRTERPLSSGVYMGNLSTQQLEQRRALLNMIGMVGGAQGTQPGRDGVVRVWDVKNPDLLNNQFGTMPSLTLACLTKQGQVDLNDAVLALTDLGLIYTAKYPNSSDLDRLSQSHPILNMVDIKKSSLNISGYNFSLGAAVKAGACMLDGGNMLETIKVTPQTMDGILKSILKVKRSLGMFVSDTPGERNPYENILYKICLSGDGWPYIASRTSIVGRAWENTTVDLESDGKPQKVGSAGSNKSLQSAGFPTGLTYSQLMTLKDSMMQLDPSAKTWIDIEGRPEDPVEIALYQPMSGCYIHFFREPTDLKQFKQDAKYSHGIDVADLFPAQPGLTSAVIEALPRNMVLTCQGSDDIKRLLDSQGRRDIKLIDIALSKADSRRFENAVWDQCKDLCHMHTGVVVEKKKRGGKEEITPHCALMDCIMYDAAVSGGLNIPVLRAVLPRDMVFRTSSPKVVL

SEQ ID NO: 7556 - protein, 569 aa, Artificial Sequence
  derived and/or modified protein sequence (wt) from LASV(ISTH0012-NIG-2011;Clade II)__AIT17409__NP
MSASKEVKSFLWTQSLRRELSGYCSNIKLQVVKDAQALLHGLDFSEVSNVQRLMRKQKRDDGDLKRLRDLNQAVNNLVELKSTQQKSILRVGTLTSDDLLTLAADLEKLKSKVIRTERPLSSGVYMGNLSTQQLEQRRALLNMIGMVGGAQGTQPGRDGVVRVWDVKNPDLLNNQFGTMPSLTLACLTKQGQVDLNDAVLALTDLGLIYTAKYPNSSDLDRLSQSHPILNMVDTKKSSLNISGYNFSLGAAVKAGACMLDGGNMLETIKVTPQTMDGILKSILKVKKSLGMFVSDTPGERNPYENILYKICLSGDGWPYIASRTSIVGRAWENTTVDLESDGKPQKVGTAGSNKSLQSAGFPTGLTYSQLMTLKDSMMQLDPSAKTWIDIEGRPEDPVEIALYQPMSGCYIHFFREPTDLKQFKQDAKYSHGIDVTDLFSAQPGLTSAVIEALPRNMVLTCQGSDDIKRLLDSQGRRDIKLIDIALNKADSRRFENAVWDQCKDLCHMHTGVVVEKKKRGGKEEITPHCALMDCIMYDAAVSGGLNIPVLRAVLPRDMVFRTSSPKVVL

SEQ ID NO: 7557 - protein, 569 aa, Artificial Sequence
  derived and/or modified protein sequence (wt) from LASV(ISTH0047-NIG-2011;Clade II)__AIT17413__NP
MSASKEVKSFLWTQSLRRELSGYCSSIKLQVVKDAQALLHGLDFSEVSNVQRLMRKQKRDDSDLKRLRDLNQAVNNLVELKSTQQKSILRVGTLTSDDLLTLAADLEKLKSKVIRTERPLSSGVYMGNLSTQQLEQRRALLNMIGMVGGAQGTQPGRDGVVRVWDVKNPDLLNNQFGTMPSLTLACLTKQGQVDLNDAVLALTDLGLIYTAKYPNSSDLDRLSQSHPILNMVDTKKSSLNISGYNFSLGAAVKAGACMLDGGNMLETIKVTPQTMDGILKSILKVKRSLGMFVSDAPGERNPYENILYKICLSGDGWPYIASRTSIVGRAWENTTVDLESDGKPQKMGTAGSNKSLQSAGFPTGLTYSQLMTLKDSMMQLDPSAKTWIDIEGRPEDPVEIALYQPMSGCYIHFFREPTDLKQFKQDAKYSHGIDVADLFPAQPGLTSAVIEALPRNMVLTCQGSDDIKKLLDSQGRRDIKLIDIALSKADSRRFENAVWDQCKDLCHMHTGVVVEKKKRGGKEEITPHCALMDCIMYDAAVSGGLNIPVLRAVLPRDMVFRTSSPKVVL

SEQ ID NO: 7558 - protein, 569 aa, Artificial Sequence
  derived and/or modified protein sequence (wt) from LASV(ISTH0230-NIG-2011;Clade II)__AIT17421__NP
MSASKEVKSFLWTQSLRRELSGYCSNIKLQVVKDAQALLHGLDFSEVSNVQRLMRKQKRDDSDLKRLRDLNQAVNNLVELKSTQQKSILRVGTLTSDDLLTLAADLEKLKSKVIRTERPLSSGVYMGNLSTQQLEQRRALLNMIGMVSGAQGTQPGRDGVVRVWDVKNPDLLNNQFGTMPSLTLACLTKQGQVDLNDAVLALTDLGLIYTAKYPNSSDLDRLSQSHPILNMVDIKKSSLNISGYNFSLGAAVKAGACMLDGGNMLETIKVTPQTMDGILKSILKVKRSLGMFVSDTPGERNPYENILYKICLSGDGWPYIASRTSIVGRAWENTTVDLESDGKPQKMGSAGSNKSLQSAGFPTGLTYSQLMTLKDSMMQLDPSAKTWIDIEGRPEDPVEIALYQPMSGCYIHFFREPTDLKQFKQDAKYSHGIDVADLFPAQPGLTSAVIEALPRNMVLTCQGSDDIKRLLDSQGRRDIKLIDIALSKADSRRFENAVWDQCKDLCHMHTGVVVEKKKRGGKEEITPHCALMDCIMYDAAVSGGLNIPVLRAVLPRDMVFRTSSPKVVL

SEQ ID NO: 7559 - protein, 569 aa, Artificial Sequence
  derived and/or modified protein sequence (wt) from LASV(ISTH0531-NIG-2011;Clade II)__AIT17425__NP
MSASKEVKSFLWTQSLRRELSGYCSSIKLQVVKDAQALLHGLDFSEVSNVQRLMRKQKRDDSDLKRLRDLNQAVNNLVELKSTQQKSILRVGTLTSDDLLTLAADLEKLKSKVIRTERPLSSGVYMGNLSTQQLEQRRALLNMIGMVGGAQGTQPGRDGVVRVWDVKNPDLLNNQFGTMPSLTLACLTKQGQVDLNDAVLALTDLGLIYTAKYPNSSDLDRLSQSHPILNMVDTKKSSLNISGYNFSLGAAVKAGACMLDGGNMLETIKVTPQTMDGILKSILKVKKSLGMFVSDTPGERNPYENILYKICLSGDGWPYIASRTSIVGRAWENTIVDLESDGKPQKVGTAGSNKSLQSAGFPTGLTYSQLMTLKDSMMQLDPSAKTWIDIEGRPEDPVEIALYQPMSGCYIHFFREPTDLKQFKQDAKYSHGIDVADLFPAQPGLTSAVIEALPRNMVLTCQGSDDIKRLLDSQGRRDIKLIDIALSKADSRRFENAVWDQCKDLCHMHTGVVVEKKKRGGKEEITPHCALMDCIMYDAAVSGGLNIPVLRAVLPRDMVFRTSSPKVVL

SEQ ID NO: 7560 - protein, 569 aa, Artificial Sequence
  derived and/or modified protein sequence (wt) from LASV(ISTH0595-NIG-2011;Clade II)__AIT17429__NP
MSASKEVKSFLWTQSLRRELSGYCSNIKLQVVKDAQALLHGLDFSEVSNVQRLMRKQKRDDSDLKRLRDLNQAVNNLVELKSTQQKSILRVGTLTSDDLLTLAADLEKLKSKVIRTERPLSSGVYMGNLSAQQLEQRRALLNMIGMVGGAQGTQPGRDGVVRVWDVKNPDLLNNQFGTMPSLTLACLTKQGQVDLNDAVLALTDLGLIYTAKYPNSSDLDRLSQSHPILNMVDTKKSSLNISGYNFSLGAAVKAGACMLDGGNMLETIKVTPQTMDGILKSILKVKRSLGMFVSDAPGERNPYENILYKICLSGDGWPYIASRTSIVGRAWENTTVDLESDGKPQKVGTAGSNKSLQSAGFPTGLTYSQLMTLKDSMMQLDPSAKTWIDIEGRPEDPVEIALYQPMSGCYIHFFREPTDLKQFKQDAKYSHGIDVADLFPAQPGLTSAVIEALPRNMVLTCQGSDDIKRLLDSQGRRDIKLIDIALSKADSRRFENAVWDQCKDLCHMHTGVVVEKKKRGGKEEITPHCALMDCIMYDAAVSGGLNIPVLRAVLPRDMVFRTSSPKVVL

SEQ ID NO: 7561 - protein, 569 aa, Artificial Sequence
  derived and/or modified protein sequence (wt) from LASV(ISTH0964-NIG-2011;Clade II)__AIT17431__NP
MSASKEVKSFLWTQSLRRELSGYCSNIKLQVVKDAQALLHGLDFSEVSNVQRLMRKQKRDDSDLKRLRDLNQAVNNLVELKSTQQKSILRVGTLTSDDLLTLAADLEKLKSKVIRTERPLSSGVYMGNLSTQQLEQRRALLNMIGMVGGAQGTQPGRDGVVRVWDVKNPDLLNNQFGTMPSLTLACLTKQGQVDLNDAVLALTDLGLIYTAKYPNSSDLDRLSQSHPILNMVDTKKSSLNISGFNFSLGAAVKAGACMLDGGNMLETIKVTPQTMDGILKSILKVKKSLGMFVSDTPGERNPYENILYKICLSGDGWPYIASRTSIVGRAWENTTVDLESDGKPQKVGTAGSNKSLQSAGFPTGLTYSQLMTLKDSMMQLDPSAKTWIDIEGRPEDPVEIALYQPMSGCYIHFFREPTDLKQFKQDAKYSHGIDVADLFPAQPGLTSAVIEALPRNMVLTCQGSDDIKRLLDSQGRRDIKLIDIALSKADSRRFENAVWDQCKDLCHMHTGVVVEKKKRGGKEEITPHCALMDCIMYDAAVSGGLNIPVLRAVLPRDMVFRTASPKVVL

SEQ ID NO: 7562 - protein, 569 aa, Artificial Sequence
  derived and/or modified protein sequence (wt) from LASV(ISTH1038-NIG-2011;Clade II)__AIT17439__NP
MSASKEVKSFLWTQSLRRELSGYCSSIKLQVVKDAQALLHGLDFSEVSNVQRLMRKQKRDDSDLKRLRDLNQAVNNLVELKSTQQKSILRVGTLTSDDLLTLAADLEKLKSKVIRTERPLSSGVYMGNLSTQQLEQRRALLNMIGMVGGAQGTQPGRDGVVRVWDVKNPDLLNNQFGTMPSLTLACLTKQGQVDLNDAVLALTDLGLIYTAKYPNSSDLDRLSQSHPILNMVDTKKSSLNISGFNFSLGAAVKAGACMLDGGNMLETIKVTPQTMDGILKSILKVKRSLGMFVSDTPGERNPYENILYKICLSGDGWPYIASRTSIVGRAWENTTVDLESDGKPQKMGTAGSNKSLQSAGFPTGLTYSQLMTLKDSMMQLDPSAKTWIDIEGRPEDPVEIALYQPVSGCYIHFFREPTDLKQFKQDAKYSHGIDVADLFSAQPGLTSAVIEALPRNMVLTCQGSDDIKRLLDSQGRRDIKLIDIALSKADSRRFENAVWDQCKDLCHMHTGVVVEKKKRGGKEEITPHCALMDCIMYDAAVSGGLNIPVFRAVLPRDMVFRTSSPKVVL

SEQ ID NO: 7563 - protein, 569 aa, Artificial Sequence
  derived and/or modified protein sequence (wt) from LASV(ISTH1048-NIG-2011;Clade II)__AIT17443__NP
MSASKEVKSFLWTQSLRRELSGYCSSIKLQVVKDAQALLHGLDFSEVSNVQRLMRKQKRDDSDLKRLRDLNQAVNNLVELKSTQQKSILRVGTLTSDDLLTLAADLEKLKSKVIRTERPLSSGVYMGNLSTQQLEQRRALLNMIGMVGGAQGTQPGRDGVVRVWDVKNPDLLNNQFGTMPSLTLACLTKQGQVDLNDAVLALTDLGLIYTAKYPNSSDLDRLSQSHPILNMVDTKKSSLNISGYNFSLGAAVKAGACMLDGGNMLETIKVTPQTMDGILKSILKVKRSLGMFVSDAPGERNPYENILYKICLSGDGWPYIASRTSIVGRAWENTTVDLESDGKPQKVGTAGSNKSLQSAGFPTGLTYSQLMTLKDSMMQLDPSAKTWIDIEGRPEDPVEIALYQPMSGCYIHFFREPTDLKQFKQDAKYSHGIDVADLFPAQPGLTSAVIEALPRNMVLTCQGSDDIKKLLDSQGRRDIKLIDIALSKADSRRFENAVWDQCKDLCHMHTGVVVEKKKRGGKEEITPHCALMDCIMYDAAVSGGLNIPVLRAVLPRDMVFRTSSPKVVL

SEQ ID NO: 7564 - protein, 569 aa, Artificial Sequence
  derived and/or modified protein sequence (wt) from LASV(ISTH1058-NIG-2011;Clade II)__AIT17447__NP
MSASKEVKSFLWTQSLRRELSGYCSNIKLQVVKDAQALLHGLDFSEVSNVQRLMRKQKRDDSDLKRLRDLNQAVNNLVELKSTQQKSILRVGTLTSDDLLTLAADLEKLKSKVIRTERPLSSGVYMGNLSTQQLEQRRALLNMIGMVGGAQGTQPGRDGVVRVWDVKNPDLLNNQFGTMPSLTLACLTKQGQVDLNDAVLALTDLGLIYTAKYPNSSDLDRLSQSHPILNMVDTKKSSLNISGYNFSLGAAVKAGACMLDGGNMLETIKVTPQTMDGILKSILKVKKSLGMFVSDTPGERNPYENILYKICLSGDGWPYIASRTSIVGRAWENTTVDLESDGKPQKVGTTGSNKSLQSAGFPTGLTYSQLMTLKDSMMQLDPSAKTWIDIEGRPEDPVEIALYQPMSGCYIHFFREPTDLKQFKQDAKYSHGIDVTDLFPAQPGLTSAVIEALPRNMVLTCQGSDDIKRLLDSQGRRDIKLIDIALSKADSRRFENAVWDQCKDLCHMHTGVVVEKKKRGGKEEITPHCALMDCIMYDAAVSGGLNIPVLRAVLPRDMVFRTSSPKVVL

SEQ ID NO: 7565 - protein, 569 aa, Artificial Sequence
  derived and/or modified protein sequence (wt) from LASV(ISTH1064-NIG-2011;Clade II)__AIT17451__NP
MSASKEVKSFLWTQSLRRELSGYCSNIKLQVVKDAQALLHGLDFSEVSNVQRLMRKQKRDDSDLKRLRDLNQAVNNLVELKSTQQKSILRVGTLTSDDLLTLAADLEKLKSKVIRTERPLSSGVYMGNLSTQQLEQRRALLNMIGMVGGAQGTQPGRDGVVRVWDVKNPDLLNNQFGTMPSLTLACLTKQGQVDLNDAVLALTDLGLIYTAKFPNSSDLDRLSQSHPILNMVDTKKSSLNISGYNFSLGAAVKAGACMLDGGNMLETIKVTPQTMDGILKSILKVKKSLGMFVSDTPGERNPYENILYKICLSGDGWPYIASRTSIVGRAWENTTVDLESDGKPQKVGTTGSNKSLQSAGFPTGLTYSQLMTLKDSMMQLDPSAKTWIDIEGRPEDPVEIALYQPMSGCYIHFFREPTDLKQFKQDAKYSHGIDVADLFPAQPGLTSAVIEALPRNMVLTCQGSDDIKRLLDSQGRRDIKLIDIALSKADSRRFENAVWDQCKDLCHMHTGVVVEKKKRGGKEEITPHCALMDCIMYDAAVSGGLNIPVLRAVLPRDMVFRTSSPKVVL

SEQ ID NO: 7566 - protein, 569 aa, Artificial Sequence
  derived and/or modified protein sequence (wt) from LASV(ISTH1069-NIG-2011;Clade II)__AIT17455__NP
MSASKEVKSFLWTQSLRRELSGYCSSIKLQVVKDAQALLHGLDFSEVSNVQRLMRKQKRDDSDLKRLRDLNQAVNNLVELKSTQQKSVLRVGTLTSDDLLTLAADLEKLKSKVIRTERPLSSGVYMGNLSTQQLEQRRALLSMIGMVGGAQGTQPGRDGVVRVWDVKNPDLLNNQFGTMPSLTLACLTKQGQVDLNDAVLALTDLGLIYTAKYPNSSDLDRLSQSHPILNMVDTKKSSLNISGYNFSLGAAVKAGACMLDGGNMLETIKVTPQTMDGILKSILKVKRSLGMFVSDTPGERNPYENILYKICLSGDGWPYIASRTSIVGRAWENTTVDLESDGKPQKVGTAGSNKSLQSAGFPTGLTYSQLMTLKDSMMQLDPSAKTWIDIEGRPEDPVEIALYQPMSGCYIHFFREPTDLKQFKQDAKYSHGIDVADLFPAQPGLTSAVIEALPRNMVLTCQGSDDIKRLLDSQGRRDIKLIDIALSKADSRRFENAVWDQCKDLCHMHTGVVVEKKKRGGKEEITPHCALMDCIMYDAAVSGGLNIPVLRAVLPRDMVFRTSSPKVVL

SEQ ID NO: 7567 - protein, 569 aa, Artificial Sequence
  derived and/or modified protein sequence (wt) from LASV(ISTH1096-NIG-2012;Clade II)__AIT17459__NP
MSASKEVKSFLWTQSLRRELSGYCSSIKLQVVKDAQALLHGLDFSEVSNVQRLMRKQKRDDSDLKRLRDLNQAVNNLVELKSTQQKSILRVGTLTSDDLLTLAADLEKLKSKVIRTERPLSSGVYMGNLSTQQLEQRRALLNMIGMVGGAQGTQPGRDGVVRVWDVKNPDLLNNQFGTMPSLTLACLTKQGQVDLNDAVLALTDLGLIYTAKYPNSSDLDRLSQSHPILNMVDTKKSSLNISGYNFSLGAAVKAGACMLDGGNMLETIKVTPQTMDGILKSILKVKRSLGMFVSDTPGERNPYENILYKICLSGDGWPYIASRTSIVGRAWENTTVDLESDGKPQKMGTAGSNKSLQSAGFPTGLTYSQLMTLKDSMMQLDPSAKTWIDIEGRPEDPVEIALYQPVSGCYIHFFREPTDLKQFKQDAKYSHGIDVADLFPAQPGLTSAVIEALPRNMVLTCQGSDDIKRLLDSQGRRDIKLIDIALSKADSRRFENAVWDQCKDLCHMHTGVVVEKKKRGGKEEITPHCALMDCIMYDAAVSGGLNIPVLRAVLPRDMVFRTSSPKVVL

SEQ ID NO: 7568 - protein, 569 aa, Artificial Sequence
  derived and/or modified protein sequence (wt) from LASV(ISTH1107-NIG-2012;Clade II)__AIT17463__NP
MSASKEVKSFLWTQSLRRELSGYCSSIKLQVVKDAQALLHGLDFSEVSNVQRLMRKHKRDDSDLKRLRDLNQAVNNLVELKSTQQKSILRVGTLTSDDLLTLAADLEKLKSKVIRTERPLSSGVYMGNLSTQQLEQRRALLNMIGMVGGAQSTQPGRDGVVRVWDVKNPDLLNNQFGTMPSLTLACLTKQGQVDLNDAVLALTDLGLIYTAKYPNSSDLDRLSQSHPILTMVDTKKSSLNISGFNFSLGAAVKAGACMLDGGNMLETIKVTPQTMDGILKSILKVKKSLGMFVSDTPGERNPYENILYKICLSGDGWPYIASRTSIVGRAWENTIVDLETDGKPQKVGTAGSSRSLQSAGFPTGLTYSQLMTLKDSMMQLDPSAKTWIDIEGRPEDPVEIALYQPMSGCYIHFFREPTDLKQFKQDAKYSHGIDVADLFPAQPGLTSAVIEALPRNMVLTCQGSDDIKKLLDSQGRRDIKLIDIALSKADSRRFENAVWDQCKDLCHMHTGVVVEKKKRGGKEEITPHCALMDCIMYDAAVSGGLNIPVLRAVLPRDMVFRTSSPKVVL

SEQ ID NO: 7569 - protein, 569 aa, Artificial Sequence
  derived and/or modified protein sequence (wt) from LASV(ISTH1111-NIG-2011;Clade II)__AIT17467__NP
MSASKEVKSFLWTQSLRRELSGYCSSIKLQVVKDAQALLHGLDFSEVSNVQRLMRKQKRDDSDLKRLRDLNQAVNNLVELKSTQQKSILRVGTLTSDDLLTLAADLEKLKSKVIRTERPLSSGVYMGNLSTQQLEQRRALLNMIGMVGGTQGTQPGRDGVVRVWDVKNPDLLNNQFGTMPSLTLACLTKQGQVDLNDAVLALTDLGLIYTAKYPNSSDLDRLSQSHPILNMVDTKKSSLNISGYNFSLGAAVKAGACMLDGGNMLETIKVTPQTMDGILKSILKVKKSLGMFVSDTPGERNPYENILYKICLSGDGWPYIASRTSIVGRAWENTTVDLESDGKPQKVGTAGSNKSLQSAGFPTGLTYSQLMTLKDSMMQLDPSAKTWIDIEGRPEDPVEIALYQPMSGCYIHFFREPTDLKQFKQDAKYSHGIDVADLFPAQPGLTSAVIEALPRNMVLTCQGSDDIKRLLDSQGRRDIKLIDISLSKADSRRFENAVWDQCKDLCHMHTGVVVEKKKRGGKEEITPHCALMDCIMYDAAVSGGLNIPVLRAVLPRDMVFRTSSPKVVL

SEQ ID NO: 7570 - protein, 569 aa, Artificial Sequence
  derived and/or modified protein sequence (wt) from LASV(ISTH1121-NIG-2012;Clade II)__AIT17471__NP
MSASKEVKSFLWTQSLRRELSGYCSSIKLQVVKDAQALLHGLDFSEVSNVQRLMRKQKRDDSDLKRLRDLNQAVNNLVELKSTQQKSILRVGTLTSDDLLTLAADLEKLKSKVIRTERPLSSGVYMGNLSTQQLEQRRALLNMIGMVGGAQGTQPGRDGVVRVWDVKNPDLLNNQFGTMPSLTLACLTKQGQVDLNDAVLALTDLGLIYTAKYPNSSDLDRLSQSHPILNMVDTKKSSLNISGYNFSLGAAVKAGACMLDGGNMLETIKVTPQTMDGILKSILKVKRSLGMFVSDTPGERNPYENILYKICLSGDGWPYIASRTSIVGRAWENTTVDLESDGKPQKMGTTGSNKSLQSAGFPTGLTYSQLMTLKDSMMQLDPSAKTWIDIEGRPEDPVEIALYQPMSGCYIHFFREPTDLKQFKQDAKYSHGIDVADLFPAQPGLTSAVIEALPRNMVLTCQGSDDIKKLLDSQGRRDIKLIDIALSKADSRKFENVVWDQCKDLCHMHTGVVVEKKKRGGKEEITPHCALMDCIMYDAAVSGGLNIPVLRAVLPRDMVFRTSSPKVVL

SEQ ID NO: 7571 - protein, 569 aa, Artificial Sequence
  derived and/or modified protein sequence (wt) from LASV(ISTH1129-NIG-2012;Clade II)__AIT17475__NP
MSASKEVKSFLWTQSLRRELSGYCSSIKLQVVKDAQALLHGLDFSEVSNVQRLMRKQKRDDSDLKRLRDLNQAVNNLVELKSTQQKSVLRVGTLTSDDLLTLAADLEKLKSKVIRTERPLSSGVYMGNLSAQQLEQRRALLSMIGMVGGAQGTQPGRDGVVRVWDVKNPDLLNNQFGTMPSLTLACLTKQGQVDLNDTVLALTDLGLIYTAKYPNSSDLDRLSQSHPILNMVDTKKSSLNISGYNFSLGAAVKAGACMLDGGNMLETIKVTPQTMDGILKSILKVKRSLGMFVSDTPGERNPYENILYKICLSGDGWPYIASRTSIVGRAWENTTVDLESDGKPQKVGTAGSNKSLQSAGFPTGLTYSQLMTLKDSMMQLDPSAKTWIDIEGRPEDPVEIALYQPISGCYIHFFREPTDLKQFKQDAKYSHGIDVTDLFPAQPGLTSAVIEALPRNMVLTCQGSDDIKRLLDSQGRRDIKIIDIALSKADSRRFENAVWDQCKDLCHMHTGVVVEKKKRGGKEEITPHCALMDCIMYDAAVSGGLNIPVLRAVLPRDMVFRTSSPKVVL

SEQ ID NO: 7572 - protein, 569 aa, Artificial Sequence
  derived and/or modified protein sequence (wt) from LASV(ISTH1137-NIG-2011;Clade II)__AIT17479__NP
MSASKEVKSFLWTQSLRRELSGYCSNIKLQVVKDAQALLHGLDFSEVSNVQRLMRKQKRDDSDLKRLRDLNQAVNNLVELKSTQQKSVLRVGTLTSDDLLTLAADLEKLKSKVIRTERPLSSGVYMGNLSTQQLEQRRALLNMIGMVGGAQGTQPGRDGVVRVWDVKNPDLLNNQFGTMPSLTLACLTKQGQVDLNDAVLALTDLGLIYTAKYPNSSDLDRLSQSHPILNMVDTKKSSLNISGYNFSLGAAVKAGACMLDGGNMLETIKVTPQTMDGILKSILKVKRSLGMFVSDTPGERNPYENILYKICLSGDGWPYIASRTSIVGRAWENTTVDLESDGKPQKVGTAGSNKSLQSAGFPTGLTYSQLMTLKDSMMQLDPSAKTWIDIEGRPEDPVEIALYQPMSGCYIHFFREPTDLKQFKQDAKYSHGIDVADLFPAQPGLTSAVIEALPRNMVLTCQGSDDIKKLLDSQGRKDIKLIDIALSKVDSRRFENAVWDQCKDLCHMHTGVVVEKKKRGGKEEITPHCALMDCIMYDAAVSGGLNIPVLRAVLPRDMVFRTSSPKVVL

SEQ ID NO: 7573 - protein, 569 aa, Artificial Sequence
  derived and/or modified protein sequence (wt) from LASV(ISTH2010-NIG-2012;Clade II)__AIT17483__NP
MSASKEVKSFLWTQSLRRELSGYCSNIKLQVVKDAQALLHGLDFSEVSNVQRLMRKQKRDDSDLKRLRDLNQAVNNLVELKSTQQKSILRVGTLTSDDLLTLAADLEKLKSKVIRTERPLSSGVYMGNLSTQQLEQRRALLNLIGMVGGAQGTQPGRDGVVRVWDVKNPDLLNNQFGTMPSLTLACLTKQGQVDLNDAVLALTDLGLIYTAKYPNSSDLDRLSQSHPILNMVDTKKSSLNISGFNFSLGAAVKAGACMLDGGNMLETIKVTPQTMDGILKSILKVKKSLGMFVSDTPGERNPYENILYKICLSGDGWPYIASRTSIVGRAWENTTVDLESDGKPHKVGTAGSNKSLQSAGFPTGLTYSQLMTLKDSMMQLDPSAKTWIDIEGRPEDPVEIALYQPMSGCYIHFFREPTDLKQFKQDAKYSHGIDVADLFPAQPGLTSAVIEALPRNMVLTCQGSDDIKRLLDSQGRRDIKLIDIALSKADSRRFENAVWDQCKDLCHMHTGVVVEKKKRGGKEEITPHCALMDCIMYDAAVSGGLNIPVLRAVLPRDMVFRTSSPKVVL

SEQ ID NO: 7574 - protein, 569 aa, Artificial Sequence
  derived and/or modified protein sequence (wt) from LASV(ISTH2020-NIG-2012;Clade II)__AIT17491__NP
MSASKEVKSFLWTQSLRRELSGYCSNIKLQVVKDAQALLHGLDFSEVSNVQRLMRKQKRDDGDLKRLRDLNQAVNNLVELKSTQQKSVLRVGTLTSDDLLTLAADLEKLKSKVIRTERPLSSGVYMGNLSTQQLEQRRALLSMIGMVGGARGTQPGRDGVVRVWDVKNPDLLNNQFGTMPSLTLACLTKQGQVDLNDVVLALTDLGLIYTAKYPNSSDLDRLSQSHPILNMVDTKKSSLNISGYNFSLGAAVKAGACMLDGGNMLETIKVTPQTMDGILKSILKVKKSLGMFVSDTPGERNPYENILYKICLSGDGWPYIASRTSIVGRAWENTTVDLESDGKPQKVGAAGSNKSLQSAGFPTGLTYSQLMTLKDSMMQLDPSAKTWIDIEGRPEDPVEIALYQPMSGCYIHFFREPTDLKQFKQDAKYSHGIDVTDLFSAQPGLTSAVIEALPRNMVLTCQGSDDIKRLLDSQGRRDIKLIDIALSKADSRRFENAVWDQCKDLCHMHTGVVVEKKKRGGKEEITPHCALMDCIMYDAAVSGGLNIPVLRAVLPRDMVFRTSSPKVVL

SEQ ID NO: 7575 - protein, 569 aa, Artificial Sequence
  derived and/or modified protein sequence (wt) from LASV(ISTH2025-NIG-2012;Clade II)__AIT17495__NP
MSASKEVKSFLWTQSLRRELSGYCSNIKLQVVKDAQALLHGLDFSEVSNVQRLMRKQKRDDSDLKRLRDLNQAVNNLVELKSTQQKSILRVGTLTSDDLLTLAADLEKLKSKVIRTERPLSSGVYMGNLSTQQLEQRRALLNMIGMVGGAQSAQPGRDGVVRVWDVKNPDLLNNQFGTMPSLTLACLTKQGQVDLNDAVLALTDLGLIYTAKYPNSSDLDRLSQSHPILNMVDTKKSSLNISGFNFSLGAAVKAGACMLDGGNMLETIKVTPQTMDGILKSILKVKRSLGMFVSDAPGERNPYENILYKICLSGDGWPYIASRTSIVGRAWENTTVDLESDGKPQKVGTAGSNKSLQSAGFPTGLTYSQLMTLKDSMMQLDPSAKTWIDIEGRPEDPVEIALYQPMSGCYIHFFREPTDLKQFKQDAKYSHGIDVADLFPAQPGLTSAVIEALPRNMVLTCQGSDDIKKLLDSQGRRDIKLIDIALSKADSRRFENAVWDQCKDLCHMHTGVVVEKKKRGGKEEITPHCALMDCIMYDAAVSGGLNIPVLRAVLPRDMVFRTSSPKVVL

SEQ ID NO: 7576 - protein, 569 aa, Artificial Sequence
  derived and/or modified protein sequence (wt) from LASV(ISTH2031-NIG-2012;Clade II)__AIT17499__NP
MSASKEVKSFLWTQSLRRELSGYCSSIKLQVVKDAQALLHGLDFSEVSNVQRLMRKQKRDDSDLKRLRDLNQAVNNLVELKSTQQKSILRVGTLTSDDLLTLAADLEKLKSKVIRTERPLSSGVYMGNLSTQQLEQRRALLNIIGMVGGAQGTQPGRDGVVRVWDVKNPDLLNNQFGTMPSLTLACLTKQGQVDLNDAVLALTDLGLIYTAKYPNSSDLDRLSQSHPILNMVDTKKSSLNISGYNFSLGAAVKAGACMLDGGNMLETIKVTPQTMDGILKSILKVKRSLGMFVSDTPGERNPYENILYKICLSGDGWPYIASRTSIVGRAWENTTVDLESDGKPQKVGAAGSNKSLQSAGFPTGLTYSQLMTLKDSMMQLDPSAKTWIDIEGRPEDPVEIALYQPMSGCYIHFFREPTDLKQFKQDAKYSHGIDVADLFPAQPGLTSAVIEALPRNMVLTCQGSDDVKRLLDSQGRRDIKLIDIALSKADSRRFENAVWDQCKDLCHMHTGVVVEKKKRGGKEEITPHCALMDCIMYDAAVSGGLNIPVLRAVLPRDMVFRTSSPKVVL

SEQ ID NO: 7577 - protein, 569 aa, Artificial Sequence
  derived and/or modified protein sequence (wt) from LASV(ISTH2037-NIG-2012;Clade II)__AIT17503__NP
MSSSKEVKSFLWTQSLRRELSGYCSSIKLQVVKDAQALLHGLDFSEVSNVQRLMRKQKRDDSDLKRLRDLNQAVNNLVELKSTQQKSILRVGTLTSDDLLTLAADLEKLKSKVIRTERPLSSGVYMGNLSAQQLEQRRALLNMIGMVGGAQGTQPGRDGVVRVWDVKNPDLLNNQFGTMPSLTLACLTKQGQVDLNDAVLALTDLGLIYTAKYPNSSDLDRLSQSHPILNMVDTKKSSLNISGYNFSLGAAVKAGACMLDGGNMLETIKVTPQTMDGILKSILKVKKSLGMFVSDTPGERNPYENILYKICLSGDGWPYIASRTSIVGRAWENTTVDLESDGKPQKVGTAGSNKSLQSAGFPTGLTYSQLMTLKDSMMQLDPSAKTWIDIEGRPEDPVEIALYQPMSGCYIHFFREPTDLKQFKQDAKYSHGIDVADLFPAQPGLTSAVIEALPRNMVLTCQGSDDIKRLLDSQGRRDIKLIDIALSKADSRRFENAVWDQCKDLCHMHTGVVVEKKKRGGKEEITPHCALMDCIMYDAAVSGGLNIPVLRAVLPRDMVFRTSSPKVVL

SEQ ID NO: 7578 - protein, 569 aa, Artificial Sequence
  derived and/or modified protein sequence (wt) from LASV(ISTH2042-NIG-2012;Clade II)__AIT17507__NP
MSASKEVKSFLWTQSLRRELSGYCSNIKLQVVKDAQALLHGLDFSEVSNVQRLMRKQKRDDSDLKRLRDLNQAVNNLVELKSTQQKSILRVGTLTSDDLLTLAADLEKLKSKVIRTERPLSSGVYMGNLSTQQLEQRRALLNLIGMVGGAQGTQPGRDGVVRVWDVKNPDLLNNQFGTMPSLTLACLTKQGQVDLNDAVLALTDLGLIYTAKYPNSSDLDRLSQSHPILNMVDTKKSSLNISGFNFSLGAAVKAGACMLDGGNMLETIKVTPQTIDGILKSILKVKKSLGMFVSDTPGERNPYENILYKICLSGDGWPYIASRTSIVGRAWENTTVDLESDGKPHKVGTAGSNKSLQSAGFPTGLTYSQLMTLKDSMMQLDPSAKTWIDIEGRPEDPVEIALYQPMSGCYIHFFREPTDLKQFKQDAKYSHGIDVADLFPAQPGLTSAVIEALPRNMVLTCQGSDDIKRLLDSQGRRDIKLIDIALSKVDSRRFENAVWDQCKDLCHMHTGVVVEKKKRGGKEEITPHCALMDCIMYDAAVSGGLNIPVLRAVLPRDMVFRTSSPKVVL

SEQ ID NO: 7579 - protein, 569 aa, Artificial Sequence
  derived and/or modified protein sequence (wt) from LASV(ISTH2046-NIG-2012;Clade II)__AIT17511__NP
MSASKEVKSFLWTQSLRRELSGYCSNIKLQVVKDAQALLHGLDFSEVSNVQRLMRKQKRDDGDLKRLRDLNQAVNNLVELKSTQQKSILRVGTLTSDDLLTLAADLEKLKSKVIRTERPLSSGVYMGNLSTQQLEQRRALLNMIGMVGGAQGTQPGRDGVVRVWDVKNPDLLNNQFGTMPSLTLACLTKQGQVDLNDAVLALTDLGLIYTAKYPNSSDLDRLSQSHPILNMVDTKKSSLNISGYNFSLGAAVKAGACMLDGGNMLETIKVTPQTIDGILKSILKVKKSLGMFVSDTPGERNPYENILYKICLSGDGWPYIASRTSIVGRAWENTTVDLESDGKPQKVGTAGSNKSLQSAGFPTGLTYSQLMTLKDSMMQLDPSAKTWIDIEGRPEDPVEIALYQPMSGCYIHFFREPTDLKQFKQDAKYSHGIDVTDLFSAQPGLTSAVIEALPRNMVLTCQGSDDIKRLLDSQGRRDIKLIDIALSKADSRRFENAVWDQCKDLCHMHTGVVVEKKKRGGKEEITPHCALMDCIMYDAAVSGGLNIPVLRAVLPRDMVFRTSSPKVVL

SEQ ID NO: 7580 - protein, 569 aa, Artificial Sequence
  derived and/or modified protein sequence (wt) from LASV(ISTH2050-NIG-2012;Clade II)__AIT17515__NP
MSASKEVKSFLWTQSLRRELSGYCSSIKLQVVKDAQALLHGLDFSEVSNVQRLMRKQKRDDSDLKRLRDLNQAVNNLVELKSTQQKSILRVGTLTSDDLLTLAADLEKLKSKVIRTERPLSSGVYMGNLSTQQLEQRRALLNMIGMVGGAQGTQPGRDGVVRVWDVKNPDLLNNQFGTMPSLTLACLTKQGQVDLNDAVLALTDLGLIYTAKYPNSSDLDRLSQSHPILNMVDTKKSSLNISGYNFSLGAAVKAGACMLDGGNMLETIKVTPQTMDGILKSILKVKRSLGMFVSDTPGERNPYENILYKICLSGDGWPYIASRTSIVGRAWENTTVDLESDGKPQKVGAAGSSKSLQSAGFPTGLTYSQLMTLKDSMMQLDPSAKTWIDIEGRPEDPVEIALYQPVSGCYIHFFREPTDLKQFKQDAKYSHGIDVADLFPAQPGLTSAVIEALPRNMVLTCQGSDDIKRLLDSQGRRDIKLIDIALSKADSRRFENAVWDQCKDLCHMHTGVVVEKKKRGGKEEITPHCALMDCIMYDAAVSGGLNIPVLRAVLPRDMVFRTSSPKVVL

SEQ ID NO: 7581 - protein, 569 aa, Artificial Sequence
  derived and/or modified protein sequence (wt) from LASV(ISTH2057-NIG-2012;Clade II)__AIT17519__NP
MSASKEVKSFLWTQSLRRELSGYCSNIKLQVVKDAQALLHGLDFSEVSNVQRLMRKQKRDDSDLKRLRDLNQAVNNLVELKSTQQKSILRVGTLTSDDLLTLAADLEKLKSKVIRTERPLSSGVYMGNLSAQQLEQRRALLNMIGMVGGAQGTQPGRDGVVRVWDVKNPDLLNNQFGTMPSLTLACLTKQGQVDLNDAVLALTDLGLIYTAKYPNSSDLDRLSQSHPILNMVDTKKSSLNISGFNFSLGAAVKAGACMLDGGNMLETIKVTPQTMDGILKSILKVKRSLGMFVSDTPGERNPYENILYKICLSGDGWPYIASRTSIVGRAWENTTVDLESDGKPQKVGTAGSNKSLQSAGFPTGLTYSQLMTLKDSMMQLDPSAKTWIDIEGRPEDPVEIALYQPMSGCYIHFFREPTDLKQFKQDAKYSHGIDVADLFPAQPGLTSAVIEALPRNMVLTCQGSDDIKRLLDSQGRRDIKLIDIALSKADSRRFENAVWDQCKDLCHMHTGVVVEKKKRGGKEEITPHCALMDCIMYDAAVSGGLNIPVLRAVLPRDMVFRTSSPKVVL

SEQ ID NO: 7582 - protein, 569 aa, Artificial Sequence
  derived and/or modified protein sequence (wt) from LASV(ISTH2064-NIG-2012;Clade II)__AIT17525__NP
MSASKEVKSFLWTQSLRRELSGYCSSIKLQVVKDAQALLHGLDFSEVSNVQRLMRKQRRDDSDLKRLRDLNQAVNNLVELKSTQQKSILRVGTLTSDDLLTLAADLEKLKSKVIRTERPLSSGVYMGNLSTQQLEQRRALLNMIGMVGGAQGTQPGRDGVVRVWDVKNPDLLNNQFGTMPSLTLACLTKQGQVDLNDAVLALTDLGLIYTAKYPNSSDLDRLSQSHPILNMVDTKKSSLNISGYNFSLGAAVKAGACMLDGGNMLETIKVTPQTVDGILKSILKVKRSLGMFVSDTPGERNPYENILYKICLSGDGWPYIASRTSIVGRAWENTTVDLESDGKPQKVGTAGSNKSLQSAGFPTGLTYSQLMTLKDSMMQLDPSAKTWIDIEGRPEDPVEIALYQPMSGCYIHFFREPTDLKQFKQDAKYSHGIDVADLFPTQPGLTSAVIEALPRNMVLTCQGSDDIKRLLDSQGRRDIKLIDIALSKADSRKFENAVWDQCKDLCHMHTGVVVEKKKRGGKEEITPHCALMDCIMYDAAVSGGLNIPVLRAVLPRDMVFRTSSPKVVL

SEQ ID NO: 7583 - protein, 569 aa, Artificial Sequence
  derived and/or modified protein sequence (wt) from LASV(ISTH2065-NIG-2012;Clade II)__AIT17529__NP
MSASKEVKSFLWTQSLRRELSGYCSNIKLQVVKDAQALLHGLDFSEVNNVQRLMRKQKRDDSDLKRLRDLNQAVNNLVELKSTQQKSILRVGTLTSDDLLTLAADLEKLKSKVIRTERPLSSGVYMGNLSTQQLEQRRALLNMIGMAGGTQGTQPGRDGVVRVWDVKNPDLLNNQFGTMPSLTLACLTKQGQVDLNDAVLALTDLGLIYTAKYPNSSDLDRLSQSHPILNMVDTKKSSLNISGYNFSLGAAVKAGACMLDGGNMLETIKVTPQTMDGILKSILKVKRSLGMFVSDTPGERNPYENILYKICLSGDGWPYIASRTSIVGRAWENTTVDLESDGKPQKVGTAGSNKSLQSAGFPTGLTYSQLMTLKDSMMQLDPSAKTWIDIEGRPEDPVEIALYQPMSGCYIHFFREPTDLKQFKQDAKYSHGIDVADLFPAQPGLTSAVIEALPRNMVLTCQGSDDIKKLLDSQGRRDIKLIDISLSKIDSRKFENAVWDQCKDLCHMHTGVVVEKKKRGGKEEITPHCALMDCIMFDAAVSGGLNIPVLRAVLPRDMVFRTSSPKVVL

SEQ ID NO: 7584 - protein, 569 aa, Artificial Sequence
  derived and/or modified protein sequence (wt) from LASV(ISTH2094-NIG-2012;Clade II)__AIT17539__NP
MSASKEVKSFLWTQSLRRELSGYCSNIKLQVVKDAQALLHGLDFSEVSNVQRLMRKQKRDDGDLKRLRDLNQAVNNLVELKSTQQKSVLRVGTLTSDDLLILAADLEKLKSKVIRTERPLSSGVYMGNLSTQQLEQRKALLSMIGMVGGAQGTQPGRDGVVRVWDVKNPDLLNNQFGTMPSLTLACLTKQGQVDLNDAVLALTDLGLIYTAKYPNSSDLDRLSQSHPILNMVDTKKSSLNISGYNFSLGAAVKAGACMLDGGNMLETIKVTPQTMDGILKSILKVKRSLGMFVSDTPGERNPYENILYKICLSGDGWPYIASRTSIVGRAWENTTVDLESDGKPQKVGSAGSNKSLQSAGFPTGLTYSQLMTLKDSMMQLDPSAKTWIDIEGRPEDPVEIALYQPMSGCYIHFFREPTDLKQFKQDAKYSHGIDVTDLFSAQPGLTSAVIEALPRNMVLTCQGSDDIKKLLDSQGRRDIKLIDISLGKADSRRFENAVWDQCKDLCHMHTGVVVEKKKRGGKEEITPHCALMDCIMFDAAVSGGLNIPILRAVLPRDMVFRTSSPKVVL

SEQ ID NO: 7585 - protein, 569 aa, Artificial Sequence
  derived and/or modified protein sequence (wt) from LASV(ISTH2129-NIG-2012;Clade II)__AIT17545__NP
MSASKEVKSFLWTQSLRRELSGYCSNIKLQVVKDAQALLHGLDFSEVSNVQRLMRKQKRDDSDLKRLRDLNQAVNNLVELKSTQQKSVLRVGTLTSDDLLTLAADLEKLKSKVIRTERPLSSGVYMGNLSTQQLEQRRALLNMIGMVGGAQGTQPGRDGVVRVWDVKNPDLLNNQFGTMPSLTLACLTKQGQVDLNDAVLALTDLGLIYTAKYPNSSDLDRLSQSHPILNMVDTKKSSLNISGYNFSLGAAVKAGACMLDGGNMLETIKVTPQTMDGILKSILKVKKSLGMFVSDTPGERNPYENILYKICLSGDGWPYIASRTSIVGRAWENTTVDLESDGKPQKVGIAGSNKSLQSAGFPTGLTYSQLMTLKDSMMQLDPSAKTWIDIEGRPEDPVEIALYQPMSGCYIHFFREPTDLKQFKQDAKYSHGIDVADLFSAQPGLTSAVIEALPRNMVLTCQGSDDIKRLLDSQGRRDIKLIDIALSKADSRKFENAVWDQCKDLCHMHTGVVVEKKKRGGKEEITPHCALMDCIMYDAAVSGGLDIPVLRAVLPRDMVFRTSSPKVVL

SEQ ID NO: 7586 - protein, 569 aa, Artificial Sequence
  derived and/or modified protein sequence (wt) from LASV(ISTH2217-NIG-2012;Clade II)__AIT17549__NP
MSASKEVKSFLWTQSLRRELSGYCSNIKLQVVKDAQALLHGLDFSEVSNVQRLMRKQKRDDSDLKRLRDLNQAVNNLVELKSTQQKSILRVGTLTSDDLLTLAADLEKLKSKVIRTERPLSSGVYMGNLSTQQLEQRRALLNMIGMVGGAQGTQPGRDGVVRVWDVKNPDLLNNQFGTMPSLTLACLTKQGQVDLNDVVLALTDLGLIYTAKYPNSSDLDRLSQSHPILNMVDTKKSSLNISGYNFSLGAAVKAGACMLDGGNMLETIKVTPQTMDGILKSILKVKKSLGMFVSDTPGERNPYENILYKICLSGDGWPYIASRTSIVGRAWENTTVDLESDGKPQKVGTVGSNKSLQSAGFPTGLTYSQLMTLKDSMMQLDPSAKTWIDIEGRPEDPVEIALYQPMSGCYIHFFREPTDLKQFKQDAKYSHGIDVADLFPAQPGLTSAVIEALPRNMVLTCQGSDDIKKLLDSQGRRDIKLIDIALSKADSRKFENAVWDQCKDLCHMHTGVVVEKKKRGGKEEITPHCALMDCIMYDAAVSGGLNIPVLRAVLPRDMVFRTSSPKVVL

SEQ ID NO: 7587 - protein, 569 aa, Artificial Sequence
  derived and/or modified protein sequence (wt) from LASV(ISTH2271-NIG-2012;Clade II)__AIT17553__NP
MSASKEVKSFLWTQSLRRELSGYCSSIKLQVVKDAQALLHGLDFSEVSNVQRLMRKQKRDDSDLKRLRDLNQAVNNLVELKSTQQKSILRVGTLTSDDLLTLAADLEKLKSKVIRTERPLSSGVYMGNLSTQQLEQRRALLNMIGMVGGAQGTQPGRDGVVRVWDVKNPDLLNNQFGTMPSLTLACLTKQGQVDLNDAVLALTDLGLIYTAKYPNSSDLDRLSQSHPILNMVDTKKSSLNISGYNFSLGAAVKAGACMLDGGNMLETIKVTPQTMDGILKSILKVKRSLGMFVSDTPGERNPYENILYKICLSGDGWPYIASRTSIVGRAWENTTVDLESDGKPQKMGTAGSNKSLQSAGFPTGLTYSQLMTLKDSMMQLDPSAKTWIDIEGRPEDPVEIALYQPMSGCYIHFFREPTDLKQFKQDAKYSHGIDVADLFPAQPGLTSAVIEALPRNMVLTCQGSDDIKKLLDSQGRRDIKLIDIALSKADSRRFENAVWDQCKDLCHMHTGVVVEKKKRGGKEEITPHCALMDCIMYDAAVSGGLNIPVLRAVLPRDMVFRTSSPKVVL

SEQ ID NO: 7588 - protein, 569 aa, Artificial Sequence
  derived and/or modified protein sequence (wt) from LASV(ISTH2312-NIG-2012;Clade II)__AIT17561__NP
MSASKEVKSFLWTQSLRRELSGYCSNIKLQVVKDAQALLHGLDFSEVSNVQRLMRKQKRDDSDLKRLRDLNQAVNNLVELKSTQQKSILRVGTLTSDDLLTLAADLEKLKSKVIRTERPLSSGVYMGNLSTQQLEQRRALLNMIGMVGGAQGTQPGRDGVVRVWDVKNPDLLNNQFGTMPSLTLACLTKQGQVDLNDAVLALTDLGLIYTAKYPNSSDLDRLSQSHPILNMVDTKKSSLNISGYNFSLGAAVKAGACMLDGGNMLETIKVTPQTIDGILKSILKVKKSLGMFVSDTPGERNPYENILYKICLSGDGWPYIASRTSIVGRAWENTTVDLESDGKPQKVGTVGSNKSLQSAGFPTGLTYSQLMTLKDSMMQLDPSAKTWIDIEGRPEDPVEIALYQPMSGCYIHFFREPTDLKQFKQDAKYSHGIDVADLFPAQPGLTSAVIEALPRNMVLTCQGSDDIKRLLDSQGRRDIKLIDIALSKADSRRFENAVWDQCKDLCHMHTGVVVEKKRRGGKEEITPHCALMDCIMYDAAVSGGLNIPVLRAVLPRDMVFRTSSPKVVL

SEQ ID NO: 7589 - protein, 569 aa, Artificial Sequence
  derived and/or modified protein sequence (wt) from LASV(ISTH2316-NIG-2012;Clade II)__AIT17565__NP
MSASKEIKSFLWTQSLRRELSGYCSSIKLQVVKDAQALLHGLDFSEVSNVQRLMRKQKRDDSDLKRLRDLNQAVNNLVELKSTQQKSILRVGTLTSDDLLTLAADLEKLKSKVIRTERPLSSGVYMGNLSTQQLEQRRALLNMIGMVGGAQGTQPGRDGVVRVWDVKNPDLLNNQFGTMPSLTLACLTKQGQVDLNDAVLALTDLGLIYTAKYPNSSDLDRLSQSHPILNMVDTKKSSLNISGYNFSLGAAVKAGACMLDGGNMLETIKVTPQTMDGILKSILKVKRSLGMFVSDAPGERNPYENILYKICLSGDGWPYIASRTSIVGRAWENTTVDLESDGKPQKVGTAGSNKSLQSAGFPTGLTYSQLMTLKDSMMQLDPSAKTWIDIEGRPEDPVEIALYQPMSGCYIHFFREPTDLKQFKQDAKYSHGIDVADLFPAQPGLTSAVIEALPRNMVLTCQGSDDIKRLLDSQGRRDIKLIDIALSKADSRKFENAVWDQCKDLCHMHTGVVVEKKKRGGKEEITPHCALMDCIMYDAAVSGGLNIPVLRAVLPRDMVFRTSSPKVVL

SEQ ID NO: 7590 - protein, 569 aa, Artificial Sequence
  derived and/or modified protein sequence (wt) from LASV(ISTH2334-NIG-2012;Clade II)__AIT17569__NP
MSASKEVKSFLWTQSLRRELSGYCSNIKLQVVKDAQALLHGLDFSEVSNVQRLMRKQKRDDSDLKRLRDLNQAVNNLVELKSTQQKSILRVGTLTSDDLLTLAADLEKLKSKVIRTERPLSSGVYMGNLSTQQLEQRRALLNMIGMVGGAQGTQPGRDGVVRVWDVKNPDLLNNQFGTMPSLTLACLTKQGQVDLNDAVLALTDLGLIYTAKFPNSSDLDRLSQSHPILNMVDTKKSSLNISGYNFSLGAAVKAGACMLDGGNMLETIKVTPQTMDGILKSILKVKKSLGMFVSDTPGERNPYENILYKICLSGDGWPYIASRTSIVGRAWENTTVDLESDGKPQKVGTTGSNKSLQSAGFPTGLTYSQLMTLKDSMMQLDPSAKTWIDIEGRPEDPVEIALYQPMSGCYIHFFREPTDLKQFKQDAKYSHGIDVADLFPAQPGLTSAVIEALPRNMVLTCQGSDDIKRLLDSQGRRDIKLIDIALSKADSRRFENAVWDQCKDLCHMHTGVVVEKKKRGGKEEITPHCALMDCIMYDAAVSGGLNLPVLRAVLPRDMVFRTSSPKVVL

SEQ ID NO: 7591 - protein, 569 aa, Artificial Sequence
  derived and/or modified protein sequence (wt) from LASV(ISTH2358-NIG-2012;Clade II)__AIT17573__NP
MSASKEVKSFLWTQSLRRELSGYCSNIKLQVVKDAQALLHGLDFSEVSNVQRLMRKQKRDDSDLKRLRDLNQAVNNLVELKSTQQKSILRVGTLTSDDLLTLAADLEKLKSKVIRTERPLSSGVYMGNLSTQQLEQRRALLNMIGMVGGAQGTQPGRDGVVRVWDVKNPDLLNNQFGTMPSLTLACLTKQGQVDLNDAVLALTDLGLIYTAKYPNSSDLDRLSQSHPILNMVDTKKSSLNISGYNFSLGAAVKAGACMLDGGNMLETIKVTPQTMDGILKSILKVKKSLGMFVSDTPGERNPYENILYKICLSGDGWPYIASRTSIVGRAWENTTVDLESDGKPQKVGTAGSNKSLQSAGFPTGLTYSQLMTLKDSMMQLDPSAKTWIDIEGRPEDPVEIALYQPMSGCYIHFFREPTDLKQFKQDAKYSHGIDIADLFPAQPGLTSAVIEALPRNMVLTCQGSDDIKRLLDSQGRRDIKLIDIALSKADSRRFENAVWDQCKDLCHMHTGVVVEKKKRGGKEEITPHCALMDCIMYDAAVSGGLNIPVLRAVLPRDMVFRTSSPKVVL

SEQ ID NO: 7592 - protein, 569 aa, Artificial Sequence
  derived and/or modified protein sequence (wt) from LASV(ISTH2376-NIG-2012;Clade II)__AIT17577__NP
MSASKEVKSFLWTQSLRRELSGYCSSIKLQVVKDAQALLHGLDFSEVSNVQRLMRKQKRDDSDLKRLRDLNQAVNNLVELKSTQQKSILRVGTLTSDDLLTLAADLEKLKSKVIRTERPLSSGVYMGNLSTQQLEQRRALLNMIGMVGGAQGTQPGRDGVVRVWDVKNPDLLNNQFGTMPSLTLACLTKQGQVDLNDAVLALTDLGLIYTAKYPNSSDLDRLSQSHPILNMVDTKKSSLNISGYNFSLGAAVKAGACMLDGGNMLETIKVTPQTMDGILKSILKVKRSLGMFVSDTPGERNPYENILYKICLSGDGWPYIASRTSIAGRAWENTTVDLESDGKPQKVGAAGSNKSLQSAGFPTGLTYSQLMTLKDSMMQLDPSAKTWIDIEGRPEDPVEIALYQPMSGCYIHFFREPTDLKQFKQDAKYSHGIDVADLFPAQPGLTSAVIEALPRNMVLTCQGSDDIKRLLDSQGRRDIKLIDIALSKADSRRFENAVWDQCRDLCHMHTGVVVEKKKRGGKEEITPHCALMDCIMYDAAVSGGLNIPVLRAVLPRDMVFRTSSPKVVL

SEQ ID NO: 7593 - protein, 569 aa, Artificial Sequence
  derived and/or modified protein sequence (wt) from LASV(Lassa virus/H.sapiens-wt/NGA/2015/ISTH_0543;Clade II)__AVO03640__NP
MSASKEVKSFLWTQSLRRELSGYCSNIKLQVVKDAQALLHGLDFSEVSNVQRLMRKQKRDDSDLKRLRDLNQAVNNLVELKSTQQKSILRVGTLTSDDLLTLAADLEKLKSKVIRTERPLSSGVYMGNLSTQQLEQRRALLNMIGMVGGAQGTQPGRDGVVRVWDVKNPDLLNNQFGTMPSLTLACLTKQGQVDLNDAVLALTDLGLIYTAKYPNSSDLDRLSQSHPILNMVDTKKSSLNISGYNFSLGAAVKAGACMLDGGNMLETIKVTPQTMDGILKSILKVKKSLGMFVSDTPGERNPYENILYKICLSGDGWPYIASRTSIVGRAWENTTVDLESDGKPQKVGSAGSNKSLQSAGFPTGLTYSQLMTLKDSMMQLDPSAKTWIDIEGRPEDPVEIALYQPMSGCYIHFFREPTDLKQFKQDAKYSHGIDVADLFPAQPGLTSAVIEALPRNMVLTCQGSDDIKRLLDSQGRKDIKLIDIALSKADSRRFENAVWDQCKDLCHMHTGVVVEKKKRGGKEEITPHCALMDCIMYDAAVSGGLNIPVLRAVLPRDMVFRTSSPKVVL

SEQ ID NO: 7594 - protein, 569 aa, Artificial Sequence
  derived and/or modified protein sequence (wt) from LASV(Lassa virus/H.sapiens-wt/NGA/2015/ISTH_0547;Clade II)__AVO03584__NP
MSASKEVKSFLWTQSLRRELSGYCSSIKLQVVKDAQALLHGLDFSEVSNVQRLMRKQKRDDSDLKRLRDLNQAVNNLVELKSTQQKSILRVGTLTSDDLLTLAADLEKLKSKVIRTERPLSSGVYMGNLSTQQLEQRRALLNMIGMVGGAQGTQPGRDGVVRVWDVKNPDLLNNQFGTMPSLTLACLTKQGQVDLNDAVLALTDLGLIYTAKYPNSSDLDRLSQSHPILNMVDTKKSSLNISGYNFSLGAAVKAGACMLDGGNMLETIKVTPQTMDGILKSILKVKRSLGMFVSDTPGERNPYENILYKICLSGDGWPYIASRTSIVGRAWENTTVDLESDGKPQKVGVAGSNKSLQSAGFPTGLTYSQLMTLKDSMMQLDPSAKTWIDIEGRPEDPVEIALYQPMSGCYIHFFREPTDLKQFKQDAKYSHGIDVADLFPAQPGLTSAVIEALPRNMVLTCQGSDDIKRLLDSQGRRDIKLIDIALSKADSRRFENAVWDQCKDLCHMHTGVVVEKKKRGGKEEITPHCALMDCIMYDAAVSGGLNIPVLRAVLPRDMVFRTSSPKVVL

SEQ ID NO: 7595 - protein, 569 aa, Artificial Sequence
  derived and/or modified protein sequence (wt) from LASV(Lassa virus/H.sapiens-wt/NGA/2015/ISTH_0574;Clade II)__AVO03658__NP
MSASKEVKSFLWTQSLRRELSGYCSNIKLQVVKDAQALLHGLDFSEVSNVQRLMRKQKRDDSDLKRLRDLNQAVNNLVELKSTQQKSILRVGTLTSDDLLTLAADLEKLKSKVIRTERPLSSGVYMGNLSTQQLEQRRALLNMIGMVGGTQGTQPGRDGVVRVWDVKNPDLLNNQFGTMPSLTLACLTKQGQVDLNDAVLALTDLGLIYTAKYPNSSDLDRLSQSHPILNMVDTKKSSLNISGYNFSLGAAVKAGACMLDGGNMLETIKVTPQTMDGILKSILKVKKSLGMFVSDTPGERNPYENILYKICLSGDGWPYIASRTSIVGRAWENTTVDLESEGKPQKVGTAGSNKSLQSAGFPTGLTYSQLMTLKDSMMQLDPSAKTWIDIEGRPEDPVEIALYQPMSGCYIHFFREPTDLKQFKQDAKYSHGIDVADLFPAQPGLTSAVIEALPRNMVLTCQGSDDIKRLLDSQGRRDIKLIDISLSKADSRRFENAVWDQCKDLCHMHTGVVVEKKKRGGKEEITPHCALMDCIMYDAAVSGGLNIPVLRAVLPRDMVFRTSSPKVVL

SEQ ID NO: 7596 - protein, 569 aa, Artificial Sequence
  derived and/or modified protein sequence (wt) from LASV(Lassa virus/H.sapiens-wt/NGA/2015/ISTH_0682;Clade II)__AVO03626__NP
MSASKEVKSFLWTQSLRRELSGYCSSIKLQVVKDAQALLHGLDFSEVSNVQRLMRKQKRDDSDLKRLRDLNQAVNNLVELKSTQQKSVLRVGTLTSDDLLTLAADLEKLKSKVIRTERPLSSGVYMGNLSTQQLEQRRALLSMIGMVGGTQGTQPGRDGVVRVWDVKNPDLLNNQFGTMPSLTLACLTKQGQVDLNDAVLALTDLGLIYTAKYPNSSDLDRLSQSHPILNMVDTKKSSLNISGYNFSLGAAVKAGACMLDGGNMLETIKVTPQTMDGILKSILKVKKSLGMFVSDTPGERNPYENILYKICLSGDGWPYIASRTSIVGRAWENTTVDLESNGKPQKVGTAGSNKSLQSAGFPTGLTYSQLMTLKDSMMQLDPSAKTWIDIEGRPEDPVEIALYQPMSGCYIHFFREPTDLKQFKQDAKYSHGIDVADLFPAQPGLTSAVIEALPRNMVLTCQGSDDIKRLLDSQGRRDIKLIDISLSKADSRKFENAVWDQCKDLCHMHTGVVVEKKKRGGKEEITPHCALMDCIMYDAAVSGGLNIPVLRAVLPRDMVFRTSSPKVVL

SEQ ID NO: 7597 - protein, 569 aa, Artificial Sequence
  derived and/or modified protein sequence (wt) from LASV(Lassa virus/H.sapiens-wt/NGA/2015/ISTH_0687;Clade II)__AVO03582__NP
MSASKEVKSFLWTQSLRRELSGYCSSIKLQVVKDAQALLHGLDFSEVSNVQRLMRKQKRDDSDLKRLRDLNQAVNNLVELKSTQQKSILRVGTLTSDDLLTLAADLEKLKSKVIRTERPLSSGVYMGNLSTQQLEQRRALLNMIGMVGGAQSTQPGRDGVVRVWDVKNPDLLNNQFGTMPSLTLACLTKQGQVDLNDAVLALTDLGLIYTAKYPNSSDLDRLSQSHPILNMVDTKKSSLNISGYNFSLGAAVKAGACMLDGGNMLETIKVTPQTMDGILKSILKVKRSLGMFVSDTPGERNPYENILYKICLSGDGWPYIASRTSIVGRAWENTTVDLESDGKPQKVGATGSNKSLQSAGFPTGLTYSQLMTLKDSMMQLDPSAKTWIDIEGRPEDPVEIALYQPISGCYIHFFREPTDLKQFKQDAKYSHGIDVADLFPAQPGLTSAVIEALPRNMVLTCQGSDDIKRLLDSQGRRDIKLIDIALSKADSRRFENAVWDQCKDLCHMHTGVVVEKKKRGGKEEITPHCALMDCIMYDAAVSGGLNIPVLRAVLPRDMVFRTSSPKVVL

SEQ ID NO: 7598 - protein, 569 aa, Artificial Sequence
  derived and/or modified protein sequence (wt) from LASV(Lassa virus/H.sapiens-wt/NGA/2015/ISTH_0736;Clade II)__AVO03574__NP
MSASKEVKSFLWTQSLRRELSGYCSNIKLQVVKDAQALLHGLDFSEVSNVQRLMRKQKRDDSDLKRLRDLNQAVNNLVELKSTQQKSVLRVGTLTSDDLLTLAADLEKLKSKVIRTERPLSSGVYMGNLSTQQLEHRRALLNMIGMVGGAQGTQPGRDGVVRVWDVKNPDLLNNQFGTMPSLTLACLTKQGQVDLNDAVLALTDLGLIYTAKYPNSSDLDRLSQSHPILNMVDTKKSSLNISGYNFSLGAAVKAGACMLDGGNMLETIKVTPQTMDGILKSILKVKRSLGMFVSDTPGERNPYENILYKICLSGDGWPYIASRTSIVGRAWENTTVDLESDGKPQKVGTAGSNKSLQSAGFPTGLTYSQLMTLKDSMMQLDPSAKTWIDIEGRPEDPVEIALYQPISGCYIHFFREPTDLKQFKQDAKYSHGIDVADLFPAQPGLTSAVIEALPRNMVLTCQGSDDIKRLLDSQGRRDIKLIDIALSKADSRRFENAVWDQCKDLCHMHTGVVVEKKKRGGKEEITPHCALMDCIMYDAAVSGGLNIPVLRAVLPRDMVFRTSSPKVVL

SEQ ID NO: 7599 - protein, 569 aa, Artificial Sequence
  derived and/or modified protein sequence (wt) from LASV(Lassa virus/H.sapiens-wt/NGA/2015/ISTH_0789;Clade II)__AVO03552__NP
MSASKEVKSFLWTQSLRRELSGYCSNIKLQVVKDAQALLHGLDFSEVSNVQRLMRKQKRDDGDLKRLRDLNQAVNNLVELKSTQQKSVLRVGTLSSDDLLILAADLEKLKSKVIRTERPLSSGVYMGNLSSQQLDQRRALLNMIGMTGGGQGANAGRDGIVRVWDVKNAELLNNQFGTMPSLTLACLTKQGQVDLNDAVQALTDLGLIYTAKYPNSSDLDRLSQSHPILNMIDTKKSSLNISGYNFSLGAAVKAGACMLDGGNMLETIKVSPQTMDGILKSILKVKRSLGMFVSDAPGERNPYENILYKICLSGDGWPYIASRTSIIGRAWENTVVDLESDNKPQKLGNSGSNRSLQSAGYPAGLTYSQLMTLKDSMLQLDPNAKTWMDVEGRPDDPVEIALYQPSSGCYIHFFREPTDLKQFKQDAKYSHGIDVGDLFAAQPGLTSAVIEALPRNMVITCQGSEDIKKLLESQGRKDIKLVDISMSKLDSRKFENAVWDQYKDLCHMHTGIVVEKKKRGGKEEITPHCALMDCIMFDAAVVGGLDAKILRAVLPRDMVFRTSTPKVVL

SEQ ID NO: 7600 - protein, 569 aa, Artificial Sequence
  derived and/or modified protein sequence (wt) from LASV(Lassa virus/H.sapiens-wt/NGA/2015/ISTH_0821;Clade II)__AVO03642__NP
MSASKEVKSFLWTQSLRRELSGYCSNIKLQVVKDAQALLHGLDFSEVSNVQRLMRKQKRDDSDLKRLRDLNQAVNNLVELKSTQQKSILRVGTLTSDDLLTLAADLEKLKSKVIRTERPLSSGVYMGNLSTQQLEQRRALLNMIGMVGGAQGTQPGRDGVVRVWDVKNPDLLNNQFGTMPSLTLACLTKQGQVDLNDAVLALTDLGLIYTAKYPNSSDLDRLSQSHPILNMVDTKKSSLNISGYNFSLGAAVKAGACMLDGGNMLETIKVTPQTMDGILKSILKVKRSLGMFVSDTPGERNPYENILYKICLSGDGWPYIASRTSIVGRAWENTTVDLESDGKPQKVGIAGSNKSLQSAGFPTGLTYSQLMTLKDSMMQLDPSAKTWIDIEGRPEDPVEIALYQPMSGCYIHFFREPTDLKQFKQDAKYSHGIDVADLFPAQPGLTSAVIEALPRNMVLTCQGSDDIKKLLDSQGRKDIKLIDIALSKVDSRRFENAVWDQCKDLCHMHTGVVVEKKKRGGKEEITPHCALMDCIMYDAAVSGGLNIPVLRAVLPRDMVFRTSSPKVVL

SEQ ID NO: 7601 - protein, 569 aa, Artificial Sequence
  derived and/or modified protein sequence (wt) from LASV(Lassa virus/H.sapiens-wt/NGA/2015/ISTH_0831;Clade II)__AVO03546__NP
MSASKEVKSFLWTQSLRRELAGYCSNIKLQVVKDAQALLHGLDFSEVSNVQRLMRKQKRDDSDLKRLRDLNQAVNNLVELKSTQQKSILRVGTLSSDDLLTLAADLEKLKSKVIRTERPLSSGVYMGNLSTQQLDQRRALLNMIGMVGGSQGTSAGRDGIVRVWDVRNPELLNNQFGTMPSLTLACLTKQGQVDLNDAVQALTDLGLIYTAKYPNSSDLDRLSQSHPILNMIDTKKSSINISGYNFSLGAAVKAGACMLDGGNMLETIKVSPQSMDGILKSILKVKRSLGMFVSDTPGERNPYENILYKICLSGDGWPYIASRTSITGRAWENTVVDLESDNKPKKPGNNESNRSLQSAGFPAGLTYSQLMTLKDSMLQLDPNAKTWMDIEGRPDDPVEIALYQPNSGCYIHFFREPTDLKQFKQDAKYSHGIDISDLFAAQPGLTSAVIEALPRNMVITCQGSEDIKKLLESQGRKDIRLVDISLSKADSRKFENAVWDQYKDLCHMHTGIVVEKKKKGGKEEITPHCALMDCIMFDAAVMNGLDARVLRAVLPRDMVFRTSTPRVVL

SEQ ID NO: 7602 - protein, 569 aa, Artificial Sequence
  derived and/or modified protein sequence (wt) from LASV(Lassa virus/H.sapiens-wt/NGA/2016/ISTH_0009;Clade II)__AVO03572__NP
MSASKEVKSFLWTQSLRRELSGYCSNIKLQVVKDAQALLHGLDFSEVSNVQRLMRKQKRDDSDLKRLRDLNQAVNNLVELKSTQQKSILRVGTLTSDDLLTLAADLEKLKSKVIRTERPLSSGVYMGNLSTQQLEQRRALLNMIGMVGGAQGTQPGRDGVVRVWDVKNPDLLNNQFGTMPSLTLACLTKQGQVDLNDAVLALTDLGLIYTAKYPNSSDLDRLSQSHPILNMVDTKKSSLNISGYNFSLGAAVKAGACMLDGGNMLETIKVTPQTMDGILKSILKVKKSLGMFVSDTPGERNPYENILYKICLSGDGWPYIASRTSIVGRAWENTTVDLESDGKPQKVGSAGSNKSLQSAGFPTGLTYSQLMTLKDSMMQLDPSAKTWIDIEGRPEDPVEIALYQPMSGCYIHFFREPTDLKQFKQDAKYSHGIDVADLFPAQPGLTSAVIEALPRNMVLTCQGSDDIKRLLDSQGRRDIKLIDIALSKADSRRFENAVWDQCKDLCHMHTGVVVEKKKRGGKEEITPHCALMDCIMYDAAVSGGLNIPVLRAVLPRDMVFRTSSPKVVL

SEQ ID NO: 7603 - protein, 569 aa, Artificial Sequence
  derived and/or modified protein sequence (wt) from LASV(Lassa virus/H.sapiens-wt/NGA/2016/ISTH_0017;Clade II)__AVO03568__NP
MSASKEVKSFLWTQSLRRELSGYCSSIKLQVVKDAQALLHGLDFSEVSNVQRLMRKQKRDDSDLKRLRDLNQAVNNLVELKSTQQKSILRVGTLTSDDLLTLAADLEKLKSKVIRTERPLSSGVYMGNLSTQQLEQRRALLNMIGMAGGAQGTQPGRDGVVRVWDVKNPDLLNNQFGTMPSLTLACLTKQGQVDLNDAVLALTDLGLIYTAKYPNSSDLDRLSQSHPILNMVDTKKSSLNISGYNFSLGAAVKAGACMLDGGNMLETIKVTPQTMDGILKSILKVKRSLGMFVSDAPGERNPYENILYKICLSGDGWPYIASRTSIVGRAWENTTVDLESDGKPQKVGATGSNKSLQSAGFPTGLTYSQLMTLKDSMMQLDPSAKTWIDIEGRPEDPVEVALYQPVSGCYIHFFREPTDLKQFKQDAKYSHGIDVADLFPAQPGLTSAVIEALPRNMVLTCQGSDDIKKLLDSQGRKDIKLIDIALSKADSRRFENAVWDQCKDLCHMHTGVVVEKKKRGGKEEITPHCALMDCIMYDAAVSGGLNIPVLRAVLPRDMVFRTSSPKVVL

SEQ ID NO: 7604 - protein, 569 aa, Artificial Sequence
  derived and/or modified protein sequence (wt) from LASV(Lassa virus/H.sapiens-wt/NGA/2016/ISTH_0035;Clade II)__AVO03620__NP
MSASKEVKSFLWTQSLRRELSGYCSSIKLQVVKDAQALLHGLDFSEVSNVQRLMRKQKRDDSDLKRLRDLNQAVNNLVELKSTQQKSILRVGTLTSDDLLTLAADLEKLKSKVIRTERPLSSGVYMGNLSSQQLEQRRALLNMIGMVGGAQGTQPGRDGVVRVWDVKNPDLLNNQFGTMPSLTLACLTKQGQVDLNDAVLALTDLGLIYTAKYPNSSDLDRLSQSHPILNMVDTKKSSLNISGYNFSLGAAVKAGACMLDGGNMLETIKVTPQTMDGILKSILKVKRSLGMFVSDTPGERNPYENILYKICLSGDGWPYIASRTSIVGRAWENTTVDLESDGKPQKVGSAGSNKSLQSAGFPTGLTYSQLMTLKDSMMQLDPSAKTWIDIEGRPEDPVEIALYQPISGCYIHFFREPTDLKQFKQDAKYSHGIDVADLFPAQPGLTSAVIEALPRNMVLTCQGSDDIKRLLDSQGRRDIKLIDIALSKADSRRFENAVWDQCKDLCHMHTGVVVEKKKRGGKEEITPHCALMDCIMYDAAVSGGLNIPVLRAVLPRDMVFRTSSPKVVL

SEQ ID NO: 7605 - protein, 569 aa, Artificial Sequence
  derived and/or modified protein sequence (wt) from LASV(Lassa virus/H.sapiens-wt/NGA/2016/ISTH_0104;Clade II)__AVO03632__NP
MSASKEVKSFLWTQSLRRELSGYCSNIKLQVVKDAQALLHGLDFSEVSNVQRLMRKQKRDDSDLKRLRDLNQAVNNLVELKSTQQKSILRVGTLTSDDLLTLAADLEKLKSKVIRTERPLSSGVYMGNLSTQQLEQRRALLNMIGMVGGTQSTQPGRDGVVRVWDVKNPDLLNNQFGTMPSLTLACLTKQGQVDLNDAVLALTDLGLIYTAKYPNSSDLDRLSQSHPILNMVDTKKSSLNISGYNFSLGAAVKAGACMLDGGNMLETIKVTPQTMDGILKSILKVKRSLGMFVSDTPGERNPYENILYKICLSGDGWPYIASRTSIVGRAWENTTVDLESDGKPQKVGTTGSNKSLQSAGFPTGLTYSQLMTLKDSMMQLDPSAKTWIDIEGRPEDPVEIALYQPMSGCYIHFFREPTDLKQFKQDAKYSHGIDVADLFPAQPGLTSAVIEALPRNMVLTCQGSDDIKKLLDSQGRRDIKLIDISLSKADSRKFENAVWDQCKDLCHMHTGVVVEKKKRGGKEEITPHCALMDCIMFDAAVSGGLNIPVLRAVLPRDMVFRTSSPKVVL

SEQ ID NO: 7606 - protein, 569 aa, Artificial Sequence
  derived and/or modified protein sequence (wt) from LASV(Lassa virus/H.sapiens-wt/NGA/2016/ISTH_0133;Clade II)__AVO03636__NP
MSASKEVKSFLWTQSLRRELSGYCSNIKLQVVKDAQALLHGLDFSEVSNVQRLMRKQKRDDSDLKRLRDLNQAVNNLVELKSTQQKSILRVGTLTSDDLLTLAADLEKLKSKVIRTERPLSSGVYMGNLSAQQLEQRRALLNMIGMVGGTQGTQPGRDGVVRVWDVKNPDLLNNQFGTMPSLTLACLTKQGQVDLNDAVLALTDLGLIYTAKYPNASDLDRLSQSHPILNMVDTKKSSLNISGYNFSLGAAVKAGACMLDGGNMLETIKVTPQTMDGILKSVLKVKKSLGMFVSDTPGERNPYENILYKICLSGDGWPYIASRTSIVGRAWENTTVDLESDGKPQKIGPAGSNKSLQSAGFPAGLTYSQLMTLKDSMMQLDPSAKTWIDIEGRPEDPVEIALYQPMSGCYIHFFREPTDLKQFKQDAKYSHGIDVTDLFSAQPGLTSAVIEALPRNMVLTCQGSDDIKRLLDSQGRRDIKLIDISLSKVDSRRFENAVWDQCKDLCHMHTGVVVEKKKRGGKEEITPHCALMDCIMYDAAVSGGLNIPVLRAVLPRDMVFRTSSPKVVL

SEQ ID NO: 7607 - protein, 569 aa, Artificial Sequence
  derived and/or modified protein sequence (wt) from LASV(Lassa virus/H.sapiens-wt/NGA/2016/ISTH_0146;Clade II)__AVO03634__NP
MSASKEVKSFLWTQSLRRELSGYCSNIKLQVVKDAQALLHGLDFSEVSNVQRLMRKQKRDDSDLKRLRDLNQAVNNLVELKSTQQKSILRVGTLTSDDLLTLAADLEKLKSKVIRTERPLSSGVYMGNLSAQQLEQRRALLNMIGMAGGAQSTQPGRDGVVRVWDVKNPDLLNNQFGTMPSLTLACLTKQGQVDLNDAVLALTDLGLIYTAKYPNSSDLDRLSQSHPILNMVDTKKSSLNISGYNFSLGAAVKAGACMLDGGNMLETIKITPQTMDGILKSILKVKRSLGMFVSDTPGERNPYENILYKICLSGDGWPYIASRTSIVGRAWENTTVDLESDGKPQKVGTIGSNKSLQSAGFPTGLTYSQLMTLKDSMMQLDPSAKTWIDIEGRPEDPVEIALYQPMSGCYIHFFREPTDLKQFKQDAKYSHGIDVADLFPAQPGLTSAVIEALPRNMVLTCQGSDDIKRLLDSQGRRDIKLIDIALSKADSRRFENAVWDQCKDLCHMHTGVVVEKKKRGGKEEITPHCALMDCIMYDAAVSGGLNIPVLRAVLPRDMVFRTSSPKVVL

SEQ ID NO: 7608 - protein, 569 aa, Artificial Sequence
  derived and/or modified protein sequence (wt) from LASV(Lassa virus/H.sapiens-wt/NGA/2016/ISTH_0187;Clade II)__AVO03550__NP
MSVSKEVKSFLWTQSLRRELSGYCSNIKLQVVKDAQALLHGLDFSEVSNVQRLMRKQRRDDGDLKRLRDLNQAVNNLVELKSTQQKSVLRVGTLSSDDLLVLAADLEKLKSKVIRTERPLSSGVYMGNLSSQQLDQRRALLNMIGMTGGNRGGSASSDGIVRVWDVKNAELLNNQFGTMPSLTLACLTKQGQVDLNDAVQALTDLGLIYTAKYPNSSDLDRLAQSHPILNMIDTKKSSLNISGYNFSLGAAVKAGACMLDGGNMLETIKVSPQTIDGILKTILKVKKSLGMFISDVPGERNPYENILYKICLSGDGWPYIASRTSIVGRAWENTVVDLESDNKPQKTGNGGSNKSLQSAGFAAGLTYSQLMTLKDSMLQLDPNSKTWMDIEGRPEDPVEIALYQPSSGCYIHFFREPTDLKQFKQDAKYSHGIDVTDLFAAQPGLTSAVIEALPRNMVITCQGSEDIRKLLESQGRRDIKLIDISLNKADSRKFENAVWDQFKDLCHMHTGVVVEKKKRGGKEEITPHCALMDCIMFDAAVSGGLDTKVLRAVLPRDMVFRTSTPKVVL

SEQ ID NO: 7609 - protein, 569 aa, Artificial Sequence
  derived and/or modified protein sequence (wt) from LASV(Lassa virus/H.sapiens-wt/NGA/2016/ISTH_0419;Clade II)__AVO03540__NP
MSASKEVKSFLWTQSLRRELSGYCSNIKLQVVKDAQALLHGLDFSEVSNVQRLMRKQKRDDGDLKRLRDLNQAVNNLVELKSTQQKSVLRVGTLSSDDLLTLAADLEKLKSKVIRTERPLSSGVYMGNLSSQQLDQRRALLNMIGMTGGGQGASAGRDGIVRVWDVKNAELLNNQFGTMPSLTLACLTKQGQVDLNDAVQALTDLGLIYTAKYPNSSDLDRLSQSHPILNMIDTKKSSLNISGYNFSLGAAVKAGACMLDGGNMLETIRVSPQTMDGILKSILKVKRSLGMFVSDIPGERNPYENILYKICLSGDGWPYIASRTSITGRAWENTIVDLESDSRPQKPGNSGSNRSLQSAGFPAGLTYSQLMTLKDSMLQLDPNAKTWMDIEGRPDDPVEIALYQPSSGCYIHFFREPTDLKQFKQDAKYSHGIDVGDLFTAQPGLTSAVLEALPRNMVITCQGSEDIKKLLESQGRKDIKLVDISMSKPDSRKFENAVWDQYKDLCHMHTGIVVEKKKRGGKEEITPHCALMDCIMFDAAVVGGLDAKILRAVLPRDMVFRTSTPKVVL

SEQ ID NO: 7610 - protein, 569 aa, Artificial Sequence
  derived and/or modified protein sequence (wt) from LASV(Lassa virus/H.sapiens-wt/NGA/2016/ISTH_0447;Clade II)__AVO03560__NP
MSASKEVRSFLWTQSLRRELSGYCSSIKLQVVKDAQALLHGLDFSEVSNVQRLMRKQKRDDSDLKRLRDLNQAVNNLVELKSTQQKSILRVGTLTSDDLLTLAADLEKLKSKVIRTERPLSSGVYMGNLSSQQLEQRRALLNMIGMVGGAQGTQPGRDGVVRVWDVKNPDLLNNQFGTMPSLTLACLTKQGQVDLNDAVLALTDLGLIYTAKYPNSSDLDRLSQSHPILNMVDTKKSSLNISGYNFSLGAAVKAGACMLDGGNMLETIKVTPQTMDGILKSILKVKRSLGMFVSDTPGERNPYENILYKICLSGDGWPYIASRTSIVGRAWENTTVDLESDGKPQKVGAAGSTKSLQSAGFPTGLTYSQLMTLKDSMMQLDPSAKTWIDIEGRPEDPVEIALYQPMSGCYIHFFREPTDLKQFKQDAKYSHGIDVADLFPAQPGLTSAVIEALPRNMVLTCQGSDDIKRLLDSQGRRDIKLIDIALSKVDSRRFENAVWDQCKDLCHMHTGVVVEKKKRGGKEEITPHCALMDCIMYDAAVSGGLNIPVLRAVLPRDMVFRTSSPKVVL

SEQ ID NO: 7611 - protein, 569 aa, Artificial Sequence
  derived and/or modified protein sequence (wt) from LASV(Lassa virus/H.sapiens-wt/NGA/2016/ISTH_0543;Clade II)__AVO03596__NP
MSASKEVKSFLWTQSLRRELSGYCSNIKLQVVKDAQALLHGLDFSEVSNVQRLMRKQKRDDGDLKRLRDLNQAVNNLVELKSTQQKSVLRVGTLTSDDLLILAADLEKLKSKVIRTERPLSSGVYMGNLSTQQLEQRKALLSMIGMVGGAQGTQPGRDGVVRVWDVKNPDLLNNQFGTMPSLTLACLTKQGQVDLNDAVLALTDLGLIYTAKYPNSSDLDRLSQSHPILNMVDTKKSSLNISGYNFSLGAAVKAGACMLDGGNMLETIKVTPQTMDGILKSILKVKRSLGMFVSDTPGERNPYENILYKICLSGDGWPYIASRTSIVGRAWENTTVDLESDGKPQKVGTAGSNKSLQSAGFPTGLTYSQLMTLKDSMMQLDPSAKTWIDIEGRPEDPVEIALYQPMSGCYIHFFREPTDLKQFKQDAKYSHGIDVTDLFSAQPGLTSAVIEALPRNMVLTCQGSDDIKKLLDSQGRRDIKLIDISLSKADSRRFENAVWDQCKDLCHMHTGVVVEKKKRGGKEEITPHCALMDCIMFDAAVSGGLNIPILRAVLPRDMVFRTSSPKVVL

SEQ ID NO: 7612 - protein, 569 aa, Artificial Sequence
  derived and/or modified protein sequence (wt) from LASV(Lassa virus/H.sapiens-wt/NGA/2016/ISTH_0565;Clade II)__AVO03638__NP
MSASKEVKSFLWTQSLRRELSGYCSNIKLQVVKDAQALLHGLDFSEVSNVQRLMRKQKRDDGDLKRLRDLNQAVNNLVELKSTQQKSVLRVGTLTSDDLLTLAADLEKLKSKVIRTERPLSSGVYMGNLSTQQLEQRKALLSMIGMVGGAQGTQPGRDGVVRVWDVKNPDLLNNQFGTMPSLTLACLTKQGQVDLNDAVLALTDLGLIYTAKYPNSSDLDRLSQSHPILNMVDTKKSSLNISGYNFSLGAAVKAGACMLDGGNMLETIKVTPQTMDGILKSILKVKRSLGMFVSDTPGERNPYENILYKICLSGDGWPYIASRTSIVGRAWENTTVDLESDGKPQKVGTAGSNKSLQSAGFPTGLTYSQLMTLKDSMMQLDPSAKTWIDIEGRPEDPVEIALYQPMSGCYIHFFREPTDLKQFKQDAKYSHGIDVTDLFSAQPGLTSAVIEALPRNMVLTCQGSDDIKKLLDSQGRRDIKLIDISLSKADSRRFENAVWDQCKDLCHMHTGVVVEKKKRGGKEEITPHCALMDCIMFDAAVSGGLNIPILRAVLPRDMVFRTSSPKVVL

SEQ ID NO: 7613 - protein, 569 aa, Artificial Sequence
  derived and/or modified protein sequence (wt) from LASV(Lassa virus/H.sapiens-wt/NGA/2016/ISTH_0610;Clade II)__AVO03586__NP
MSASKEVKSFLWTQSLRRELSGYCSNIKLQVVKDAQALLHGLDFSEVSNVQRLMRKQKRDDSDLKRLRDLNQAVNNLVELKSTQQKSVLRVGTLTSDDLLTLAADLEKLKSKVIRTERPLSSGVYMGNLSAQQLEQRRALLNMIGMVGGAQGTQPGRDGVVRVWDVKNPDLLNNQFGTMPSLTLACLTKQGQVDLNDVVLALTDLGLIYTAKYPNSSDLDRLSQSHPILNMVDTKKSSLNISGYNFSLGAAVKAGACMLDGGNMLETIKVTPQTMDGILKSILKVKKSLGMFVSDTPGERNPYENILYKICLSGDGWPYIASRTSIMGRAWENTTVDLESDGKPQKVGTAGSNKSLQSAGFPTGLTYSQLMTLKDSMMQLDPSAKTWIDIEGRPEDPVEIALYQPMSGCYIHFFREPTDLKQFKQDAKYSHGIDVTDLFSAQPGLTSAVIEALPRNMVLTCQGSDDIKRLLDSQGRRDIKLIDIALSKADSRRFENAVWDQCKDLCHMHTGVVVEKKKRGGKEEITPHCALMDCIMYDAAVSGGLNIPVLRAVLPRDMVFRTSSPKVVL

SEQ ID NO: 7614 - protein, 569 aa, Artificial Sequence
  derived and/or modified protein sequence (wt) from LASV(Lassa virus/H.sapiens-wt/NGA/2016/ISTH_0621;Clade II)__AVO03544__NP
MSASKEVKSFLWTQSLRRELSGYCSNIKLQVVKDAQALLHGLDFSEVSNVQRLMRKQKRDDGDLKRLRDLNQAVNNLVELKSTQQKSVLRVGTLSSDDLLILAADLEKLKSKVIRTERPLSSGVYMGNLSSQQLDQRRALLNMIGMTGGSQGTNTGRDGIVRIWDVKNAELLNNQFGTMPSLTLACLTKQGQVDLNDAVQALTDLGLIYTAKYPNSSDLDRLSQSHPILNMIDTKKSSLNISGYNFSLGAAVKAGACMLDGGNMLETIKVSPQTMDGILKSILKVKKSLGMFVSDTPGERNPYENILYKICLSGDGWPYIASRTSITGRAWENTIVDLETDNKSQKPGNSGSNRSLQSAGFPAGLTYSQLMTLKDSMLQLDPNAKTWMDIEGRPDDPVEIALYQPSSGCYIHFFREPTDLKQFKQDAKYSHGIDVSDLFAAQPGLTSAVIEALPRNMVITCQGSEDIRKLLESQGRRDIKLVDISLSKSDSRKFENVVWDQFKDLCHMHTGVVVEKKKKGGKEEITPHCALMDCIMFDAAVMGGLDARVLRAVLPRDMVFRTSTPKVVL

SEQ ID NO: 7615 - protein, 569 aa, Artificial Sequence
  derived and/or modified protein sequence (wt) from LASV(Lassa virus/H.sapiens-wt/NGA/2016/ISTH_0701;Clade II)__AVO03630__NP
MSASKEVKSFLWTQSLRRELSGYCSNIKLQVVKDAQALLHGLDFSEVSNVQRLMRKQKRDDSDLKRLRDLNQAVNNLVELKSTQQKSILRVGTLTSDDLLILAADLEKLKSKVIRTERPLSSGVYMGNLSTQQLEQRRALLNLIGMVGGAQGTQPGRDGVVRVWDVKNPDLLNNQFGTMPSLTLACLTKQGQVDLNDAVLALTDLGLIYTAKYPNSSDLDRLSQSHPILNMVDTKKSSLNISGFNFSLGAAVKAGACMLDGGNMLETIKVTPQTMDGILKSILKVKRSLGMFVSDTPGERNPYENILYKICLSGDGWPYIASRTSIVGRAWENTTVDLESDGKPHKVGTAGSNKSLQSAGFPTGLTYSQLMTLKDSMMQLDPSAKTWIDIEGRPEDPVEIALYQPMSGCYIHFFREPTDLKQFKQDAKYSHGIDVADLFPAQPGLTSAVIEALPRNMVLTCQGSDDIKRLLDSQGRRDIKLIDIALSKADSRRFENAVWDQCKDLCHMHTGVVVEKKKRGGKEEITPHCALMDCIMYDAAVSGGLNIPVLRAVLPRDMVFRTSSPKVVL

SEQ ID NO: 7616 - protein, 569 aa, Artificial Sequence
  derived and/or modified protein sequence (wt) from LASV(Lassa virus/H.sapiens-wt/NGA/2016/ISTH_0702;Clade II)__AVO03558__NP
MSASKEVKSFLWTQSLRRELSGYCSNIKLQVVKDAQALLHGLDFSEVSNVQRLMRKQKRDDSDLKRLRDLNQAVNNLVELKSTQQKSILRVGTLTSDDLLTLAADLEKLKSKVIRTERPLSSGVYMGNLSTQQLEQRRALLSMIGMVGGTQGTQPGRDGVVRVWDVKNPDLLNNQFGTMPSLTLACLTKQGQVDLNDAVLALTDLGLIYTAKYPNSSDLDRLSQSHPILNMVDTKKSSLNISGYNFSLGAAVKAGACMLDGGNMLETIKVTPQTMDGILKSILKVKKSLGMFVSDTPGERNPYENILYKICLSGDGWPYIASRTSIVGRAWENTTVDLESDGKPQKVGTAGSNKSLQSAGFPTGLTYSQLMTLKDSMMQLDPSAKTWIDIEGRPEDPVEIALYQPMSGCYIHFFREPTDLKQFKQDAKYSHGIDVADLFPAQPGLTSAVIEALPRNMVLTCQGSDDIKRLLDSQGRRDIKLIDISLSKADSRRFENAVWDQCKDLCHMHTGVVVEKKKRGGKEEITPHCALMDCIMYDAAVSGGLNIPVLRAVLPRDMVFRTSSPKVVL

SEQ ID NO: 7617 - protein, 569 aa, Artificial Sequence
  derived and/or modified protein sequence (wt) from LASV(Lassa virus/H.sapiens-wt/NGA/2016/ISTH_0717;Clade II)__AVO03548__NP
MSVSKEVKSFLWTQSLRRELSGYCSNIKVQVVKDAQALLHGLDFSEVSNVQRLMRKQKRDDGDLKRLRDLNQAVNNLVELKSTQQKSVLRVGTLSSDDLLVLAADLEKLKSKVIRTERPLSSGIYMGNLSSQQLDQRKALLNMIGMTGGNVGRNTTGDGVVRVWDVKNAELLNNQFGTMPSLTLACLTKQGQVDLNDAVLALTDLGLIYTAKYPNSSDLDRLAQSHPILSMIDTKKSSLNISGYNFSLGAAVKAGACMLDGGNMLETIKVSPQTIDGILKSILKVKRSLGMFISDTPGERNPYENILYKICLSGDGWPYIASRTSIVGRAWENTVVDLESDNKPQKTGNGGSNKSLQSAGFAAGLTYSQLMTLKDSMLQLDPNAKTWMDIEGRPEDPVEIALYQPSSGCYIHFFREPTDLKQFKQDAKYSHGIDVTDLFAAQPGLTSAVIEALPRNMVITCQGSEDIRKLLESQGRRDIKLIDISLSKVDSRKFENAVWDQFKDLCHMHTGIVVEKKKRGGKEEITPHCALMDCIMFDAAVSGGVDAKVLRAVLPRDMVFRTSTPKVVL

SEQ ID NO: 7618 - protein, 569 aa, Artificial Sequence
  derived and/or modified protein sequence (wt) from LASV(Lassa virus/H.sapiens-wt/NGA/2016/ISTH_0753;Clade II)__AVO03610__NP
MSASKEVKSFLWTQSLRRELSGYCSSIKLQVVKDAQALLHGLDFSEVSNVQRLMRKQKRDDSDLKRLRDLNQAVNNLVELKSTQQKSILRVGTLTSDDLLTLAADLEKLKSKVIRTERPLSSGVYMGNLSTQQLEQRRALLNMIGMVGGAQGTQPGRDGVVRVWDVKNPDLLNNQFGTMPSLTLACLTKQGQVDLNDAVLALTDLGLIYTAKYPNSSDLDRLSQSHPILNMVDTKKSSLNISGYNFSLGAAVKAGACMLDGGNMLETIKVTPQTMDGILKSVLKVKRSLGMFVSDTPGERNPYENILYKICLSGDGWPYIASRTSIVGRAWENTTVDLESDGKPQKVGAAGSNKSLQSAGFPTGLTYSQLMTLKDSMMQLDPSAKTWIDIEGRPEDPVEIALYQPMSGCYIHFFREPTDLKQFKQDAKYSHGIDVADLFPAQPGLTSAVIEALPRNMVLTCQGSDDIKRLLDSQGRRDIKLIDIALSKADSRRFENAVWDQCKDLCHMHTGVVVEKKKRGGKEEITPHCALMDCIMYDAAVSGGLNIPVLRAVLPRDMVFRTSSPKVVL

SEQ ID NO: 7619 - protein, 569 aa, Artificial Sequence
  derived and/or modified protein sequence (wt) from LASV(Lassa virus/H.sapiens-wt/NGA/2016/ISTH_0759;Clade II)__AVO03594__NP
MSASKEVKSFLWTQSLRRELSGYCSSIKLQVVKDAQALLHGLDFSEVSNVQRLMRKQKRDDSDLKRLRDLNQAVNNLVELKSTQQKSILRVGTLTSDDLLTLAADLEKLKSKVTRTERPLSSGVYMGNLSTQQLEQRRALLNMIGMVGGAQGTQPGRDGVVRVWDVKNPDLLNNQFGTMPSLTLACLTKQGQVDLNDAVLALTDLGLIYTAKYPNSSDLDRLSQSHPILNMVDTKKSSLNISGYNFSLGAAVKAGACMLDGGNMLETIKVTPQTMDGILKSILKVKRSLGMFVSDAPGERNPYENILYKICLSGDGWPYIASRTSIVGRAWENTTVDLESDGKPQKVGTAGSNKSLQSAGFPTGLTYSQLMTLKDSMMQLDPSAKTWIDIEGRPEDPVEIALYQPMSGCYIHFFREPTDLKQFKQDAKYSHGIDVADLFPAQPGLTSAVIEALPRNMVLTCQGSDDIKKLLDSQGRRDIKLIDIALSRADSRRFENAVWDQCKDLCHMHTGVVVEKKKRGGKEEITPHCALMDCIMYDAAVSGGLNIPVLRAVLPRDMVFRTSSPKVVL

SEQ ID NO: 7620 - protein, 569 aa, Artificial Sequence
  derived and/or modified protein sequence (wt) from LASV(Lassa virus/H.sapiens-wt/NGA/2016/ISTH_0777;Clade II)__AVO03616__NP
MSASKEVKSFLWTQSLRRELSGYCSNIKLQVVKDAQALLHGLDFSEVSNVQRLMRKQKRDDGDLKRLRDLNQAVNNLVELKSTQQKSVLRVGTLTSDDLLTLAADLEKLKSKVIRTERPLSSGVYMGNLSTQQLEQRKVLLSMIGMVGGTQRAQPGKDGVVRVWDVKNPDLLNNQFGTMPSLTLACLTKQGQVDLNDTVLALTDLGLIYTAKYPNSSDLDRLSQSHPILNMVDTKKSSLNISGYNFSLGAAVKAGACMLDGGNMLETIKVTPQTMDGILKSILKVKRSLGMFVSDTPGERNPYENILYKICLSGDGWPYIASRTSIVGRAWENTTVDLESDGKPQKVGTAGSNKSLQSAGFPTGLTYSQLMTLKDSMMQLDPSAKTWIDIEGRPEDPVEIALYQPVSGCYIHFFREPTDLKQFKQDAKYSHGIDVTDLFSAQPGLTSAVIEALPRNMVLTCQGSDDIKKLLDSQGRRDIKLIDISLSKFDSRKFENAVWDQCKDLCHMHTGVVVEKKKRGGKEEITPHCALMDCIMFDAAVSGGLNIPILRAVLPRDMVFRTSSPKVVL

SEQ ID NO: 7621 - protein, 568 aa, Artificial Sequence
  derived and/or modified protein sequence (wt) from LASV(Lassa virus/H.sapiens-wt/NGA/2016/ISTH_0779;Clade II)__AVO03656__NP
SVSKEVKSFLWTQSLRRELSGYCSNIKLQVVKDAQALLHGLDFSEVSNVQRLMRKQKRDDNDLKRLRDLNQAVNNLVELKSVQQKSILRVGTLSSDDLLILAADLEKLKSKVIRTERPLSSGVYMGNLSSQQLEQRKALLNMIGMTGGSQGAQPGRDGVVRVWDVKNSDLLNNQFGTMPSLTLACLTKQGQVDLNDAVLALTDLGLIYTAKYPNTSDLDRLSQSHPILNMVDTKKSSLNISGYNFSLGAAVKAGACMLDGGNMLETIKVTPQTMDGILKSILKVKRALGMFVSDTPGERNPYENILYKICLSGEGWPYIASRTSITGRAWENTIVDLESDSKPQKMGTTGSNKSLQSAGFPAGLTYSQLMTLKDSMMQLDPSAKTWIDIEGRPEDPVEIALYQPISGCYIHFFREPTDLKQFKQDAKYSHGIDVADLFSAQPGLTSAVIEALPRNMVLTCQGSDDIKKLLDSQGRRDIKLIDISLNKADSRRFENAVWDQCKDLCHMHTGVVVEKKKRGGKEEITPHCALMDCIMFDAAVSGGLNIPILRAVLPRDMVFRTSSPKVVL

SEQ ID NO: 7622 - protein, 569 aa, Artificial Sequence
  derived and/or modified protein sequence (wt) from LASV(Lassa virus/H.sapiens-wt/NGA/2016/ISTH_0917;Clade II)__AVO03536__NP
MSASKEVKSFLWTQSLRRELSGYCSNIKLQVVKDAQALLHGLDFSEVSNVQRLMRKQKRDDSDLKRLRDLNQAVNNLVELKSTQQKSILRVGTLSSDDLLTLATDLEKLKSKVIRTERPLSSGVYMGNLSTQQLDQRRALLNMIGMVGGSQGTSAGRDGIVRVWDVRNPELLNNQFGTMPSLTLACLTKQGQVDLNDAVQALTDLGLIYTAKYPNSSDLDRLSQSHPILNMIDTKKSSINISGYNFSLGAAVKAGACMLDGGNMLETIKVSPQSIDGILKSILKVKRTLGMFVSDTPGERNPYENILYKICLSGDGWPYIASRTSITGRAWENTVVDLESDDKPKKPGNNESNRSLQSAGFPAGLTYSQLMTLKDSMLQLDPNAKTWMDIEGRPDDPVEIALYQPNSGCYIHFFREPTDLKQFKQDAKYSHGIDIGDLFASQPGLTSAVIEALPRNMVITCQGSEDIKKLLESQGRKDIRLVDISLSKADSRKFENAVWDQYKDLCHMHTGIVVEKKKKGGKEEITPHCALMDCIMFDAAVMGGLDAKVLRAVLPRDMVFRTSTPRVVL

SEQ ID NO: 7623 - protein, 569 aa, Artificial Sequence
  derived and/or modified protein sequence (wt) from LASV(Lassa virus/H.sapiens-wt/NGA/2016/ISTH_0919;Clade II)__AVO03660__NP
MSASKEVKSFLWTQSLRRELSGYCSNIKLQVVKDAQALLHGLDFSEVSNVQRLMRKQKRDDSDLKRLRDLNQAVNNLVELKSTQQKSILRVGTLTSDDLLTLAADLEKLKSKVIRTERPLSSGVYMGNLSTQQLEQRRALLNLIGMVGGAQGAQPGRDGVVRVWDVKNPDLLNNQFGTMPSLTLACLTKQGQVDLNDVVLALTDLGLIYTAKYPNSSDLDRLSQSHPILNMVDTKKSSLNISGFNFSLGAAVKAGACMLDGGNMLETIKVTPQTMDGILKSILKVKKSLGMFVSDTPGERNPYENILYKICLSGDGWPYIASRTSIVGRAWENTTVDLESDGKPHKVGTAGSNKSLQSAGFPTGLTYSQLMTLKDSMMQLDPSAKTWIDIEGRPEDPVEIALYQPMSGCYIHFFREPTDLKQFKQDAKYSHGIDVADLFPAQPGLTSAVIEALPRNMVLTCQGSDDIKRLLDSQGRRDIKLIDIALSKADSRRFENAVWDQCKDLCHMHTGVVVEKKKRGGKEEITPHCALMDCIMYDAAVSGGLNIPVLRAVLPRDMVFRTSSPKVVL

SEQ ID NO: 7624 - protein, 569 aa, Artificial Sequence
  derived and/or modified protein sequence (wt) from LASV(Lassa virus/H.sapiens-wt/NGA/2016/ISTH_1006;Clade II)__AVO03644__NP
MSASKEVKSFLWTQSLRRELSGYCSNIKLQVVKDAQALLHGLDFSEVSNVQRLMRKQKRDDSDLKRLRDLNQAVNNLVELKSTQQKSILRVGTLTSDDLLTLAADLEKLKSKVIRTERPLSSGVYMGNLSTQQLEQRRALLNMIGMVGGTQGTQPGRDGVVRVWDVKNPDLLNNQFGTMPSLTLACLTKQGQVDLNDAVLALTDLGLIYTAKYPNSSDLDRLSQSHPILNMVDTKKSSLNISGYNFSLGAAVKAGACMLDGGNMLETIKVTPQTMDGILKSILKVKKSLGMFVSDTPGERNPYENILYKICLSGDGWPYIASRTSIVGRAWENTTVDLESDGKPQKVGTAGSNKSLQSAGFPTGLTYSQLMTLKDSMMQLDPSAKTWIDIEGRPEDPVEIALYQPMSGCYIHFFREPTDLKQFKQDAKYSHGIDVADLFPAQPGLTSAVIEALPRNMVLTCQGSDDIKRLLDSQGRRDIKLIDISLSKADSRRFENAVWDQCKDLCHMHTGVVVEKKKRGGKEEITPHCALMDCIMYDAAVSGGLNIPVLRAVLPRDMVFRTSSPKVVL

SEQ ID NO: 7625 - protein, 569 aa, Artificial Sequence
  derived and/or modified protein sequence (wt) from LASV(Lassa virus/H.sapiens-wt/NGA/2016/ISTH_1026;Clade II)__AVO03590__NP
MSASKEVKSFLWTQSLRRELSGYCSNIKLQVVKDAQALLHGLDFSEVSNVQRLMRKQKRDDSDLKRLRDLNQAVNNLVELKSTQQKSILRVGTLTSDDLLTLAADLEKLKSKVIRTERPLSSGVYMGNLSAQQLEQRRALLNLIGMVGGAQGTQPGRDGVVRVWDVKNPDLLNNQFGTMPSLTLACLTKQGQVDLNDAVLALTDLGLIYTAKYPNSSDLDRLSQSHPILNMVDTKKSSLNISGFNFSLGAAVKAGACMLDGGNMLETIKVTPQTIDGILKSILKVKKSLGMFVSDTPGERNPYENILYKICLSGDGWPYIASRTSIVGRAWENTTVDLESDGKPHKVGTAGSNKSLQSAGFPTGLTYSQLMTLKDSMMQLDPSAKTWIDIEGRPEDPVEIALYQPMSGCYIHFFREPTDLKQFKQDAKYSHGIDVADLFPAQPGLTSAVIEALPRNMVLTCQGSDDIKRLLDSQGRRDIKLIDIALSKADSRRFENAVWDQCKDLCHMHTGVVVEKKKRGGKEEITPHCALMDCIMYDAAVSGGLNIPVLRAVLPRDMVFRTSSPKVVL

SEQ ID NO: 7626 - protein, 569 aa, Artificial Sequence
  derived and/or modified protein sequence (wt) from LASV(Lassa virus/H.sapiens-wt/NGA/2016/ISTH_1070;Clade II)__AVO03652__NP
MSASKEVKSFLWTQSLRRELSGYCSNIKLQVVKDAQALLHGLDFSEVSNVQRLMRKQKRDDGDLKRLRDLNQAVNNLVELKSTQQKSVLRVGTLTSDDLLTLAADLEKLKSKVIRTERPLSSGVYMGNLSTQQLEQRRALLSMIGMVGGAQGTQPGRDGVVRVWDVKNPDLLNNQFGTMPSLTLACLTKQGQVDLNDVVLALTDLGLIYTAKYPNSSDLDRLSQSHPILNMVDTKKSSLNISGYNFSLGAAVKAGACMLDGGNMLETIKVTPQTMDGILKSILKVKKSLGMFVSDTPGERNPYENILYKICLSGDGWPYIASRTAIVGRAWENTTVDLESDGKPQKVGATGSNKSLQSAGFPTGLTYSQLMTLKDSMMQLDPSAKTWIDIEGRPEDPVEIALYQPMSGCYIHFFREPTDLKQFKQDAKYSHGIDVTDLFSAQPGLTSAVIEALPRNMVLTCQGSDDIKRLLDSQGRRDIKLIDIALSKADSRRFENAVWDQCKDLCHMHTGVVVEKKKRGGKEEITPHCALMDCIMYDAAVSGGLNIPVLRAVLPRDMVFRTSSPKVVL

SEQ ID NO: 7627 - protein, 569 aa, Artificial Sequence
  derived and/or modified protein sequence (wt) from LASV(Lassa virus/H.sapiens-wt/NGA/2016/ISTH_1150;Clade II)__AVO03628__NP
MSASKEVKSFLWTQSLRRELSGYCSSIKLQVVKDAQALLHGLDFSEVSNVQRLMRKQKRDDSDLKRLRDLNQAVNNLVELKSTQQKSILRVGTLTSDDLLTLAADLEKLKSKVIRTERPLSSGVYMGNLSTQQLEQRRALLSMIGMVGGAQGTQPGRDGVVRVWDVKNPDLLNNQFGTMPSLTLACLTKQGQVDLNDTVLALTDLGLIYTAKYPNSSDLDRLSQSHPILNMVDIKKSSLNISGYNFSLGAAVKAGACMLDGGNMLETIKVTPQTMDGILKSILKVKRSLGMFVSDTPGERNPYENILYKICLSGDGWPYIASRTSIVGRAWENTTVDLESDGKPQKVGTAGSNKSLQSAGFPTGLTYSQLMTLKDSMMQLDPSAKTWIDIEGRPEDPVEIALYQPMSGCYIHFFREPTDLKQFKQDAKYSHGIDVTDLFSAQPGLTSAVIEALPRGMVLTCQGSDDIKKLLDSQGRRDIKLIDISLSKADSRRFENAVWDQCKDLCHMHTGVVVEKKKRGGKEEITPHCALMDCIMFDAAVSGGLNIPILRAVLPRDMVFRTSSPKVVL

SEQ ID NO: 7628 - protein, 569 aa, Artificial Sequence
  derived and/or modified protein sequence (wt) from LASV(Lassa virus/H.sapiens-wt/NGA/2016/ISTH_1174;Clade II)__AVO03556__NP
MSASKEVKSFLWTQSLRRELSGYCSNIKLQVVKDAQALLHGLDFSEVSNVQRLMRKQKRDDSDLKRLRDLNQAVNNLVELKSTQQKSILRVGTLTSDDLLTLAADLEKLKSKVIRTERPLSSGVYMGNLSTQQLEQRRALLNMIGMVGGAQSTQPGRDGVVRVWDVKNPDLLNNQFGTMPSLTLACLTKQGQVDLNDAVLALTDLGLIYTAKYPNSSDLDRLSQSHPILNMVDTKKSSLNISGYNFSLGAAVKAGACMLDGGNMLETIKITPQTMDGILKSILKVKRSLGMFVSDTPGERNPYENILYKVCLSGDGWPYIASRTSIVGRAWENTTVDLESDGKPQKVGTVGSNKSLQSAGFPTGLTYSQLMTLKDSMMQLDPSAKTWIDIEGRPEDPVEIALYQPMSGCYIHFFREPTDLKQFKQDAKYSHGIDVADLFPAQPGLTSAVIEALPRNMVLTCQGSDDIKRLLDSQGRRDIKLIDIALSKADSRRFENAVWDQCKDLCHMHTGVVVEKKKRGGKEEITPHCALMDCIMYDAAVSGGLNIPVLRAVLPRDMVFRTSSPKVVL

SEQ ID NO: 7629 - protein, 569 aa, Artificial Sequence
  derived and/or modified protein sequence (wt) from LASV(Lassa virus/H.sapiens-wt/NGA/2016/ISTH_1207;Clade II)__AVO03600__NP
MSASKEVKSFLWTQSLRRELSGYCSNIKLQVVKDAQALLHGLDFSEVSNVQRLMRKQKRDDSDLKRLRDLNQAVNNLVELKSTQQKSILRVGTLTSDDLLILAADLEKLKSKVIRTERPLSSGVYMGNLSTQQLEQRRALLNMIGMVDGAQGTQPGRDGVVRVWDVKNPDLLNNQFGTMPSLTLACLTKQGQVDLNDAVLALTDLGLIYTAKYPNSSDLDRLSQSHPILNMVDTKKSSLNISGYNFSLGAAVKAGACMLDGGNMLETIKVTPQTMDGILKSILKVKKSLGMFVSDTPGERNPYENILYKICLSGDGWPYIASRTSIVGRAWENTTVDLESDGKSQKVGTAGSNKSLQSAGFPTGLTYSQLMTLKDSMMQLDPSAKTWIDIEGRPEDPVEIALYQPMSGCYIHFFREPTDLKQFKQDAKYSHGIDVADLFPAQPGLTSAVIEALPRNMVLTCQGSDDIKRLLDSQGRRDIKLIDIALSKADSRRFENAVWDQCKDLCHMHTGVVVEKKKRGGKEEITPHCALMDCIMYDAAVSGGLNIPVLRAVLPRDMVFRTSSPKVVL

SEQ ID NO: 7630 - protein, 569 aa, Artificial Sequence
  derived and/or modified protein sequence (wt) from LASV(Lassa virus/H.sapiens-wt/NGA/2016/ISTH_1306;Clade II)__AVO03624__NP
MSASKEVKSFLWTQSLRRELSGYCSNIKLQVVKDAQALLHGLDFSEVSNVQRLMRKQKRDDGDLKRLRDLNQAVNNLVELKSTQQKSILRVGTLTSDDLLTLAADLEKLKSKVIRTERPLSSGVYMGNLSTQQLEQRRALLNMIGMVGGAQGTQPGRDGVVRVWDVKNPDLLNNQFGTMPSLTLACLTKQGQVDLNDAVLALTDLGLIYTAKYPNSSDLDRLSQSHPILNMVDTKKSSLNISGYNFSLGAAVKAGACMLDGGNMLETIKVTPQTMDGILKSILKVKKSLGMFVSDTPGERNPYENILYKICLSGDGWPYIASRTSIVGRAWENTTVDLESDGKPQKVGTAGSNKSLQSAGFPTGLTYSQLMTLKDSMMQLDPSAKTWIDIEGRPEDPVEIALYQPMSGCYIHFFREPTDLKQFKQDAKYSHGIDVADLFPAQPGLTSAVIEALPRNMVLTCQGSDDIKRLLDSQGRRDIKLIDIALSKADSRRFENAVWDQCKDLCHMHTGVVVEKKKRGGKEEITPHCALMDCIMYDAAVSGGLNIPVLRAVLPRDMVFRTSSPKVVL

SEQ ID NO: 7631 - protein, 569 aa, Artificial Sequence
  derived and/or modified protein sequence (wt) from LASV(Lassa virus/H.sapiens-wt/NGA/2016/ISTH_1311;Clade II)__AVO03576__NP
MSASKEVKSFLWTQSLRRELSGYCSNIKLQVVKDAQALLHGLDFSEVSNVQRLMRKQKRDDGDLKRLRDLNQAVNNLVELKSTQQKSVLRVGTLTSDDLLILAADLEKLKSKVIRTERPLSSGVYMGNLSTQQLEQRRALLSMIGMVGGAQGTQPGRDGVVRVWDVKNPDLLNNQFGTMPSLTLACLTKQGQVDLNDAVLALTDLGLIYTVKYPNSSDLDRLSQSHPILNMVDTKKSSLNISGYNFSLGAAVKAGACMLDGGNMLETIKVTPQTIDGILKSILKVKRSLGMFVSDTPGERNPYENILYKICLSGDGWPYIASRTSIVGRAWENTTVDLESDGKPQKVGAAGSNKSLQSAGFPTGLTYSQLMTLKDSMMQLDPSAKTWIDIEGRPEDPVEIALYQPMSGCYIHFFREPTDLKQFKQDAKYSHGIDVTDLFSAQPGLTSAVIEALPRNMVLTCQGSDDIKKLLDSQGRRDIKLIDISLNKTDSRRFENAVWDQCKDLCHMHTGVVVEKKKRGGKEEITPHCALMDCIMFDAAVSGGLNIPILRAVLPRDMVFRTSSPKVVL

SEQ ID NO: 7632 - protein, 569 aa, Artificial Sequence
  derived and/or modified protein sequence (wt) from LASV(Lassa virus/H.sapiens-wt/NGA/2016/ISTH_1423;Clade II)__AVO03578__NP
MSASKEVKSFLWTQSLRRELSGYCSNIKLQVVKDAQALLHGLDFSEVSNVQRLMRKQKRDDSDLKRLRDLNQAVNNLVELKSTQQKSILRVGTLTSDDLLTLAADLEKLKSKVIRTERPLSSGVYMGNLSTQQLEQRRALLNMIGMVSGTQGTQPGRDGVVRVWDVKNPDLLNNQFGTMPSLTLACLTKQGQVDLNDAVLALTDLGLIYTAKYPNSSDLDRLSQSHPILNMVDTKKSSLNISGYNFSLGAAVKAGACMLDGGNMLETIKVTPQTMDGILKSILKVKKSLGMFVSDTPGERNPYENILYKICLSGDGWPYIASRTSIVGRAWENTTVDLESDGKPQKMGTAGSNKSLQSAGFPTGLTYSQLMTLKDSMMQLDPSAKTWIDIEGRPEDPVEIALYQPMSGCYIHFFREPTDLKQFKQDAKYSHGIDVADLFPAQPGLTSAVIEALPRNMVLTCQGSDDIKKLLDSQGRRDIKLIDIALSKADSRRFENAVWDQCKDLCHMHTGVVVEKKKRGGKEEITPHCALMDCIMYDAAVSGGLNIPVLRAVLPRDMVFRTSNPKVVL

SEQ ID NO: 7633 - protein, 569 aa, Artificial Sequence
  derived and/or modified protein sequence (wt) from LASV(Lassa virus/H.sapiens-wt/NGA/2016/ISTH_1472;Clade II)__AVO03606__NP
MSASKEVKSFLWTQSLRRELSGYCSNIKLQVVKDAQALLHGLDFSEVSNVQRLMRKQKRDDSDLKRLRDLNQAVNNLVELKSTQQKSILRVGTLTSDDLLTLAADLEKLKSKVIRTERPLSSGVYMGNLSTQQLEQRRALLNMIGMVGGIQGTQPGRDGVVRVWDVKNPDLLNNQFGTMPSLTLACLTKQGQVDLNDTVQALTDLGLIYTAKYPNSSDLDRLSQSHPILNMVDTKKSSLNISGYNFSLGAAVKAGACMLDGGNMLETIKVTPQTMDGILKSILKVKKSLGMFVSDTPGERNPYENILYKICLSGDGWPYIASRTSIVGRAWENTTVDLESDGKPQKVGTAGSNKSLQSAGFPTGLTYSQLMTLKDSMMQLDPSAKTWIDIEGRPEDPVEIALYQPMSGCYIHFFREPTDLKQFKQDAKYSHGIDVADLFPAQPGLTSAVIEALPRNMVLTCQGSDDIKRLLDSQGRRDIKLIDISLSKTDSRRFENAVWDQCKDLCHMHTGVVVEKKKRGGKEEITPHCALMDCIMYDAAVSGGLNIPVLRAVLPRDMVFRTSSPKVVL

SEQ ID NO: 7634 - protein, 569 aa, Artificial Sequence
  derived and/or modified protein sequence (wt) from LASV(Lassa virus/H.sapiens-wt/NGA/2016/ISTH_1474;Clade II)__AVO03614__NP
MSASKEVKSFLWTQSLRRELSGYCSNIKLQVVKDAQALLHGLDFSEVSNVQRLMRKQKRDDSDLKRLRDLNQAVNNLVELKSTQQKSILRVGTLTSDDLLTLAADLEKLKSKVIRTERPLSSGVYMGNLSTQQLEQRRALLNMIGMVGGIQGTQPGRDGVVRVWDVKNPDLLNNQFGTMPSLTLACLTKQGQVDLNDTVQALTDLGLIYTAKYPNSSDLDRLSQSHPILNMVDTKKSSLNISGYNFSLGAAVKAGACMLDGGNMLETIKVTPQTMDGILKSILKVKRSLGMFVSDTPGERNPYENILYKICLSGDGWPYIASRTSIVGRAWENTTVDLESDGKPQKVGTAGSNKSLQSAGFPTGLTYSQLMTLKDSMMQLDPSAKTWIDIEGRPEDPVEIALYQPMSGCYIHFFREPTDLKQFKQDAKYSHGIDVADLFPAQPGLTSAVIEALPRNMVLTCQGSDDIKRLLDSQGRRDIKLIDIALSKADSRRFENAVWDQCKDLCHMHTGVVVEKKKRGGKEEITPHCALMDCIMYDAAVSGGLNIPVLRAVLPRDMVFRTSSPKVVL

SEQ ID NO: 7635 - protein, 569 aa, Artificial Sequence
  derived and/or modified protein sequence (wt) from LASV(Lassa virus/H.sapiens-wt/NGA/2016/ISTH_1496;Clade II)__AVO03580__NP
MSASKEVKSFLWTQSLRRELSGYCSNIKLQVVKDAQALLHGLDFSEVSNVQRLMRKQKRDDSDLKRLRDLNQAVNNLVELKSTQQKSILKVGTLTSDDLLTLAADLEKLKSKVIRTERPLSSGVYMGNLSTQQLEQRRALLNMIGMVGGAQGTQPGRDGVVRVWDVKNPDLLNNQFGTMPSLTLACLTKQGQVDLNDAVLALTDLGLIYTAKYPNSSDLDRLSQSHPILNMVDTKKSSLNISGYNFSLGAAVKAGACMLDGGNMLETIKVTPQTMDGILKSILKVKRSLGMFVSDTPGERNPYENILYKICLSGDGWPYIASRTSIVGRAWENTTVDLESDGKPQKVGTIGSNKSLQSAGFPTGLTYSQLMTLKDSMMQLDPSAKTWIDIEGRPEDPVEIALYQPMSGCYIHFFREPTDLKQFKQDAKYSHGIDVADLFPAQPGLTSAVIEALPRNMVLTCQGSDDIKRLLDSQGRRDIKLIDIALSKADSRRFENAVWDQCKDLCHMHTGVVVEKKKRGGKEEITPHCALMDCIMYDAAVSGGLNIPVLRAVLPRDMVFRTSSPKVVL

SEQ ID NO: 7636 - protein, 569 aa, Artificial Sequence
  derived and/or modified protein sequence (wt) from LASV(Lassa virus/H.sapiens-wt/NGA/2016/ISTH_1541;Clade II)__AVO03554__NP
MSASKEVKSFLWTQSLRRELSGYCSNIKLQVVKDAQALLHGLDFSEVSNVQRLMRKQKRDDGDLKRLRDLNQAVNNLVELKSTQQKSILRVGTLSSDDLLILAADLEKLKSKVIRTERPLSSGVYMGNLSSQQLDQRRALLNMIGMTGGNQGASTGRDGIVRVWDVKNAELLNNQFGTMPSLTLACLTKQGQVDLNDAVQALTDLGLIYTAKYPNSSDLDRLSQSHPILNMIDTKKSSLNISGYNFSLGAAVKAGACMLDGGNMLETIKVSPQTMDGILKSILKVKKSLGMFVSDTPGERNPYENILYKICLSGDGWPYIASRTSIIGRAWENTIVDLEADNKPQKSGNNGSNRSLQSAGFPSGLTYSQLMTLKDSMLQLDPNAKTWMDIEGRPDDPVEIALYQPSSGCYIHFFREPTDLKQFKQDAKYSHGIDVSDLFAAQPGLTSAVIEALPRNMVITCQGSEDIKKLLESQGRKDIKLVDISLSKLDSRKFENVVWDQYKDLCHMHTGIVVEKKKRGGKEEITPHCALMDCIMFDAAVMGGLDARVLRAVLPRDMVFRTSTPKVVL

SEQ ID NO: 7637 - protein, 569 aa, Artificial Sequence
  derived and/or modified protein sequence (wt) from LASV(Lassa virus/H.sapiens-wt/NGA/2016/ISTH_1546;Clade II)__AVO03538__NP
MSASKEVKSFLWTQSLRRELSGYCSNIKLQVVKDAQALLHGLDFSEVSNVQRLMRKQKRDDGDLKRLRDLNQAVNNLVELKSTQQKSVLRVGTLSSDDLLILAADLEKLKSKVIRTERPLSSGVYMGNLSSQQLDQRRALLNMIGMTGGNQGTNAGRDGIVRIWDVKNAELLNNQFGTMPSLTLACLTKQGQVDLNDVVQALTDLGLIYTAKYPNSSDLDRLSQSHPILNMIDTKKSSLNISGYNFSLGAAVKAGACMLDGGNMLETIKVSPQTMDGILKSILKVKRSLGMFVSDTPGERNPYENILYKICLSGDGWPYIASRTSIIGRAWENTIVDLETNNKPQKPGNNGSNRSLQSAGFPAGLTYSQLMTLKDSMLQLDPNAKTWMDIEGRPDDPVEIALYQPSSGCYIHFFREPTDLKQFKQDAKYSHGIDLSDLFAAQPGLTSAVIEALPRNMVITCQGSEDIMKLLESQGRKDIKLVDISLSKSDSRKFENAVWDQYKDLCHMHTGIVVEKKKKGGKEEITPHCALMDCIMFDAAVMGGLDAKVLRAVLPKDMVFRTSTPKVVL

SEQ ID NO: 7638 - protein, 569 aa, Artificial Sequence
  derived and/or modified protein sequence (wt) from LASV(Lassa virus/H.sapiens-wt/NGA/2016/ISTH_1568;Clade II)__AVO03562__NP
MSASKEVKSFLWTQSLRRELSGYCSSIKLQVVKDAQALLHGLDFSEVSNVQRLMRKQKRDDSDLKRLRDLNQAVNNLVELKSTQQKSILRVGTLTSDDLLTLAADLEKLKSKVIRTERPLSSGVYMGNLSSQQLEQRRALLNMIGMVGGAQGTQPGRDGVVRVWDVKNPDLLNNQFGTMPSLTLACLTKQGQVDLNDAVLALTDLGLIYTAKYPNSSDLDRLSQSHPILNMVDTKKSSLNISGYNFSLGAAVKAGACMLDGGNMLETIKVTPQTMDGILKSILKVKRSLGMFVSDTPGERNPYENILYKICLSGDGWPYIASRTSIVGRAWENTTVDLESDGKPQKVGPAGSNKSLQSAGFPTGLTYSQLMTLKDSMMQLDPSAKTWIDIEGRPEDPVEIALYQPISGCYIHFFREPTDLKQFKQDAKYSHGIDVADLFPAQPGLTSAVIEALPRNMVLTCQGSDDIKRLLDSQGRRDIKLIDIALSKADSRRFENAVWDQCKDLCHMHTGVVVEKKKRGGKEEITPHCALMDCIMYDAAVSGGLNIPVLRAVLPRDMVFRTSSPKVVL

SEQ ID NO: 7639 - protein, 569 aa, Artificial Sequence
  derived and/or modified protein sequence (wt) from LASV(Lassa virus/H.sapiens-wt/NGA/2016/ISTH_1591;Clade II)__AVO03648__NP
MSASKEVKSFLWTQSLRRELSGYCSSIKLQVVKDAQALLHGLDFSEVSNVQRLMRKQKRDDSDLKRLRDLNQAVNNLVELKSTQQKSILRVGTLTSDDLLTLAADLEKLKSKVIRTERPLSSGVYMGNLSSQQLEQRRALLNMIGMVGGAQGTQPGRDGVVRVWDVKNPDLLNNQFGTMPSLTLACLTKQGQVDLNDAVLALTDLGLIYTAKYPNSSDLDRLSQSHPILNMVDTKKSSLNISGYNFSLGAAVKAGACMLDGGNMLETIKVTPQTMDGILKSILKVKRSLGMFVSDTPGERNPYENILYKICLSGDGWPYIASRTSIVGRAWENTTVDLESDGKPQKVGSAGSNKSLQSAGFPTGLTYSQLMTLKDSMMQLDPSAKTWIDIEGRPEDPVEIALYQPMSGCYIHFFREPTDLKQFKQDAKYSHGIDVADLFPAQPGLTSAVIEALPRNMVLTCQGSDDVKRLLDSQGRRDIKLIDIALSKADSRRFENAVWDQCKDLCHMHTGVVVEKKKRGGKEEITPHCALMDCIMYDAAVSGGLNIPVLRAVLPRDMVFRTSSPKVVL

SEQ ID NO: 7640 - protein, 569 aa, Artificial Sequence
  derived and/or modified protein sequence (wt) from LASV(Lassa virus/H.sapiens-wt/NGA/2016/ISTH_1604;Clade II)__AVO03542__NP
MSASKEVKSFLWTQSLRRELSGYCSNIKLQVVKDAQALLHGLDFSEVSNVQRLMRKQKRDDGDLKRLRDLNQAVNNLVELKSTQQKSILRVGTLSSDDLLTLAADLEKLKSKVIRTERPLSSGVYMGNLSTQQLDQRRALLNMIGMVGGSQGTSAGRDGIVRVWDVRNPELLNNQFGTMPSLTLACLTKQGQVDLNDAVQALTDLGLIYTAKYPNSSDLDRLSQSHPILNMIDTKKSSINISGYNFSLGAAVKAGACMLDGGNMLETIKVSPQSMDGILKSILKVKRSLGMFVSDTPGERNPYENILYKICLSGDGWPYIASRTSITGRAWENTVVDLESDNKPKKPGNNESNRSLQSAGFPAGLTYSQLMTLKDSMLQLDPNAKTWMDIEGRPDDPVEIALYQPNSGCYIHFFREPTDLKQFKQDAKYSHGIDISDLFAAQPGLTSAVIEALPRNMVITCQGSEDVKKLLESQGRKDIRLVDISLSKADSRKFENAVWDQYKDLCHMHTGIVVEKKKKGGKEEITPHCALMDCIMFDAAVMNGLDARVLRAVLPRDMVFRTSTPRVVL

SEQ ID NO: 7641 - protein, 569 aa, Artificial Sequence
  derived and/or modified protein sequence (wt) from LASV(Lassa virus/H.sapiens-wt/NGA/2016/ISTH_1609;Clade II)__AVO03662__NP
MSASKEVKSFLWTQSLRRELSGYCSNIKLQVVKDAQALLHGLDFSEVSNVQRLMRKQKRDDGDLKRLRDLNQAVNNLVELKSTQQKSILRVGTLSSDDLLILAADLEKLKSKVIRTERPLSSGVYMGNLSSQQLDQRRALLNMIGMTGGNQGTNTGRDGIVRVWDVKNAELLNNQFGTMPSLTLACLTKQGQVDLNDAVQALTDLGLIYTAKYPNSSDLDRLSQSHPILNMIDTKKSSLNISGYNFSLGAAVKAGACMLDGGNMLETIKVSPQTMDGILKSILKVKKSLGMFVSDTPGERNPYENILYKICLSGDGWPYIASRTSITGRAWENTMVDLETNNKSQKPGNNGSNRSLQSAGFPAGLTYSQLMTLKDSMLQLDPNAKTWMDIEGRPDDPVEIALYQPSSGCYIHFFREPTDLKQFKQDAKYSHGIDISDLFAAQPGLTSAVIEVLPRNMTITCQGSEDIKKLLESQGRKDIKLVDISLSKLDSRKFENAVWDQFKDLCHMHTGIVVEKKKKGGKEEITPHCALMDCIMFDAAVMGGLDAKVLRAVLPRDMVFRTSTPKVVL

SEQ ID NO: 7642 - protein, 569 aa, Artificial Sequence
  derived and/or modified protein sequence (wt) from LASV(Lassa virus/H.sapiens-wt/NGA/2016/ISTH_1610;Clade II)__AVO03604__NP
MSASKEIKSFLWTQSLRRELSGYCSSIKLQVVKDAQALLHGLDFSEVSNVQRLMRKQKRDDSDLKRLRDLNQAVNNLVELKSTQQKSILRVGTLTSDDLLTLAADLEKLKSKVIRTERPLSSGVYMGNLSTQQLEQRRALLNMIGMVGGAQGTQPGRDGVVRVWDVKNPDLLNNQFGTMPSLTLACLTKQGQVDLNDAVLALTDLGLIYTAKYPNSSDLDRLSQSHPILNMVDTKKSSLNISGYNFSLGAAVKAGACMLDGGNMLETIKVTPQTMDGILKSILKVKRSLGMFVSDTPGERNPYENILYKICLSGDGWPYIASRTSIVGRAWENTTVDLESDGKPQKVGTAGSNKSLQSAGFPTGLTYSQLMTLKDSMMQLDPSAKTWIDIEGRPEDPVEIALYQPMSGCYIHFFREPTDLKQFKQDAKYSHGIDVADLFPAQPGLTSAVIEALPRNMVLTCQGSDDIKKLLDSQGRRDIKLIDIALSKTDSRRFENAVWDQCKDLCHMHTGVVVEKKKRGGKEEITPHCALMDCIMYDAAVSGGLNIPVLRAVLPRDMVFRTSSPKVVL

SEQ ID NO: 7643 - protein, 569 aa, Artificial Sequence
  derived and/or modified protein sequence (wt) from LASV(Lassa virus/H.sapiens-wt/NGA/2018/ISTH_0541;Clade II)__AVV65114__NP
MSASKEVKSFLWTQSLRRELSGYCSSIKLQVVKDAQALLHGLDFSEVSNVQRLMRKQKRDDSDLKRLRDLNQAVNNLVELKSTQQKSILRVGTLTSDDLLTLAADLEKLKSKVIRTERPLSSGVYMGNLSTQQLEQRRALLNMIGMVGGAQGTQPGRDGVVRVWDVKNPDLLNNQFGTMPSLTLACLTKQGQVDLNDAVLALTDLGLIYTAKYPNSSDLDRLSQSHPILNMVDTKKSSLNISGYNFSLGAAVKAGACMLDGGNMLETIKVTPQTMDGILKSILKVKRSLGMFVSDTPGERNPYENILYKICLSGDGWPYIASRTSIVGRAWENTTVDLESDGKPQKVGVAGSNKSLQSAGFPTGLTYSQLMTLKDSMMQLDPSAKTWIDIEGRPEDPVEIALYQPMSGCYIHFFREPTDLKQFKQDAKFSHGIDVADLFPAQPGLTSAVIEALPRNMVLTCQGSDDIKRLLDSQGRRDIKLIDIALSKADSRRFENAVWDQCKDLCHMHTGVVVEKKKRGGKEEITPHCALMDCIMYDAAVSGGLNIPVLRAVLPRDMVFRTSSPKVVL

SEQ ID NO: 7644 - protein, 569 aa, Artificial Sequence
  derived and/or modified protein sequence (wt) from LASV(Lassa virus/H.sapiens-wt/NGA/2018/ISTH_0664;Clade II)__AVV65096__NP
MSASKEVKSFLWTQSLRRELSGYCSSIKLQVVKDAQALLHGLDFSEVSNVQRLMRKQKRDDSDLKRLRDLNQAVNNLVELKSTQQKSILRVGTLTSDDLLTLAADLEKLKSKVIRTERPLSSGVYMGNLSTQQLEQRRALLNMIGMVGGTQGTQPGRDGVVRVWDVKNPDLLNNQFGTMPSLTLACLTKQGQVDLNDAVLALTDLGLIYTAKYPNSSDLDRLSQSHPILNMVDTKKSSLNISGYNFSLGAAVKAGACMLDGGNMLETIKVTPQTMDGILKSILKVKKSLGMFVSDTPGERNPYENILYKICLSGDGWPYIASRTSIVGRAWENTTVDLEPDGKLQKVGTVGSNKSLQSAGFPTGLTYSQLMTLKDSMMQLDPSAKTWIDIEGRPEDPVEIALYQPMSGCYIHFFREPTDLKQFKQDAKYSHGIDVADLFPAQPGLTSAVIEALPRNMVLTCQGSDDIKRLLDSQGRRDIKLIDISLSKADSRRFENAVWDQCKDLCHMHTGVVVEKKKRGGKEEITPHCALMDCIMYDAAVSGGLNIPVLRAVLPRDMVFRTSSPKVVL

SEQ ID NO: 7645 - protein, 569 aa, Artificial Sequence
  derived and/or modified protein sequence (wt) from LASV(Lassa virus/H.sapiens-wt/NGA/2018/ISTH_0959;Clade II)__AVV65100__NP
MSASKEVKSFLWTQSLRRELSGYCSNIKLQVVKDAQALLHGLDFSEVSNVQRLMRKQKRDDSDLKRLRDLNQAVNNLVELKSTQQKSILRVGTLTSDDLLTLAADLEKLKSKVIRTERPLSSGVYMGNLSTQQLEQRRALLNLIGMVGGAQGTQPGRDGVVRVWDVKNPDLLNNQFGTMPSLTLACLTKQGQVDLNDVVLALTDLGLIYTAKYPNSSDLDRLSQSHPILNMVDTKKSSLNISGFNFSLGAAVKAGACMLDGGNMLETIKVTPQTMDGILKSILKVKKSLGMFVSDTPGERNPYENILYKICLSGDGWPYIASRTSIVGRAWENTTVDLESDGKPHKVGTAGSNKSLQSAGFPTGLTYSQLMTLKDSMMQLDPSAKTWIDIEGRPEDPVEIALYQPMSGCYIHFFREPTDLKQFKQDAKYSHGIDVADLFPAQPGLTSAVIEALPRNMVLTCQGSDDIKRLLDSQGRKDIKLIDIALSKTDSRRFENAVWDQCKDLCHMHTGVVVEKKKRGGKEEITPHCALMDCIMYDAAVSGGLNIPVLRAVLPRDMVFRTSSPKVVL

SEQ ID NO: 7646 - protein, 569 aa, Artificial Sequence
  derived and/or modified protein sequence (wt) from LASV(Lassa virus/H.sapiens-wt/NGA/2018/ISTH_1024;Clade II)__AVV65106__NP
MSASKEVKSFLWTQSLRRELSGYCSSIKLQVVKDAQALLHGLDFSEVSNVQRLMRKQKRDDSDLKRLRDLNQAVNNLVELKSTQQKSVLRVGTLSSDDLLTLAADLEKLKSKVIRTERPLSSGVYMGNLSTQQLEQRRALLNMIGMVGGAQGTQPGRDGVVRVWDVKNPDLLNNQFGTMPSLTLACLTKQGQVDLNDAVLALTDLGLIYTAKYPNSSDLDRLSQSHPILNMVDTKKSSLNISGYNFSLGAAVKAGACMLDGGNMLETIKVTPQTIDGILKSILKVKKSLGMFVSDTPGERNPYENILYKICLSGDGWPYIASRTSIVGRAWENTTVDLESDGKPQKVGTAGSNKSLQSAGFPTGLTYSQLMTLKDSMMQLDPSAKTWIDIEGRPEDPVEIALYQPMSGCYIHFFREPTDLKQFKQDAKYSHGIDVVDLFPAQPGLTSAVIEALPRNMVLTCQGSDDIKRLLDSQGRRDIKLIDIALSKADSRRFENAVWDQCKDLCHMHTGVVVEKKKRGGKEEITPHCALMDCIMYDAAVSGGLNIPVLRAVLPRDMVFRTSSPKVVL

SEQ ID NO: 7647 - protein, 569 aa, Artificial Sequence
  derived and/or modified protein sequence (wt) from LASV(Lassa virus/H.sapiens-wt/NGA/2018/ISTH_1079;Clade II)__AVV65108__NP
MSASKEVKSFLWTQSLRRELSGYCSNIKLQVVKDAQALLHGLDFSEVSNVQRLMRKQKRDDSDLKRLRDLNQAVNNLVELKSTQQKSILRVGTLTSDDLLTLAADLEKLKSKVIRTERPLSSGVYMGNLSTQQLEQRRALLNMIGMVGGTQGTQPGRDGVVRVWDVKNPDLLNNQFGTMPSLTLACLTKQGQVDLNDAVLALTDLGLIYTAKYPNSSDLDRLSQSHPILNMVDTKKSSLNISGYNFSLGAAVKAGACMLDGGNMLETIKVTPQTMDGILKSILKVKKSLGMFVSDTPGERNPYENILYKICLSGDGWPYIASRTSIVGRAWENTTVDLESDGKPQKVGTAGSNKSLQSAGFPTGLTYSQLMTLKDSMMQLDPSAKTWIDIEGRPEDPVEIALYQPISGCYIHFFREPTDLKQFKQDAKYSHGIDVADLFPAQPGLTSAVIEALPRNMVLTCQGSDDIKRLLDSQGRRDIKLIDISLSKADSRRFENAVWDQCKDLCHMHTGVVVEKKKRGGKEEITPHCALMDCIMYDAAVSGGLNIPVLRAVLPRDMVFRTSSPKVVL

SEQ ID NO: 7648 - protein, 569 aa, Artificial Sequence
  derived and/or modified protein sequence (wt) from LASV(Lassa virus/H.sapiens-wt/NGA/2018/ISTH_1375;Clade II)__AVV65116__NP
MSASKEVKSFLWTQSLRRELSGYCSNIKLQVVKDAQALLHGLDFSEVSNVQRLMRKQKRDDSDLKRLRDLNQAVNNLVELKSTQQKSILRVGTLTSDDLLILAADLEKLKSKVIRTERPLSSGVYMGNLSTQQLEQRRALLNLIGMVGGAQGTQPGRDGVVRVWDVKNPDLLNNQFGTMPSLTLACLTKQGQVDLNDAVLALTDLGLIYTAKYPNSSDLDRLSQSHPILNMVDTKKSSLNISGFNFSLGAAVKAGACMLDGGNMLETIRITPQTMDGILKSILKVKKSLGMFVSDTPGERNPYENILYKICLSGDGWPYIASRTSIVGRAWENTTVDLESDGKPHKVGTAGSNKSLQSAGFPTGLTYSQLMTLKDSMMQLDPSAKTWIDIEGRPEDPVEIALYQPMSGCYIHFFREPTDLKQFKQDAKYSHGIDVADLFPAQPGLTSAVIEALPRNMVLTCQGSDDIKRLLDSQGRRDIKLIDIALSKADSRRFENAVWDQCKDLCHMHTGVVVEKKKRGGKEEITPHCALMDCIMYDAAVSGGLNIPVLRAVLPRDMVFRTSSPKVVL

SEQ ID NO: 7649 - protein, 569 aa, Artificial Sequence
  derived and/or modified protein sequence (wt) from LASV(Lassa virus/H.sapiens-wt/NGA/2018/ISTH_1381;Clade II)__AVV65112__NP
MSVSKEVKSFLWTQSLRRELSGYCSSIKLQVVKDAQALLHGLDFSEVSNVQRLMRKQKRDDSDLKRLRDLNQAVNNLVELKSTQQKSILRVGTLTSDDLLTLAADLEKLKSKVIRTERPLSSGVYMGNLSTQQLEQRRALLNMIGMAGGAQGTQPGRDGVVRVWDVKNPDLLNNQFGTMPSLTLACLTKQGQVDLNDAVLALTDLGLIYTAKYPNSSDLDRLSQSHPILNMVDTKKSSLNISGYNFSLGAAVKAGACMLDGGNMLETIKVTPQTMDGILKSILKVKRSLGMFVSDTPGERNPYENILYKICLSGDGWPYIASRTSIVGRAWENTTVDLESDGKPQKIGNTGSNKSLQSAGFPTGLTYSQLMTLKDSMMQLDPSAKTWIDIEGRPEDPVEIALYQPMSGCYIHFFREPTDLKQFKQDAKYSHGIDVADLFPAQPGLTSAVIEALPRNMVLTCQGSDDIKRLLESQGRRDIKLIDIALSKADSRRFENAVWDQCKDLCHMHTGVVVEKKKRGGKEEITPHCALMDCIMYDAAVSGGLNIPVLRAVLPRDMVFRTSSPKVVL

SEQ ID NO: 7650 - protein, 569 aa, Artificial Sequence
  derived and/or modified protein sequence (wt) from LASV(LASV003-NIG-2008;Clade II)__AIT17581__NP
MSASKEVKSFLWTQSLRRELSGYCSSIKLQVVKDAQALLHGLDFSEVSNVQRLMRKQKRDDSDLKRLRDLNQAVNNLVELKSTQQKSVLRVGTLTSDDLLTLAADLEKLKSKVIRTERPLSSGVYMGNLSAQQLEQRRTLLNMIGMVGGAQGTQPGRDGVVRVWDVKNPDLLNNQFGTMPSLTLACLTKQGQVDLNDVVLALTDLGLIYTAKYPNSSDLDRLSQSHPILSMVDTKKSSLNISGYNFSLGAAVKAGACMLDGGNMLETIKVTPQTMDGILKSILKVKKSLGMFVSDTPGERNPYENILYKICLSGDGWPYIASRTSIVGRAWENTTVDLESDGKPQKVGTAGSNKSLQSAGFPTGLTYSQLMTLKDSMMQLDPSAKTWIDIEGRPEDPVEIALYQPMSGCYIHFFREPTDLKQFKQDAKYSHGIDVTDLFPAQPGLTSAVIEALPRNMVLTCQGSDDIKRLLDSQGRRDIKLIDIALSKADSRRFENAVWDQCKDLCHMHTGVVVEKKKRGGKEEITPHCALMDCIMYDAAVSGGLNIPVLRAVLPRDMVFRTSSPKVVL

SEQ ID NO: 7651 - protein, 569 aa, Artificial Sequence
  derived and/or modified protein sequence (wt) from LASV(LASV035-NIG-2009;Clade II)__AIT17589__NP
MSASKEVKSFLWTQSLRRELSGYCSSIKLQVVKDAQALLHGLDFSEVSNVQRLMRKQKRDDSDLKRLRDLNQAVNNLVELKSTQQKSILRVGTLTSDDLLTLAADLEKLKSKVIRTERPLSSGVYMGNLSAQQLEQRRALLNMIGMVGGAQGTQPGRDGVVRVWDVKNPDLLNNQFGTMPSLTLACLTKQGQVDLNDAVLALTDLGLIYTAKYPNSSDLDRLSQSHPILNMVDTKKSSLNISGYNFSLGAAVKAGACMLDGGNMLETIKVTPQTMDGILKSILKVKRSLGMFVSDTPGERNPYENILYKICLSGDGWPYIASRTSIVGRAWENTTVDLESDGKPQKVGTTGSNKSLQSAGFPTGLTYSQLMTLKDSMMQLDPSAKTWIDIEGRPEDPVEIALYQPMSGCYIHFFREPTDLKQFKQDAKYSHGIDVADLFPAQPGLTSAVIEALPRNMVLTCQGSDDIKKLLDSQGRRDIKLIDIALSKADSRKFENAVWDQCKDLCHMHTGVVVEKKKRGGKEEITPHCALMDCIMYDAAVSGGLNIPVLRAVLPRDMVFRTSSPKVVL

SEQ ID NO: 7652 - protein, 569 aa, Artificial Sequence
  derived and/or modified protein sequence (wt) from LASV(LASV042-NIG-2009;Clade II)__AIT17593__NP
MSASKEVKSFLWTQSLRRELSGYCSSIKLQVVKDAQALLHGLDFSEVSNVQRLMRKQKRDDGDLKRLRDLNQAVNNLVELKSTQQKSILRVGTLTSDDLLTLAADLEKLKSKVIRTERPLSSGVYMGNLSSQQLEQRRALLNMIGMVGGAQGTQPGRDGVVRVWDVKNPDLLNNQFGTMPSLTLACLTKQGQVDLNDAVLALTDLGLIYTAKYPNSSDLDRLSQSHPILNMVDTKKSSLNISGYNFSLGAAVKAGACMLDGGNMLETIKVTPQTMDGILKSILKVKRSLGMFVSDTPGERNPYENILYKICLSGDGWPYIASRTSIVGRAWENTTVDLESDGKPQKVGAAGSTKSLQSAGFPTGLTYSQLMTLKDSMMQLDPSAKTWIDIEGRPEDPVEIALYQPMSGCYIHFFREPTDLKQFKQDAKYSHGIDVADLFPAQPGLTSAVIEALPRNMVLTCQGSDDIKRLLDSQGRRDIKLIDIALSKVDSRRFENAVWDQCKDLCHMHTGVVVEKKKRGGKEEITPHCALMDCIMYDAAVSGGLNIPVLRAVLPRDMVFRTSSPKVVL

SEQ ID NO: 7653 - protein, 569 aa, Artificial Sequence
  derived and/or modified protein sequence (wt) from LASV(LASV049-NIG-2009;Clade II)__AIT17605__NP
MSASKEVKSFLWTQSLRRELSGYCSSIKLQVVKDAQALLHGLDFSEVSNVQRLMRKQKRDDSDLKRLRDLNQAVNNLVELKSTQQKSILRVGTLTSDDLLTLAADLEKLKSKVIRTERPLSSGVYMGNLSTQQLEQRRALLNMIGMAGGAQGTQPGRDGVVRVWDVKNPDLLNNQFGTMPSLTLACLTKQGQVDLNDAVLALTDLGLIYTAKYPNSSDLDRLSQSHPILNMVDTKKSSLNISGYNFSLGAAVKAGACMLDGGNMLETIKVTPQTMDGILKSILKVKKSLGMFVSDTPGERNPYENILYKICLSGDGWPYIASRTSIVGRAWENTTVDLESDGKPQKVGTAGSNKSLQSAGFPTGLTYSQLMTLKDSMMQLDPSAKTWIDIEGRPEDPVEIALYQPMSGCYIHFFREPTDLKQFKQDAKYSHGIDVADLFSAQPGLTSAVIEALPRNMVLTCQGSDDIKRLLDSQGRRDIKLIDIALSKADSRRFENAVWDQCKDLCHMHTGVVVEKKKRGGKEEITPHCALMDCIMYDAAVSGGLNIPVLRAVLPRDMVFRTSSPKVVL

SEQ ID NO: 7654 - protein, 569 aa, Artificial Sequence
  derived and/or modified protein sequence (wt) from LASV(LASV052-NIG-2008;Clade II)__AIT17609__NP
MSASKEVKSFLWTQSLRRELSGYCSSIKLQVVKDAQALLHGLDFSEVSNVQRLMRKQKRDDSDLKRLRDLNQAVNNLVELKSTQQKSILRVGTLTSDDLLTLAADLEKLKSKVIRTERPLSSGVYMGNLSTQQLEQRRALLNMIGMAGGAQGTQPGRDGVVRVWDVKNPDLLNNQFGTMPSLTLACLTKQGQVDLNDAVLALTDLGLIYTAKYPNSSDLDRLSQSHPILNMVDTKKSSLNISGYNFSLGAAVKAGACMLDGGNMLETIKVTPQTMDGILKSILKVKRSLGMFVSDTPGERNPYENILYKICLSGDGWPYIASRTSIVGRAWENTTVDLESDGKPQKVGAAGSNKSLQSAGFPTGLTYSQLMTLKDSMMQLDPSAKTWIDIEGRPEDPVEIALYQPMSGCYIHFFREPTDLKQFKQDAKYSHGIDVADLFPAQPGLTSAVIEALPRNMVLTCQGSDDIKRLLDSQGRRDIKLIDIALSKADSRRFENAVWDQCKDLCHMHTGVVVEKKKRGGKEEITPHCALMDCIMYDAAVSGGLNIPVLRAVLPRDMVFRTSSPKVVL

SEQ ID NO: 7655 - protein, 569 aa, Artificial Sequence
  derived and/or modified protein sequence (wt) from LASV(LASV056-NIG-2008;Clade II)__AIT17613__NP
MSASKEVKSFLWTQSLRRELSGYCSNIKLQVVKDAQALLHGLDFSEVSNVQRLMRKQKRDDSDLKRLRDLNQAVNNLVELKSTQQKSILRVGTLTSDDLLTLAADLEKLKSKVIRTERPLSSGVYMGNLSTQQLEQRRALLNMIGMVGGAQGTQPGRDGVVRVWDVKNPDLLNNQFGTMPSLTLACLTKQGQVDLNDAVLALTDLGLIYTAKYPNSSDLDRLSQSHPILNMVDTKKSSLNISGYNFSLGAAVKAGACMLDGGNMLETIKVTPQTMDGILKSILKVKRSLGMFVSDTPGERNPYENILYKICLSGDGWPYIASRTSIVGRAWENTTVDLESDGKPQKVGTAGSNKSLQSAGFPTGLTYSQLMTLKDSMMQLDPSAKTWIDIEGRPEDPVEIALYQPMSGCYIHFFREPTDLKQFKQDAKYSHGIDVADLFPAQPGLTSAVIEALPRNMVLTCQGSDDIKRLLDSQGRRDIKLIDIALSKTDSRRFENAVWDQCKDLCHMHTGVVVEKKKRGGKEEITPHCALMDCIMYDAAVSGGLNIPVLRAVLPRDMVFRTSSPKVVL

SEQ ID NO: 7656 - protein, 569 aa, Artificial Sequence
  derived and/or modified protein sequence (wt) from LASV(LASV058-NIG-2008;Clade II)__AIT17617__NP
MSASKEVKSFLWTQSLRRELSGYCSSIKLQVVKDAQALLHGLDFSEVSNVQRLMRKQKRDDSDLKRLRDLNQAVNNLVELKSTQQKSILRVGTLTSDDLLTLAADLEKLKSKVIRTERPLSSGVYMGNLSAQQLEQRRALLNMIGMVGGAQGTQPGRDGVVRVWDVKNPDLLNNQFGTMPSLTLACLTKQGQVDLNDAVLALTDLGLIYTAKYPNSSDLDRLSQSHPILNMVDTKKSSLNISGFNFSLGAAVKAGACMLDGGNMLETIKVTPQTMDGILKSILKVKRSLGMFVSDTPGERNPYENILYKICLSGDGWPYIASRTSIVGRAWENTTVDLESDGKPQKVGTAGSNKSLQSAGFPTGLTYSQLMTLKDSMMQLDPSAKTWIDIEGRPEDPVEIALYQPMSGCYIHFFREPTDLKQFKQDAKYSHGIDVADLFPAQPGLTSAVIEALPRNMVLTCQGSDDIKRLLDSQGRRDIKLIDIALSKADSRRFENAVWDQCKDLCHMHTGVVVEKKKRGGKEEITPHCALMDCIMYDAAVSGGLNIPVLRAVLPRDMVFRTSSPKVVL

SEQ ID NO: 7657 - protein, 569 aa, Artificial Sequence
  derived and/or modified protein sequence (wt) from LASV(LASV063-NIG-2009;Clade II)__AIT17621__NP
MSASKEVKSFLWTQSLRRELSGYCSSIKLQVVKDAQALLHGLDFSEVTNVQRLMRKQKRDDSDLKRLRDLNQAVNNLVELKSTQQKSILRVGTLTSDDLLTLAADLEKLKSKVIRTERPLSSGVYMGNLSTQQLEQRRALLNMIGMVGGAQGTQPGRDGVVRVWDVKNPDLLNNQFGTMPSLTLACLTKQGQVDLNDAVLALTDLGLIYTAKYPNSSDLDRLSQSHPILNMVDTKKSSLNISGYNFSLGAAVKAGACMLDGGNMLETIKVTPQTMDGILKSILKVKRSLGMFVSDTPGERNPYENILYKICLSGDGWPYIASRTSIVGRAWENTTVDLESDGKPQKVGIAGSNKSLQSAGFPTGLTYSQLMTLKDSMMQLDPSAKTWIDIEGRPEDPVEIALYQPMSGCYIHFFREPTDLKQFKQDAKYSHGIDVADLFPAQPGLTSAVIEALPRNMVLTCQGSDDIKRLLDSQGRRDIKLIDIALSKADSRKFENAVWDQCKDLCHMHTGVVVEKKKRGGKEEITPHCALMDCIMYDAAVSGGLNIPVLRAVLPRDMVFRTSSPKVVL

SEQ ID NO: 7658 - protein, 569 aa, Artificial Sequence
  derived and/or modified protein sequence (wt) from LASV(LASV1000-NIG-2009;Clade II)__AIT17783__NP
MSASKEVKSFLWTQSLRRELSGYCSNIKLQVVKDAQALLHGLDFSEVSNVQRLMRKQKRDDSDLKRLRDLNQAVNNLVELKSTQQKSILRVGTLTSDDLLTLAADLEKLKSKVIRTERPLSSGVYMGNLSTQQLEQRRALLNMIGMVGGAQGTQPGRDGVVRVWDVKNPDLLNNQFGTMPSLTLACLTKQGQVDLNDVVLALTDLGLIYTAKYPNSSDLDRLSQSHPILNMVDTKKSSLNISGYNFSLGAAVKAGACMLDGGNMLETIKVTPQTMDGILKSILKVKKSLGMFVSDTPGERNPYENILYKICLSGDGWPYIASRTSIVGRAWENTTVDLESDGKPQKVGTAGSNKSLQSAGFPTGLTYSQLMTLKDSMMQLDPSAKTWIDIEGRPEDPVEIALYQPVSGCYIHFFREPTDLKQFKQDAKYSHGIDVADLFPAQPGLTSAVIEALPRNMVLTCQGSDDIKRLLDSQGRRDIKLIDIALSKADSRRFENAVWDQCKDLCHMHTGVVVEKKKRGGKEEITPHCALMDCIMYDAAVSGGLNIPVLRAVLPRDMVFRTSSPKVVL

SEQ ID NO: 7659 - protein, 569 aa, Artificial Sequence
  derived and/or modified protein sequence (wt) from LASV(LASV1008-NIG-2009;Clade II)__AIT17787__NP
MSASKEVKSFLWTQSLRRELSGYCSNIKLQVVKDAQALLHGLDFSEVSNVQRLMRKQKRDDGDLKRLRDLNQAVNNLVELKSTQQKSILRVGTLTSDDLLTLAADLEKLKSKVIRTERPLSSGVYMGNLSTQQLEQRRALLNMIGMVGGAQGTQPGRDGVVRVWDVKNPDLLNNQFGTMPSLTLACLTKQGQVDLNDAVLALTDLGLIYTAKYPNSSDLDRLSQSHPILNMVDTKKSSLNISGYNFSLGAAVKAGACMLDGGNMLETIKVTPQTMDGILKSILKVKKSLGMFVSDTPGERNPYENILYKICLSGDGWPYIASRTSIVGRAWENTTVDLESDGKPQKVGTAGSNKSLQSAGFPTGLTYSQLMTLKDSMMQLDPSAKTWIDIEGRPEDPVEIALYQPMSGCYIHFFREPTDLKQFKQDAKYSHGIDVTDLFSAQPGLTSAVIEALPRNMVLTCQGSDDIKRLLDSQGRRDIKLIDIALSKVDSRRFENAVWDQCKDLCHMHTGVVVEKKKRGGKEEITPHCALMDCIMYDAAVSGGLNIPVLRAVLPRDMVFRTSSPKVVL

SEQ ID NO: 7660 - protein, 569 aa, Artificial Sequence
  derived and/or modified protein sequence (wt) from LASV(LASV1015-NIG-2009;Clade II)__AIT17795__NP
MSASKEVKSFLWTQSLRRELSGYCSSIKLQVVKDAQALLHGLDFSEVSNVQRLMRKQKRDDSDLKRLRDLNQAVNNLVELKSTQQKSILRVGTLTSDDLLTLAADLEKLKSKVIRTERPLSSGVYMGNLSTQQLEQRRALLNMIGMVGGAQGTQPGRDGVVRVWDVKNPDLLNNQFGTMPSLTLACLTKQGQVDLNDAVLALTDLGLIYTAKYPNSSDLDRLSQSHPILNMVDTKKSSLNISGYNFSLGAAVKAGACMLDGGNMLETIKVTPQTMDGILKSILKVKRSLGMFVSDTPGERNPYENILYKICLSGDGWPYIASRTSIVGRAWENTTVDLESDGKPQKVGTAGSNKSLQSAGFPTGLTYSQLMTLKDSMMQLDPSAKTWIDIEGRPEDPVEIALYQPMSGCYIHFFREPTDLKQFKQDAKYSHGIDVADLFPAQPGLTSAVIEALPRNMVLTCQGSDDIKKLLDSQGRRDIKLIDIALSKADSRRFENAVWDQCKDLCHMHTGVVVEKKKRGGKEEITPHCALMDCIMYDAAVSGGLNIPVLRAVLPRDMVFRTSSPKVVL

SEQ ID NO: 7661 - protein, 569 aa, Artificial Sequence
  derived and/or modified protein sequence (wt) from LASV(LASV1016-NIG-2009;Clade II)__AIT17799__NP
MSASKEVKSFLWTQSLRRELSGYCSNIKLQVVKDAQALLHGLDFSEVSNVQRLMRKQKRDDSDLKRLRDLNQAVNNLVELKSTQQKSILRVGTLTSDDLLTLAADLEKLKSKVIRTERPLSSGVYMGNLSAQQLEQRRALLNMIGMVGGAQGTQPGRDGVVRVWDVKNPDLLNNQFGTMPSLTLACLTKQGQVDLNDAVLALTDLGLIYTAKYPNSSDLDRLSQSHPILNMVDTKKSSLNISGYNFSLGAAVKAGACMLDGGNMLETIKVTPQTMDGILKSILKVKKSLGMFVSDTPGERNPYENILYKICLSGDGWPYIASRTSIVGRAWENTTVDLESDGKPQKVGTAGSNKSLQSAGFPTGLTYSQLMTLKDSMMQLDPSAKTWIDIEGRPEDPVEIALYQPMSGCYIHFFREPTDLKQFKQDAKYSHGIDVADLFPAQPGLTSAVIEALPRNMVLTCQGSDDIKRLLDSQGRRDIKLIDIALSKADSRRFENAVWDQCKDLCHMHTGVVVEKKKRGGKEEITPHCALMDCIMYDAAVSGGLNIPVLRAVLPRDMVFRTSSPKVVL

SEQ ID NO: 7662 - protein, 569 aa, Artificial Sequence
  derived and/or modified protein sequence (wt) from LASV(LASV221-NIG-2010;Clade II)__AIT17625__NP
MSASKEVKSFLWTQSLRRELSGYCSSIKLQVVKDAQALLHGLDFSEVSNVQRLMRKQRRDDSDLKRLRDLNQAVNNLVELKSTQQKSILRVGTLTSDDLLTLAADLEKLKSKVIRTERPLSSGVYMGNLSTQQLEQRRALLNMIGMVGGAQGTQPGRDGVVRVWDVKNPDLLNNQFGTMPSLTLACLTKQGQVDLNDAVLALTDLGLIYTAKYPNSSDLDRLSQSHPILNMVDTKKSSLNISGYNFSLGAAVKAGACMLDGGNMLETIKVTPQTVDGILKSILKVKRSLGMFVSDTPGERNPYENILYKICLSGDGWPYIASRTSIVGRAWENTTVDLESDGKPQKVGTAGSNKSLQSAGFPTGLTYSQLMTLKDSMMQLDPSAKTWIDIEGRPEDPVEIALYQPMSGCYIHFFREPTDLKQFKQDAKYSHGIDVADLFPAQPGLTSAVIEALPRNMVLTCQGSDDIKRLLDSQGRRDIKLIDIALSKADSRKFENAVWDQCKDLCHMHTGVVVEKKKRGGKEEITPHCALMDCIMYDAAVSGGLNIPVLRAVLPRDMVFRTSSPKVVL

SEQ ID NO: 7663 - protein, 569 aa, Artificial Sequence
  derived and/or modified protein sequence (wt) from LASV(LASV224-NIG-2010;Clade II)__AIT17627__NP
MSASKEVKSFLWTQSLRRELSGYCSSIKLQVVKDAQALLHGLDFSEVSNVQRLMRKQKRDDSDLKRLRDLNQAVNNLVELKSTQQKSILRVGTLTSDDLLTLAADLEKLKSKVIRTERPLSSGVYMGNLSSQQLEQRRALLNMIGMVGGAQGTQPGRDGVVRVWDVKNPDLLNNQFGTMPSLTLACLTKQGQVDLNDAVLALTDLGLIYTAKYPNSSDLDRLSQSHPILNMVDTKKSSLNISGYNFSLGAAVKAGACMLDGGNMLETIKVTPQTMDGILKSILKVKRSLGMFVSDTPGERNPYENILYKICLSGDGWPYIASRTSIVGRAWENTTVDLESDGKPQKVGSAGSNKSLQSAGFPTGLTYSQLMTLKDSMMQLDPSAKTWIDIEGRPEDPVEIALYQPMSGCYIHFFREPTDLKQFKQDAKYSHGIDVADLFPAQPGLTSAVIEALPRNMVLTCQGSDDIKRLLDSQGRRDIKLIDIALSKADSRRFENAVWDQCKDLCHMHTGVVVEKKKRGGKEEITPHCALMDCIMYDAAVSGGLNIPVLRAVLPRDMVFRTSSPKVVL

SEQ ID NO: 7664 - protein, 569 aa, Artificial Sequence
  derived and/or modified protein sequence (wt) from LASV(LASV225-NIG-2010;Clade II)__AIT17631__NP
MSASKEIKSFLWTQSLRRELSGYCSSIKLQVVKDAQALLHGLDFSEVSNVQRLMRKQKRDDSDLKRLRDLNQAVNNLVELKSTQQKSILRVGTLTSDDLLTLAADLEKLKSKVIRTERPLSSGVYMGNLSTQQLEQRRALLNMIGMVGGAQGTQPGRDGVVRVWDVKNPDLLNNQFGTMPSLTLACLTKQGQVDLNDAVLALTDLGLIYTAKYPNSSDLDRLSQSHPILNMVDTKKSSLNISGYNFSLGAAVKAGACMLDGGNMLETIKVTPQTMDGILKSILKVKRSLGMFVSDAPGERNPYENILYKICLSGDGWPYIASRTSIVGRAWENTTVDLESDGKPQKVGTAGSNKSLQSAGFPTGLTYSQLMTLKDSMMQLDPSAKTWIDIEGRPEDPVEIALYQPMSGCYIHFFREPTDLKQFKQDAKYSHGIDVADLFPAQPGLTSAVIEALPRNMVLTCQGSDDIKRLLDSQGRRDIKLIDIALSKADSRRFENAVWDQCKDLCHMHTGVVVEKKKRGGKEEITPHCALMDCIMYDAAVSGGLNIPVLRAVLPRDMVFRTSSPKVVL

SEQ ID NO: 7665 - protein, 569 aa, Artificial Sequence
  derived and/or modified protein sequence (wt) from LASV(LASV229-NIG-2010;Clade II)__AIT17635__NP
MSASKEVKSFLWTQSLRRELSGYCSNIKLQVVKDAQALLHGLDFSEVSNVQRLMRKQKRDDNDLKRLRDLNQAVNNLVELKSTQQKSILRVGTLTSDDLLTLAADLEKLKSKVIRTERPLSSGVYMGNLNTQQLEQRRALLNMIGMVGGAQGTQPGRDGVVRVWDVKNPDLLNNQFGTMPSLTLACLTKQGQVDLNDAVLALTDLGLIYTAKYPNSSDLDRLSQSHPILNMVDTKKSSLNISGYNFSLGAAVKAGACMLDGGNMLETIKVTPQTMDGILKSILKVKKSLGMFVSDTPGERNPYENILYKICLSGDGWPYIASRTSIVGRAWENTTVDLESDGKPQKVGTAGSNKSLQSAGFPTGLTYSQLMTLKDSMMQLDPSAKTWIDIEGRPEDPVEIALYQPMSGCYIHFFREPTDLKQFKQDAKYSHGIDVADLFPAQPGLTSAVIEALPRNMVLTCQGSDDIKRLLDSQGRRDIKLIDIALSKADSRRFENAVWDQCKDLCHMHTGVVVEKKKRGGKEEITPHCALMDCIMYDAAVSGGLNIPVLRAVLPRDMVFRTSSPKVVL

SEQ ID NO: 7666 - protein, 569 aa, Artificial Sequence
  derived and/or modified protein sequence (wt) from LASV(LASV237-NIG-2010;Clade II)__AIT17639__NP
MSASKEVKSFLWTQSLRRELSGYCSNIKLQVVKDAQALLHGLDFSEVSNVQRLMRKQKRDDSDLKRLRDLNQAVNNLVELKSTQQKSILRVGTLTSDDLLTLAADLEKLKSKVIRTERPLSSGVYMGNLSTQQLEQRRALLNMIGMVGGAQGTQPGRDGVVRVWDVKNPDLLNNQFGTMPSLTLACLTKQGQVDLNDAVLALTDLGLIYTAKYPNSSDLDRLSQSHPILNMVDIKKSSLNISGYNFSLGAAVKAGACMLDGGNMLETIKVTPQTMDGILKSILKVKRSLGMFVSDTPGERNPYENILYKICLSGDGWPYIASRTSIVGRAWENTTVDLESDGKPQKVGSAGSNKSLQSAGFPTGLTYSQLMTLKDSMMQLDPSAKTWIDIEGRPEDPVEIALYQPMSGCYIHFFREPTDLKQFKQDAKYSHGIDVADLFPAQPGLTSAVIEALPRNMVLTCQGSDDIKRLLDSQGRRDIKLIDIALSKADSRRFENAVWDQCKDLCHMHTGVVVEKKKRGGKEEITPHCALMDCIMYDAAVSGGLNIPVLRAVLPRDMVFRTSSPKVVL

SEQ ID NO: 7667 - protein, 569 aa, Artificial Sequence
  derived and/or modified protein sequence (wt) from LASV(LASV242-NIG-2010;Clade II)__AIT17651__NP
MSASKEVKSFLWTQSLRRELSGYCSSIKLQVVKDAQALLHGLDFSEVSNVQRLMRKQKRDDSDLKRLRDLNQAVNNLVELKSTQQKSVLRVGTLTSDDLLTLAADLEKLKSKVIRTERPLSSGVYMGNLSAQQLEQRRALLNMIGMVGGAQGTQPGRDGVVRVWDVKNPDLLNNQFGTMPSLTLACLTKQGQVDLNDVVLALTDLGLIYTAKYPNSSDLDRLSQSHPILNMVDTKKSSLNISGYNFSLGAAVKAGACMLDGGNMLETIKVTPQTMDGILKSILKVKKSLGMFVSDTPGERNPYENILYKICLSGDGWPYIASRTSIVGRAWENTTVDLESDGKPQKVGTAGSNKSLQSAGFPTGLTYSQLMTLKDSMMQLDPSAKTWIDIEGRPEDPVEIALYQPMSGCYIHFFREPTDLKQFKQDAKYSHGIDVTDLFSAQPGLTSAVIEALPRNMVLTCQGSDDIKRLLDSQGRRDIKLIDIALSKADSRRFENAVWDQCKDLCHMHTGVVVEKKKRGGKEEITPHCALMDCIMYDAAVSGGLNIPVLRAVLPRDMVFRTSSPKVVL

SEQ ID NO: 7668 - protein, 569 aa, Artificial Sequence
  derived and/or modified protein sequence (wt) from LASV(LASV245-NIG-2011;Clade II)__AIT17655__NP
MSASKEVKSFLWTQSLRRELSGYCSNIKLQVVKDAQALLHGLDFSEVSNVQRLMRKQKRDDSDLKRLRDLNQAVNNLVELKSTQQKSILRVGTLTSDDLLTLAADLEKLKSKVIRTEKPLSSGVYMGNLSTQQLEQRRALLNMIGMVGGAQGTQPGRDGVVRVWDVKNPDLLNNQFGTMPSLTLACLTKQGQVDLNDAVLALTDLGLIYTAKFPNSSDLDRLSQSHPILNMVDTKKSSLNISGYNFSLGAAVKAGACMLDGGNMLETIKVTPQTMDGILKSILKVKKSLGMFVSDTPGERNPYENILYKICLSGDGWPYIASRTSIVGRAWENTTVDLESDGKPQKVGTTGSNKSLQSAGFPTGLTYSQLMTLKDSMMQLDPSAKTWIDIEGRPEDPVEIALYQPMSGCYIHFFREPTDLKQFKQDAKYSHGIDVADLFPAQPGLTSAVIEALPRNMVLTCQGSDDIKRLLDSQGRRDIKLIDIALSKADSRRFENAVWDQCKDLCHMHTGVVVEKKKRGGKEEITPHCALMDCIMYDAAVSGGLNIPVLRAVLPRDMVFRTSSPKVVL

SEQ ID NO: 7669 - protein, 569 aa, Artificial Sequence
  derived and/or modified protein sequence (wt) from LASV(LASV246-NIG-2010;Clade II)__AIT17659__NP
MSASKEVKSFLWTQSLRRELSGYCSSIKLQVVKDAQALLHGLDFSEVSNVQRLMRKQKRDDSDLKRLRDLNQAVNNLVELKSTQQKSVLRVGTLTSDDLLTLAADLEKLKSKVIRTERPLSSGVYMGNLSTQQLEQRRALLSMIGMVGGAQGTQPGRDGVVRVWDVKNPDLLNNQFGTMPSLTLACLTKQGQVDLNDAVLALTDLGLIYTAKYPNSSDLDRLSQSHPILNMVDTKKSSLNISGYNFSLGAAVKAGACMLDGGNMLETIKVTPQTMDGILKSILKVKRSLGMFVSDTPGERNPYENILYKICLSGDGWPYIASRTSIVGRAWENTTVDLESDGKPQKVGTAGSNKSLQSAGFPTGLTYSQLMTLKDSMMQLDPSAKTWIDIEGRPEDPVEIALYQPMSGCYIHFFREPTDLKQFKQDAKYSHGIDVADLFPAQPGLTSAVIEALPRNMVLTCQGSDDIKRLLDSQGRRDIKLIDIALNKADSRRFENAVWDQCKDLCHMHTGVVVEKKKRGGKEEITPHCALMDCIMYDAAVSGGLNIPVLRAVLPRDMVFRTSSPKVVL

SEQ ID NO: 7670 - protein, 569 aa, Artificial Sequence
  derived and/or modified protein sequence (wt) from LASV(LASV251-NIG-2010;Clade II)__AIT17667__NP
MSASKEVKSFLWTQSLRRELSGYCSSIKLQVVKDAQALLHGLDFSEVSNVQRLMRKQKRDDSDLKRLRDLNQAVNNLVELKSTQQKSILRVGTLTSDDLLTLAADLEKLKSKVIRTERPLSSGVYMGNLSTQQLEQRRALLNMIGMVGGAQGTQPGRDGVVRVWDVKNPDLLNNQFGTMPSLTLACLTKQGQVDLNDAVLALTDLGLIYTAKYPNSSDLDRLSQSHPILNMVDTKKSSLNISGYNFSLGAAVKAGACMLDGGNMLETIKVTPQTIDGILKSILKVKKSLGMFVSDTPGERNPYENILYKICLSGDGWPYIASRTSIVGRAWENTTVDLESDGKPQKVGTTGSNKSLQSAGFPTGLTYSQLMTLKDSMMQLDPSAKTWIDIEGRPEDPVEIALYQPMSGCYIHFFREPTDLKQFKQDAKYSHGIDVTDLFPAQPGLTSAVIEALPRNMVLTCQGSEDIKRLLDSQGRRDIKLIDIALSKADSRRFENAVWDQCKDLCHMHTGVVVEKKKRGGKEEITPHCALMDCIMYDAAVSGGLNIPVLRAVLPRDMVFRTSSPKVVL

SEQ ID NO: 7671 - protein, 569 aa, Artificial Sequence
  derived and/or modified protein sequence (wt) from LASV(LASV253-NIG-2011;Clade II)__AIT17671__NP
MSASKEVKSFLWTQSLRRELSGYCSSIKLQVVKDAQALLHGLDFSEVSNVQRLMRKQKRDDSDLKRLRDLNQAVNNLVELKSTQQKSVLRVGTLTSDDLLTLAADLEKLKSKVIRTERPLSSGVYMGNLSTQQLEQRRALLNMIGMVGGAQGTQPGRDGVVRVWDVKNPDLLNNQFGTMPSLTLACLTKQGQVDLNDVVLALTDLGLIYTAKYPNSSDLDRLSQSHPILNMVDTKKSSLNISGYNFSLGAAVKAGACMLDGGNMLETIKVTPQTMDGILKSILKVKKSLGMFVSDTPGERNPYENILYKICLSGDGWPYIASRTSIVGRAWENTTVDLESDGKPQKVGTAGSNKSLQSAGFPTGLTYSQLMTLKDSMMQLDPSAKTWIDIEGRPEDPVEIALYQPMSGCYIHFFREPTDLKQFKQDAKYSHGIDVTDLFPAQPGLTSAVIEALPRNMVLTCQGSDDIKRLLDSQGRRDIKLIDIALSKADSRRFENAVWDQCKDLCHMHTGVVVEKKKRGGKEEITPHCALMDCIMYDAAVSGGLNIPVLRAVLPRDMVFRTSSPKVVL

SEQ ID NO: 7672 - protein, 569 aa, Artificial Sequence
  derived and/or modified protein sequence (wt) from LASV(LASV254-NIG-2011;Clade II)__AIT17675__NP
MSASKEVKSFLWTQSLRRELSGYCSSIKLQVVKDAQALLHGLDFSEVSNVQRLMRKQKRDDSDLKRLRDLNQAVNNLVELKSTQQKSVLRVGTLTSDDLLTLAADLEKLKSKVIRTERPLSSGVYMGNLSTQQLEQRRALLNMIGMVGGAQGTQPGRDGVVRVWDVKNPDLLNNQFGTMPSLTLACLTKQGQVDLNDAVLALTDLGLIYTAKYPNSSDLDRLSQSHPILNMVDTKKSSLNISGYNFSLGAAVKAGACMLDGGNMLETIKVTPQTMDGILKSILKVKKSLGMFVSDTPGERNPYENILYKICLSGDGWPYIASRTSIVGRAWENTIVDLESDGKPQKVGTAGSNKSLQSAGFPTGLTYSQLMTLKDSMMQLDPSAKTWIDIEGRPEDPVEIALYQPMSGCYIHFFREPTDLKQFKQDAKYSHGIDVADLFPAQPGLTSAVIEALPRNMVLTCQGSDDIKRLLDSQGRRDIKLIDIALSKADSRRFENAVWDQCKDLCHMHTGVVVEKKKRGGKEEITPHCALMDCIMYDAAVSGGLNIPVLRAVLPRDMVFRTSSPKVVL

SEQ ID NO: 7673 - protein, 569 aa, Artificial Sequence
  derived and/or modified protein sequence (wt) from LASV(LASV256-NIG-2010;Clade II)__AIT17679__NP
MSASKEVKSFLWTQSLRRELSGYCSSIKLQVVKDAQALLHGLDFSEVSNVQRLMRKQKRDDSDLKRLRDLNQAVNNLVELKSTQQKSILRVGTLTSDDLLTLAADLEKLKSKVIRTERPLSSGVYMGNLSTQQLEQRRALLNMIGMVGGAQSTQPGRDGVVRVWDVKNPDLLNNQFGTMPSLTLACLTKQGQVDLNDAVLALTDLGLIYTAKYPNSSDLDRLSQSHPILNMVDTKKSSLNISGYNFSLGAAVKAGACMLDGGNMLETIKVTPQTMDGILKSILKVKRSLGMFVSDTPGERNPYENILYKICLSGDGWPYIASRTSIVGRAWENTTVDLESDGKPQKVGTAGSNKSLQSAGFPTGLTYSQLMTLKDSMMQLDPSAKTWIDIEGRPEDPVEIALYQPMSGCYIHFFREPTDLKQFKQDAKYSHGIDVADLFPAQPGLTSAVIEALPRNMVLTCQGSDDIKRLLDSQGRRDIKLIDIALSKADSRRFENAVWDQCKDLCHMHTGVVVEKKKRGGKEEITPHCALMDCIMYDAAVSGGLNIPVLRAVLPRDMVFRTSSPKVVL

SEQ ID NO: 7674 - protein, 569 aa, Artificial Sequence
  derived and/or modified protein sequence (wt) from LASV(LASV263-NIG-2011;Clade II)__AIT17683__NP
MSASKEVKSFLWTQSLRRELSGYCSNIKLQVVKDAQALLHGLDFSEVSNVQRLMRKQKRDDSDLKRLRDLNQAVNNLVELKSTQQKSILRVGTLTSDDLLTLAADLEKLKSKVIRTERPLSSGVYMGNLSTQQLEQRRALLNMIGMVGGAQGTQPGRDGVVRVWDVKNPDLLNNQFGTMPSLTLACLTKQGQVDLNDAVLALTDLGLIYTAKYPNSSDLDRLSQSHPILNMVDTKKSSLNISGFNFSLGAAVKAGACMLDGGNMLETIKVTPQTMDGILKSILKVKKSLGMFVSDTPGERNPYENILYKICLSGDGWPYIASRTSIVGRAWENTTVDLESDGKPQKVGTAGSNKSLQSAGFPTGLTYSQLMTLKDSMMQLDPSAKTWIDIEGRPEDPVEIALYQPMSGCYIHFFREPTDLKQFKQDAKYSHGIDVADLFPAQPGLTSAVIEALPRNMVLTCQGSDDIKRLLDSQGRRDIKLIDIALSKADSRRFENAVWDQCKDLCHMHTGVVVEKKKRGGKEEITPHCALMDCIMYDAAVSGGLNIPVLRAVLPRDMVFRTSSPKVVL

SEQ ID NO: 7675 - protein, 569 aa, Artificial Sequence
  derived and/or modified protein sequence (wt) from LASV(LASV267-NIG-2010;Clade II)__AIT17687__NP
MSASKEVKSFLWTQSLRRELSGYCSSIKLQVVKDAQALLHGLDFSEVSNVQRLMRKQKRDDSDLKRLRDLNQAVNNLVELKSTQQKSILRVGTLTSDDLLTLAADLEKLKSKVIRTERPLSSGVYMGNLSAQQLEQRRALLNMIGMVGGAQGTQPGRDGVVRVWDVKNPDLLNNQFGTMPSLTLACLTKQGQVDLNDAVLALTDLGLIYTAKYPNSSDLDRLSQSHPILNMVDTKKSSLNISGYNFSLGAAVKAGACMLDGGNMLETIKVTPQTMDGILKSILKVKRSLGMFVSDTPGERNPYENILYKICLSGDGWPYIASRTSIVGRAWENTTVDLESDGKPQKVGTAGSNKSLQSAGFPTGLTYSQLMTLKDSMMQLDPSAKTWIDIEGRPEDPVEIALYQPMSGCYIHFFREPTDLKQFKQDAKYSHGIDVADLFPAQPGLTSAVIEALPRNMVLTCQGSDDIKRLLDSQGRRDIKLIDIALSKADSRRFENAVWDQCKDLCHMHTGVVVEKKKRGGKEEITPHCALMDCIMYDAAVSGGLNIPVLRAVLPRDMVFRTSSPKVVL

SEQ ID NO: 7676 - protein, 569 aa, Artificial Sequence
  derived and/or modified protein sequence (wt) from LASV(LASV274-NIG-2010;Clade II)__AIT17695__NP
MSASKEVKSFLWTQSLRRELSGYCSNIKLQVVKDAQALLHGLDFSEVSNVQRLMRKQKRDDSDLKRLRDLNQAVNNLVELKSTQQKSILRVGTLTSDDLLTLAADLEKLKSKVIRTERPLSSGVYMGNLSTQQLEQRRALLNLIGMVGGAQGTQPGRDGVVRVWDVKNPDLLNNQFGTMPSLTLACLTKQGQVDLNDVVLALTDLGLIYTAKYPNSSDLDRLSQSHPILNMVDTKKSSLNISGFNFSLGAAVKAGACMLDGGNMLETIKVTPHTMDGILKSILKVKKSLGMFVSDTPGERNPYENILYKICLSGDGWPYIASRTSIVGRAWENTTVDLESDGKPHKVGTAGSNKSLQSAGFPTGLTYSQLMTLKDSMMQLDPSAKTWIDIEGRPEDPVEIALYQPMSGCYIHFFREPTDLKQFKQDAKYSHGIDVADLFPAQPGLTSAVIEALPRNMVLTCQGSDDIKRLLDSQGRRDIKLIDIALSKADSRRFENAVWDQCKDLCHMHTGVVVEKKKRGGKEEITPHCALMDCIMYDAAVSGGLNIPVLRAVLPRDMVFRTSSPKVVL

SEQ ID NO: 7677 - protein, 569 aa, Artificial Sequence
  derived and/or modified protein sequence (wt) from LASV(LASV719-NIG-2009;Clade II)__AIT17705__NP
MSASKEVKSFLWTQSLRRELSGYCSNIKLQVVKDAQALLHGLDFSEVSNVQRLMRKQKRDDSDLKRLRDLNQAVNNLVELKSTQQKSILRVGTLTSDDLLTLAADLEKLKSKVIRTERPLSSGVYMGNLSTQQLEQRRALLNLIGMVGGAQGTQPGRDGVVRVWDVKNPDLLNNQFGTMPSLTLACLTKQGQVDLNDAVLALTDLGLIYTAKYPNSSDLDRLSQSHPILNMVDTKKSSLNISGFNFSLGAAVKAGACMLDGGNMLETIKVTPQTMDGILKSILKVKKSLGMFVSDTPGERNPYENILYKICLSGDGWPYIASRTSIVGRAWENTTVDLESDGKPHKVGTAGSNRSLQSAGFPTGLTYSQLMTLKDSMMQLDPSAKTWIDIEGRPEDPVEIALYQPMSGCYIHFFREPTDLKQFKQDAKYSHGIDVADLFPAQPGLTSAVIEALPRNMVLTCQGSDDIKRLLDSQGRRDIKLIDIALSKADSRRFENAVWDQCKDLCHMHTGVVVEKKKRGGKEEITPHCALMDCIMYDAAVSGGLNIPVLRAVLPRDMVFRTSSPKVVL

SEQ ID NO: 7678 - protein, 569 aa, Artificial Sequence
  derived and/or modified protein sequence (wt) from LASV(LASV737-NIG-2009;Clade II)__AIT17711__NP
MSASKEVKSFLWTQSLRRELSGYCSNIKLQVVKDAQALLHGLDFSEVSNVQRLMRKQKRDDSDLKRLRDLNQAVNNLVELKSTQQKSILRVGTLTSDDLLTLAADLEKLKSKVIRTERPLSSGVYMGNLSTQQLEQRRALLNLIGMVGGAQGTQPGRDGVVRVWDVKNPDLLNNQFGTMPSLTLACLTKQGQVDLNDAVLALTDLGLIYTAKYPNSSDLDRLSQSHPILNMVDTKKSSLNISGFNFSLGAAVKAGACMLDGGNMLETIKVTPQTMDGILKSILKVKKSLGMFVSDTPGERNPYENILYKICLSGDGWPYIASRTSIVGRAWENTTVDLESDGKPHKVGTAGSSKSLQSAGFPTGLTYSQLMTLKDSMMQLDPSAKTWIDIEGRPEDPVEIALYQPMSGCYIHFFREPTDLKQFKQDAKYSHGIDVADLFPAQPGLTSAVIEALPRNMVLTCQGSDDIKRLLDSQGRRDIKLIDIALSKADSRRFENAVWDQCKDLCHMHTGVVVEKKKRGGKEEITPHCALMDCIMYDAAVSGGLNIPVLRAVLPRDMVFRTSSPKVVL

SEQ ID NO: 7679 - protein, 569 aa, Artificial Sequence
  derived and/or modified protein sequence (wt) from LASV(LASV738-NIG-2009;Clade II)__AIT17713__NP
MSASKEVKSFLWTQSLRRELSGYCSNIKLQVVKDAQALLHGLDFSEVSNVQRLMRKQKRDDSDLKRLRDLNQAVNNLVELKSTQQKSILRVGTLTSDDLLTLAADLEKLKSKVIRTERPLSSGVYMGNLSTQQLEQRRALLNMIGMVGGAQGTQPGRDGVVRVWDVKNPDLLNNQFGTMPSLTLACLTKQGQVDLNDAVLALTDLGLIYTAKYPNSSDLDRLSQSHPILNMVDIKKSSLNISGYNFSLGAAVKAGACMLDGGNMLETIKVTPQTMDGILKSILKVKKSLGMFVSDTPGERNPYENILYKICLSGDGWPYIASRTSIVGRAWENTTVDLESDGKPQKVGTAGSNKSLQSAGFPTGLTYSQLMTLKDSMMQLDPSAKTWIDIEGRPEDPVEIALYQPMSGCYIHFFREPTDLKQFKQDAKYSHGIDVADLFPAQPGLTSAVIEALPRNMVLTCQGSDDIKRLLDSQGRRDIKLIDIALNKADSRRFENAVWDQCKDLCHMHTGVVVEKKKRGGKEEITPHCALMDCIMYDAAVSGGLNIPVLRAVLPRDMVFRTSSPKVVL

SEQ ID NO: 7680 - protein, 569 aa, Artificial Sequence
  derived and/or modified protein sequence (wt) from LASV(LASV966-NIG-2009;Clade II)__AIT17719__NP
MSASKEVKSFLWTQSLRRELSGYCSSIKLQVVKDAQALLHGLDFSEVSNVQRLMRKQKRDDSDLKRLRDLNQAVNNLVELKSTQQKSILRVGTLTSDDLLTLAADLEKLKSKVIRTERPLSSGVYMGNLSTQQLEQRRALLNMIGMVSGAQGTQPGRDGVVRVWDVKNPELLNNQFGTMPSLTLACLTKQGQVDLNDAVLALTDLGLIYTAKYPNSSDLDRLSQSHPILNMVDTKKSSLNISGYNFSLGAAVKAGACMLDGGNMLETIKVTPQTMDGILKSILKVKKSLGMFVSDTPGERNPYENILYKICLSGDGWPYIASRTSIVGRAWENTTVDLESDGKPQKVGTAGSNKSLQSAGFPTGLTYSQLMTLKDSMMQLDPSAKTWIDIEGRPEDPVEIALYQPMSGCYIHFFREPTDLKQFKQDAKYSHGIDVADLFPAQPGLTSAVIEALPRNMVLTCQGSDDIKRLLDSQGRRDIKLIDISLSKADSRRFENAVWDQCKDLCHMHTGVVVEKKKRGGKEEITPHCALMDCIMYDAAVSGGLNIPVLRAVLPRDMVFRTSSPKVVL

SEQ ID NO: 7681 - protein, 569 aa, Artificial Sequence
  derived and/or modified protein sequence (wt) from LASV(LASV969-NIG-2009;Clade II)__AIT17725__NP
MSASKEVKSFLWTQSLRRELSGYCSNIKLQVVKDAQALLHGLDFSEVSNVQRLMRKQKRDDSDLKRLRDLNQAVNNLVELKSTQQKSILRVGTLTSDDLLTLAADLEKLKSKVIRTERPLSSGVYMGNLSAQQLEQRRALLNMIGMVGGAQGTQLGRDGVVRVWDVKNPDLLNNQFGTMPSLTLACLTKQGQVDLNDAVLALTDLGLIYTAKYPNSSDLDRLSQSHPILNMVDTKKSSLNISGYNFSLGAAVKAGACMLDGGNMLETIKVTPQTMDGILKSILKVKKSLGMFVSDTPGERNPYENILYKICLSGDGWPYIASRTSIVGRAWENTTVDLESDGKPQKVGTAGSNKSLQSAGFPTGLTYSQLMTLKDSMMQLDPSAKTWIDIEGRPEDPVEIALYQPMSGCYIHFFREPTDLKQFKQDAKYSHGIDVADLFPAQPGLTSAVIEALPRNMVLTCQGSEDIKRLLDSQGRRDIKLIDIALSKADSRRFENAVWDQCKDLCHMHTGVVVEKKKRGGKEEITPHCALMDCIMYDAAVSGGLNIPVLRAVLPRDMVFRTSSPKVVL

SEQ ID NO: 7682 - protein, 569 aa, Artificial Sequence
  derived and/or modified protein sequence (wt) from LASV(LASV971-NIG-2009;Clade II)__AIT17729__NP
MSASKEVKSFLWTQSLRRELSGYCSSIKLQVVKDAQALLHGLDFSEVSNVQRLMRKQRRDDSDLKRLRDLNQAVNNLVELKSTQQKSILRVGTLTSDDLLTLAADLEKLKSKVIRTERPLSSGVYMGNLSTQQLEQRRALLNMIGMVGGTQGTQPGRDGVVRVWDVKNPDLLNNQFGTMPSLTLACLTKQGQVDLNDAVLALTDLGLIYTAKYPNSSDLDRLSQSHPILNMVDTKKSSLNISGYNFSLGAAVKAGACMLDGGNMLETIKVTPQTMDGILKSILKVKRSLGMFVSDTPGERNPYENILYKICLSGDGWPYIASRTSIVGRAWENTTVDLESDGKPQKVGTAGSNKSLQSAGFPTGLTYSQLMTLKDSMMQLDPSAKTWIDIEGRPEDPVEIALYQPMSGCYIHFFREPTDLKQFKQDAKYSHGIDVADLFPAQPGLTSAVIEALPRNMVLTCQGSDDIKRLLDSQGRRDIKLIDIALSKADSRKFENAVWDQCKDLCHMHTGVVVEKKKRGGKEEITPHCALMDCIMYDAAVSGGLNIPVLRAVLPRDMVFRTSSPKVVL

SEQ ID NO: 7683 - protein, 569 aa, Artificial Sequence
  derived and/or modified protein sequence (wt) from LASV(LASV975-NIG-2009;Clade II)__AIT17733__NP
MSASKEVKSFLWTQSLRRELSGYCSNIKLQVVKDAQALLHGLDFSEVSNVQRLMRKQKRDDSDLKRLRDLNQAVNNLVELKSTQQKSILRVGTLTSDDLLILAADLEKLKSKVIRTERPLSSGVYMGNLSTQQLEQRRALLNMIGMVGGAQGTQPGRDGVVRVWDVKNPDLLNNQFGTMPSLTLACLTKQGQVDLNDAVLALTDLGLIYTAKYPNSSDLDRLSQSHPILNMVDTKKSSLNISGYNFSLGAAVKAGACMLDGGNMLETIKVTPQTMDGILKSILKVKKSLGMFVSDTPGERNPYENILYKICLSGDGWPYIASRTSIVGRAWENTTVDLESDGKPQKVGTAGSNKSLQSAGFPTGLTYSQLMTLKDSMMQLDPSAKTWIDIEGRPEDPVEIALYQPMSGCYIHFFREPTDLKQFKQDAKYSHGIDVADLFPAQPGLTSAVIEALPRNMVLTCQGSDDIKRLLDSQGRRDIKLIDIALSKADSRRFENAVWDQCKDLCHMHTGVVVEKKKRGGKEEITPHCALMDCIMYDAAVSGGLNIPVLRAVLPRDMVFRTSSPKVVL

SEQ ID NO: 7684 - protein, 569 aa, Artificial Sequence
  derived and/or modified protein sequence (wt) from LASV(LASV978-NIG-2009;Clade II)__AIT17745__NP
MSASKEIKSFLWTQSLRRELSGYCSSIKLQVVKDAQALLHGLDFSEVSNVQRLMRKQKRDDSDLKRLRDLNQAVNNLVELKSTQQKSILRVGTLTSDDLLTLAADLEKLKSKVIRTERPLSSGVYMGNLSTQQLEQRRALLNMIGMVGGAQGTQPGRDGVVRVWDVKNPDLLNNQFGTMPSLTLACLTKQGQVDLNDAVLALTDLGLIYTAKYPNSSDLDRLSQSHPILNMVDTKKSSLNISGYNFSLGAAVKAGACMLDGGNMLETIKVTPQTMDGILKSILKVKRSLGMFVSDAPGERNPYENILYKICLSGDGWPYIASRTSIVGRAWENTTVDLESDGKPQKVGTAGSNKSLQSAGFPTGLTYSQLMTLKDSMMQLDPSAKTWIDIEGRPEDPVEIALYQPMSGCYIHFFREPTDLKQFKQDAKYSHGIDVADLFPAQPGLTSAVIEALPRNMVLTCQGSDDIKRLLDSQGRRDIKLIDIALSKVDSRRFENAVWDQCKDLCHMHTGVVVEKKKRGGKEEITPHCALMDCIMYDAAVSGGLNIPVLRAVLPRDMVFRTSSPKVVL

SEQ ID NO: 7685 - protein, 569 aa, Artificial Sequence
  derived and/or modified protein sequence (wt) from LASV(LASV981-NIG-2009;Clade II)__AIT17753__NP
MSASKEVKSFLWTQSLRRELSGYCSSIKLQVVKDAQALLHGLDFSEVSNVQRLMRKQKRDDSDLKRLRDLNQAVNNLVELKSTQQKSILRVGTLTSDDLLTLAADLEKLKSKVIRTERPLSSGVYMGNLSTQQLEQRRALLNMIGMVGGAQGTQPGRDGVVRVWDVKNPDLLNNQFGTMPSLTLACLTKQGQVDLNDAVLALTDLGLIYTAKYPNSSDLDRLSQSHPILNMVDTKKSSLNISGYNFSLGAAVKAGACMLDGGNMLETIKVTPQTMDGILKSILKVKRSLGMFVSDTPGERNPYENILYKICLSGDGWPYIASRTSIVGRAWENTTVDLESDGKPQKVGTTGSNKSLQSAGFPTGLTYSQLMTLKDSMMQLDPSAKTWIDIEGRPEDPVEIALYQPMSGCYIHFFREPTDLKQFKQDAKYSHGIDVADLFPAQPGLTSAVIEALPRNMVLTCQGSDDIKRLLDSQGRRDIKLIDIALSKADSRRFENAVWDQCKDLCHMHTGVVVEKKKRGGKEEITPHCALMDCIMYDAAVSGGLNIPVLRAVLPRDMVFRTSSPKVVL

SEQ ID NO: 7686 - protein, 569 aa, Artificial Sequence
  derived and/or modified protein sequence (wt) from LASV(LASV988-NIG-2009;Clade II)__AIT17759__NP
MSASKEVKSFLWTQSLRRELSGYCSNIKLQVVKDAQALLHGLDFSEVSNVQRLMRKQKRDDSDLKRLRDLNQAVNNLVELKSTQQKSILRVGTLTSDDLLTLAADLEKLKSKVIRTERPLSSGVYMGNLNTQQLEQRRALLNMIGMAGGAQGTQPGRDGVVRVWDVKNPDLLNNQFGTMPSLTLACLTKQGQVDLNDAVLALTDLGLIYTAKYPNSSDLDRLSQSHPILNMVDTKKSSLNISGYNFSLGAAVKAGACMLDGGNMLETIKVTPQTMDGILKSILKVKKSLGMFVSDTPGERNPYENILYKICLSGDGWPYIASRTSIVGRAWENTTVDLESDGKPQKVGTAGSNKSLQSAGFPTGLTYSQLMTLKDSMMQLDPSAKTWIDIEGRPEDPVEIALYQPMSGCYIHFFREPTDLKQFKQDAKYSHGIDVADLFPAQPGLTSAVIEALPRNMVLTCQGSDDIKRLLDSQGRRDIKLIDIALSKADSRRFENAVWDQCKDLCHMHTGVVVEKKKRGGKEEITPHCALMDCIMYDAAVSGGLNIPVLRAVLPRDMVFRTSSPKVVL

SEQ ID NO: 7687 - protein, 569 aa, Artificial Sequence
  derived and/or modified protein sequence (wt) from LASV(LASV989-NIG-2009;Clade II)__AIT17763__NP
MSASKEVKSFLWTQSLRRELSGYCSSIKLQVVKDAQALLHGLDFSEVSNVQRLMRKQKRDDSDLKRLRDLNQAVNNLVELKSTQQKSILRVGTLTSDDLLTLAADLEKLKSKVIRTERPLSSGVYMGNLSTQQLEQRRALLNMIGMVGGAQGTQPGRDGVVRVWDVKNPDLLNNQFGTMPSLTLACLTKQGQVDLNDAVLALTDLGLIYTAKYPNSSDLDRLSQSHPILNMVDTKKSSLNISGYNFSLGAAVKAGACMLDGGNMLETIKVTPQTVDGILKSILKVKRSLGMFVSDTPGERNPYENILYKICLSGDGWPYIASRTSIVGRAWENTTVDLESDEKPQKVGAAGSNKSLQSAGFPTGLTYSQLMTLKDSMMQLDPSAKTWIDIEGRPEDPVEIALYQPMSGCYIHFFREPTDLKQFKQDAKYSHGIDVTDLFPAQPGLTSAVIEALPRNMVLTCQGSDDIKRLLDSQGRRDIKLIDIALSKADSRRFENAVWDQCKDLCHMHTGVVVEKKKRGGKEEITPHCALMDCIMYDAAVSGGLNIPVLRAVLPRDMVFRTSSPKVVL

SEQ ID NO: 7688 - protein, 569 aa, Artificial Sequence
  derived and/or modified protein sequence (wt) from LASV(LASV991-NIG-2009;Clade II)__AIT17771__NP
MSASKEVKSFLWTQSLRRELSGYCSSIKLQVVKDAQALLHGLDFSEVSNVQRLMRKQKRDDSDLKRLRDLNQAVNNLVELKSTQQKSILRVGTLTSDDLLTLAADLEKLKSKVIRTERPLSSGVYMGNLSTQQLEQRRALLNMIGMVGGAQGTQPGRDGVVRVWDVKNPDLLNNQFGTMPSLTLACLTKQGQVDLNDAVLALTDLGLIYTAKYPNSSDLDRLSQSHPILNMVDTKKSSLNISGYNFSLGAAVKAGACMLDGGNMLETIKVTPQTMDGILKSILKVKRSLGMFVSDTPGERNPYENILYKICLSGDGWPYIASRTSIVGRAWENTTVDLESDGKTQKVSTAGSNKSLQSAGFPTGLTYSQLMTLKDSMMQLDPSAKTWIDIEGRPEDPVEIALYQPMSGCYIHFFREPTDLKQFKQDAKYSHGIDVTDLFPAQPGLTSAVIEALPRNMVLTCQGSDDIKRLLDSQGRRDIKLIDIALSKADSRRFENAVWDQCKDLCHMHTGVVVEKKKRGGKEEITPHCALMDCIMYDAAVSGGLNIPVLRAVLPRDMVFRTSSPKVVL

SEQ ID NO: 7689 - protein, 569 aa, Artificial Sequence
  derived and/or modified protein sequence (wt) from LASV(LASV993-NIG-2009;Clade II)__AIT17779__NP
MSASKEVKSFLWTQSLRRELSGYCSNIKLQVVKDAQALLHGLDFSEVSNVQRLMRKQKRDDGDLKRLRDLNQAVNNLVELKSTQQKSILRVGTLTSDDLLTLAADLEKLKSKVIRTERPLSSGVYMGNLSTQQLEQRRALLNMIGMVGGAQGTQPGRDGVVRVWDVKNPDLLNNQFGTMPSLTLACLTKQGQVDLNDAVLALTDLGLIYTAKYPNSSDLDRLSQSHPILNMVDTKKSSLNISGYNFSLGAAVKAGACMLDGGNMLETIKVTPQTMDGILKSILKVKKSLGMFVSDTPGERNPYENILYKICLSGDGWPYIASRTSIVGRAWENTTVDLESDGKPQKVGTAGSNKSLQSAGFPTGLTYSQLMTLKDSMMQLDPSAKTWIDIEGRPEDPVEIALYQPMSGCYIHFFREPTDLKQFKQDAKYSHGIDVTDLFSAQPGLTSAVIEALPRNMVLTCQGSDDIKRLLDSQGRRDIKLIDIALSKTDSRRFENAVWDQCKDLCHMHTGVVVEKKKRGGKEEITPHCALMDCIMYDAAVSGGLNIPVLRAVLPRDMVFRTSSPKVVL

SEQ ID NO: 7690 - protein, 569 aa, Artificial Sequence
  derived and/or modified protein sequence (wt) from LASV(Nig08-04;Clade II)__ADU56611__NP
MSASKEVKSFLWTQSLRRELSGYCSNIKLQVVKDAQALLHGLDFSEVSNVQRLMRKQKRDDGDLKRLRDLNQAVNNLVELKSTQQKSVLRVGTLTSDDLLTLAADLEKLKSKVIRTERPLSSGVYMGNLSTQQLEQRKALLSMIGMVGGAQGTQPGRDGVVRVWDVKNPDLLNNQFGTMPSLTLACLTKQGQVDLNDAVLALTDLGLIYTAKYPNSSDLDRLSQSHPILNMVDTKKSSLNISGYNFSLGAAVKAGACMLDGGNMLETIKVTPQTMDGILKSILKVKRSLGMFVSDTPGERNPYENILYKICLSGDGWPYIASRTSIVGRAWENTTVDLESDGKPQKVGTAGSNKSLQSAGFPTGLTYSQLMTLKDSMMQLDPSAKTWIDIEGRPEDPVEIALYQPMSGCYIHFFREPTDLKQFKQDAKYSHGIDVTDLFSAQPGLTSAVIEALPRNMVLTCQGSDDIKKLLDSQGRRDIKLIDISLNKADSRRFENAVWDQCKDLCHMHTGVVVEKKKRGGKEEITPHCALMDCIMFDAAVSGGLNIPILRAVLPRDMVFRTSSPKVVL

SEQ ID NO: 7691 - protein, 569 aa, Artificial Sequence
  derived and/or modified protein sequence (wt) from LASV(Nig08-A47;Clade II)__ADU56631__NP
MSASKEVKSFLWTQSLRRELSGYCSNIKLQVVKDAQALLHGLDFSEVSNVQRLMRKQKRDDSDLKRLRDLNQAVNNLVELKSTQQKSILRVGTLTSDDLLTLAADLEKLKSKVIRTERPLSSGVYMGNLSTQQLEQRRALLNMIGMVGGAQGTQPGRDGVVRVWDVKNPDLLNNQFGTMPSLTLACLTKQGQVDLNDAVLALTDLGLIYTAKYPNSSDLDRLSQSHPILNMVDTKKSSLNISGYNFSLGAAVKAGACMLDGGNMLETIKVTPQTMDGILKSILKVKKSLGMFVSDTPGERNPYENILYKICLSGDGWPYIASRTSIVGRAWENTTVDLESDGKPQKVGTAGSNKSLQSAGFPTGLTYSQLMTLKDSMMQLDPSAKTWIDIEGRPEDPVEIALYQPMSGCYIHFFREPTDLKQFKQDAKYSHGIDVTDLFPAQPGLTSAVIEALPRNMVLTCQGSDDIKRLLDSQGRRDIKLIDIALSKADSRRFENAVWDQCKDLCHMHTGVVVEKKKRGGKEEITPHCALMDCIMYDAAVSGGLNIPVLRAVLPRDMVFRTSSPKVVL

SEQ ID NO: 7692 - protein, 570 aa, Artificial Sequence
  derived and/or modified protein sequence (wt) from LASV(GA391;Clade III)__AAA46284__NP
MSASKEVRSCLWTQSLRRELSGYCSNIKLQVVKDAQALLHGLDFSEVSNVQRLMRKQKRDDGDLKRLRDLNQAVNNLVELKSTQQKSVLRVGTLSSDDLLILAADLEKLKSKVTRTERPLSSGVYMGNLSSQQLDQRRALLNMIGMTGVSGGGKGASNGIVRVWDVKNAELLNNQFGTMPSLTLACLTKQGQVDLNDAVQALTDLGLIYTAKYPNSSDLDRLSQSHPILNMIDTKKSSLNISGYNFSLGAAVKAGACMLDGGNMLETIKVSPQTMDGILKSILKVKKSLGMFVSDTPGERNPYENILYKICLSGDGWSYIASRTSIVGRAWENTVVDLEQDNKPQKIGNGGSNKSLQSAGFAAGLIYSQLMTLKDFKCFNLIPNAKTWMDIEGRPEDPVEIALYQPSSGCYVHFFREPTDLKQFKQDAKYSHGRDVTDLFAAQPGLTSAVIEALPRNMVITCQGSEDIRKLLESQGRRDIKLIDITLSKADSRKFENAVWDQFKDLCHMHTGVVVEKKKRGGKEEITPHCALMDCIMFDAAVSGGLDAKVLRVVLPRDMVFRTSTPKVVL

SEQ ID NO: 7693 - protein, 569 aa, Artificial Sequence
  derived and/or modified protein sequence (wt) from LASV(ISTH2121-NIG-2012;Clade III)__AIT17541__NP
MSASKEVKSFLWTQSLRRELSGYCSNIKLQVVKDAQALLHGLDFSEVSNVQRLMRKQKRDDGDLKRLRDLNQAVNNLVELKSTQQKSVLRVGTLSSDDLLTLAADLEKLKSKVIRTERPLSSGVYMGNLSSQQLDQRRALLNMIGMTSDRQGASTGRDGIVRVWDVKNAELLNNQFGTVPSLTLACLTKQGQVDLNDAVQALTDLGLIYTAKYPNSSDLDRLSQSHPILNMIDTKKSSLNISGYNFSLGAAVKAGACMLDGGNMLETIKVSPQTMDGILKSILKVKRSLGMFVSDIPGERNPYENILYKICLSGDGWPYIASRTSITGRAWENTIVDLESDSKPQKPGNSGSNRSLQSAGFPAGLTYSQLMTLKDSMLQLDPNAKTWMDIEGRPDDPVEIALYQPSSGCYIHFFREPTDLKQFKQDAKYSHGIDVGDLFAAQPGLTSAVIEALPRNMVITCQGSEDIKKLLESQGRKDIKLVDISMSKPDSRKFENAVWDQYKDLCHMHTGIVVEKKKRGGKEEITPHCALMDCIMFDAAVVGGLDARILRAVLPRDMVFRTSTPKVVL

SEQ ID NO: 7694 - protein, 569 aa, Artificial Sequence
  derived and/or modified protein sequence (wt) from LASV(Nig08-A18;Clade III)__ADU56615__NP
MSASKEVKSFLWTQSLRRELSGYCSNIKLQVVKDAQALLHGLDFSEVSNVQRLMRKQKRDDSDLKRLRDLNQAVNNLVELKSTQQKSVLRIGTLSSDDLLILAADLEKLKSKVVRTERPLSSGIYMGNLSSQQLDQRKALLNMIGMTGGNGGRNATSDGIVRVWDVKNAELLNNQFGTMPSLTLACLTKQGQVDLNDAVQALTDLGLIYTAKYPNSSDLDRLAQSHPILNMIDTKKSSLNISGYNFSLGAAVKAGACMLDGGNMLETIKVSPQTMDGILKSILKVKRSLGMFISDTPGERNPYENILYKICLSGDGWPYIASRTSIVGRAWENTVVDLETDNKPQKTGNGGSNKSLQSAGFAAGLTYSQLMTLKDSMLQLDPNAKTWMDIEGRPEDPVEIALYQPVSGCYIHFFREPTDLKQFKQDAKYSHGIDVTDLFAAQPGLTSAVIEALPRNMVITCQGSEDIRKLLESQGRRDIKLIDISLSKVDSRKFENAVWDQFKDLCHMHTGIVVEKKKRGGKEEITPHCALMDCIMFDAAVSGGVDAKVLRAVLPRDMVFRTSTPKVVL

SEQ ID NO: 7695 - protein, 569 aa, Artificial Sequence
  derived and/or modified protein sequence (wt) from LASV(Nig08-A19;Clade III)__ADU56619__NP
MSASKEVKSFLWTQSLRRELSGYCSNIKLQVVKDAQALLHGLDFSEVSNVQRLMRKQKRDDGDLKRLRDLNQAVNNLVELKSTQQKSVLRVGTLSSDDLLVLAADLEKLKSKVVRTERPLSSGIYMGNLSSQQLDQRKALLNMIGMTGGNGGRNTTSDGIVRVWDVKNAELLNNQFGTMPSLTLACLTKQGQVDLNDAVQALTDLGLIYTAKYPNSSDLDRLAQSHPILNMIDTKKSSLNISGYNFSLGAAVKAGACMLDGGNMLETIKVSPQTMDGILKSILKVKRSLGMFISDTPGERNPYENILYKICLSGDGWPYIASRTSIVGRAWENTVVDLESDNKPQKTGNGGSNKSLQSAGFAAGLTYSQLMTLKDSMLQLDPNAKTWMDIEGRPEDPVEIALYQPSSGCYIHFFREPTDLKQFKQDAKYSHGIDVTDLFAAQPGLTSAVIEALPRNMVITCQGSEDIRKLLESQGRRDIKLIDISLSKVDSRKFENAVWDQFKDLCHMHTGIVVEKKKRGGKEEITPHCALMDCIMFDAAVSGGVDAKVLRAVLPRDMVFRTSTPKVVL

SEQ ID NO: 7696 - protein, 569 aa, Artificial Sequence
  derived and/or modified protein sequence (wt) from LASV(ONM-299;Clade III)__ANH09735__NP
MSASKEVKSFLWTQSLRRELSGYCSNIKLQVVKDAQALLHGLDFSEVSNIQRLMRKERRDDSDLKRLRDLNQAVNNLVELKSTQQKSVLRVGTLSSDDLLTLAADLEKLKSKVIRTERPLSSGVYMGNLSTQQLDQRRALLNMIGMTNGGQGANAGRDGIVRVWDVKNAELLNNQFGTMPSLTLACLTKQGQVDLNDAVQALTDLGLIYTAKYPNSSDLDRLSQNHPILNMIDTKKSSLNISGYNFSLGAAVKAGACMLDGGNMLETIKVSPQTMDGILKSILKVKRSLGMFVSDTPGERNPYENILYKICLSGDGWPYVASRTSIIGRAWENTVVDLESDSKPQRPGSKESNRSLQTAGFPAGLTYSQLMTLKDSMLQLDPNAKTWMDIEGRPDDPVEIALYQPSSGCYIHFFREPTDLKQFKQDAKYSHGIDIGDLFAAQPGLTSAVIEALPRNMVITCQGSEDIKRLLESQGRKDIRLVDISLSKADSRKFENAVWDQFKDLCNMHTGVVVEKKKKGGKEEITPHCALMDCIMFDAAVMGGLDAKVLRAVLPKDMVFRTSTPRVVL

SEQ ID NO: 7697 - protein, 569 aa, Artificial Sequence
  derived and/or modified protein sequence (wt) from LASV(ONM-314;Clade III)__ANH09737__NP
MSASKEVKSFLWTQSLRRELSGYCSNIKLQVVKDAQALLHGLDFSEVSNIQRLMRKERRDDSDLKRLRDLNQAVNNLVELKSTQQKSVLRVGTLSSDDLLTLAADLEKLKSKVIRTERPLSSGVYMGNLSTQQLDQRRALLNMIGMTNGGQGANAGRDGIVRVWDVKNAELLNNQFGTMPSLTLACLTKQGQVDLNDAVQALTDLGLIYTAKYPNSSDLDRLSQNHPILNMIDTKKSSLNISGYNFSLGAAVKAGACMLDGGNMLETIKVSPQTMDGILKSILKVKRSLGMFVSDTPGERNPYENILYKICLSGDGWPYVASRTSIIGRAWENTVVDLESDSKPQRPGSKESNRSLQTAGFPAGLTYSQLMTLKDSMLQLDPNAKTWMDIEGRPDDPVEIALYQPSSGCYIHFFREPTDLKQFKQDAKYSHGIDMGDLFAAQPGLTSAVIEALPRNMVITCQGSEDIKRLLESQGRRDIRLVDISLSKADSRKFENAVWDQFKDLCNMHTGVVVEKKKKGGKEEITPHCALMDCIMFDAAVMGGLDAKVLRAVLPKDMVFRTSTPRVVL

SEQ ID NO: 7698 - protein, 569 aa, Artificial Sequence
  derived and/or modified protein sequence (wt) from LASV(ONM-700;Clade III)__ANH09739__NP
MSASKEVKSFLWTQSLRRELSGYCSNIKLQVVKDAQALLHGLDFSEVSNIQRLMRKERRDDSDLKRLRDLNQAVNNLVELKSTQQKSVLRVGTLSSDDLLTLAADLEKLKSKVIRTERPLSSGVYMGNLSTQQLDQRRALLNMIGMTSGGQGANAGRDGIVRVWDVKNAELLNNQFGTMPSLTLACLTKQGQVDLNDAVQALTDLGLIYTAKYPNSSDLDRLSQNHPILNMIDTKKSSLNISGYNFSLGAAVKAGACMLDGGNMLETIKVSPQTMDGILKSILKVKRSLGMFVSDTPGERNPYENILYKICLSGDGWPYVASRTSIIGRAWENTVVDLESDSKPQRPGSKESNRSLQTAGFPAGLTYSQLMTLKDSMLQLDPNAKTWMDIEGRPDDPVEIALYQPSSGCYIHFFREPTDLKQFKQDAKYSHGIDIGDLFAAQPGLTSAVIEALPRNMVITCQGSEDIKRLLESQGRRDIRLVDISLSKADSRKFENAVWDQFKDLCNMHTGVVVEKKKKGGKEEITPHCALMDCIMFDAAVMGGLDAKVLRAVLPKDMVFRTSTPRVVL

SEQ ID NO: 7699 - protein, 569 aa, Artificial Sequence
  derived and/or modified protein sequence (wt) from LASV(Weller;Clade III)__AAT49009__NP
MSASKEVKSFLWTQSLRRELSGYCSNIKLQVVKDAQALLHGLDFSEVSNVQRLMRKQRRDDGDLKRLRDLNQAVNNLVELKSTQQKSVLRVGTLNSDDLLVLAADLEKLKSKVIRTERPLSSGIYMGNLSSQQLDQRRALLNMIGMTGGNRGGGTSSDGIVRVWDVKNAELLNNQFGTMPSLTLACLTKQGQVDLNDAVQALTDLGLIYTAKYPNSSDLDRLAQSHPILNMIDTKKSSLNISGYNFSLGAAVKAGACMLDGGNMLETIKVSPQTIDGILKTILKVKKSLGMFISDVPGERNPYENILYKICLSGDGWPYIASRTSIVGRAWENTVVDLESDNKPQKTGNGGSNKSLQSAGFAAGLTYSQLMTLKDSMLQLDPNSKTWMDIEGRPEDPVEIALYQPNSGCYIHFFREPTDLKQFKQDAKYSHGIDVTDLFAAQPGLTSAVIEALPRNMVITCQGSEDIRKLLESQGRRDIKLIDISLNKADSRKFENAVWDQFKDLCHMHTGVVVEKKKRGGKEEITPHCALMDCIMFDAAVSGGLDAKVLRAVLPRDMVFRTSTPKVVL

SEQ ID NO: 7700 - protein, 569 aa, Artificial Sequence
  derived and/or modified protein sequence (wt) from LASV(BA366;Clade IV)__ADI39452__NP
MSVSKEVKSFLWTQSLRRELSGYCSNIKLQVVKDAQALLHGLDFSEVSNVQRLMRKQRRDDNDLKRLRDLNQAVNNLVELKSTQQKSVLRVGTLTSDDLLILAADLEKLKTKVTRTERPLSAGVYMGNLSSQQLEQRRALLNMIGMNGGNQGVQAGRDGVVRVWDVKNAELLNNQFGTMPSLTLACLTKQGQVDLNDAVQALTDLGLIYTAKYPNTSDLDRLAQSHPILNMIDTKKSSLNISGYNFSLGAAVKAGACMLDGGNMLETIKVSPQTMDGILKSILKVKRTLGMFVSDTPGERNPYENILYKICLSGDGWPYIASRTSITGRAWENTIVDLESDGKPQKVGNNGSNKSLQSAGFTAGLTYSQLMTLKDAMLQLDPNAKTWMDIEGRPEDPVEVALYQPSSGCYIHFFREPTDLKQFKQDAKYSHGIDVTDLFAAQPGLTSAVIEALPRNMVITCQGSEDVRKLLESQGRKDIKLIDIALSKADSRKYENAVWDQYKDLCHMHTGVVVEKKKRGGKEEMTPHCALMDCIMFDAAVSGGLSTQVLRAVLPRDMVFRTSTPKVVL

SEQ ID NO: 7701 - protein, 569 aa, Artificial Sequence
  derived and/or modified protein sequence (wt) from LASV(G1180-SLE-2010;Clade IV)__AIT17169__NP
MSASKEIKSFLWTQSLRRELSGYCSNIKLQVVKDAQALLHGLDFSEVSNVQRLMRKERRDDNDLKRLRDLNQAVNNLVELKSTQQKSILRVGTLTSDDLLILAADLEKLKSKVIRTERPLSAGVYMGNLSSQQLDQRRALLSMIGMSSGNQRAQAGRDGVVRVWDVKNVELLNNQFGTMPSLTLACLTKQGQVDLNDAVQALTDLGLIYTAKYPNTSDLDRLTQSHPILNMIDTKKSSLNISGYNFSLGAAVKAGACMLDGGNMLETIKVSPQTMDGILKSILKVKKALGMFISDTPGERNPYENILYKICLSGDGWPYIASRTSITGRAWENTVVDLESDGKPQKAGSNNSNKSLQSVGFTAGLTYSQLMTLKDAMLQLDPNAKTWMDIEGRPEDPVEIALYQPSSGCYIHFFREPTDLKQFKQDAKYSHGIDVTDLFAAQPGLTSAVIDALPRNMVITCQGSDDIRKLLESQGRKDIKLIDIALSKTDSRKYENAVWDQYKDLCHMHTGVVVEKKKRGGKEEITPHCALMDCIMFDAAVSGGLNTSVLRAVLPRDMVFRTSTPRVVL

SEQ ID NO: 7702 - protein, 569 aa, Artificial Sequence
  derived and/or modified protein sequence (wt) from LASV(G1190-SLE-2010;Clade IV)__AIT17173__NP
MSASKEIKSFLWTQSLRRELSGYCSNIKLQVVKDAQALLHGLDFSEVSNVQRLMRKERRDDNDLKRLRDLNQAVNNLVELKSTQQKSILRVGTLTSDDLLILAADLEKLKSKVTRTERPLSAGVYMGNLSSQQLDQRRALLNMIGMSGSNQGARAGRDGVVRVWDVKNAELLNNQFGTMPSLTLACLTKQGQVDLNDAVQALTDLGLIYTAKYPNTSDLDRLTQSHPILNMIDTKKSSLNISGYNFSLGAAVKAGACMLDGGNMLETIKVSPQTMDGILKSILKVKKALGMFISDAPGERNPYENILYKICLSGDGWPYIASRTSITGRAWENTVVDLESDGKPQKAGSNGSNKSLQSAGFTAGLTYSQLMTLKDAMLQLDPNAKTWMDIEGRPEDPVEIALYQPSSGCYIHFFREPTDLKQFKQDAKYSHGIDVTDLFAAQPGLTSAVIDALPRNMVITCQGSDDIRKLFESQGRKDIKLIDIALSKTDSRKYENAVWDQYKDLCHMHTGIVVEKKKRGGKEEITPHCALMDCIMFDAAVSGGLNTSVLRAVLPRDMVFRTSTPRVVL

SEQ ID NO: 7703 - protein, 569 aa, Artificial Sequence
  derived and/or modified protein sequence (wt) from LASV(G1200-LIB-2010;Clade IV)__AIT17177__NP
MSASKEIKSFLWTQSLRRELSGYCSNIKLQVVKDAQALLHGLDFSEVSNVQRLMRKQRRDDNDLKRLRDLNQAVNNLVELKSTQQKSVLRVGTLTSDDLLVLAADLEKLKSKVIRTERPLSAGIYMGNLSSQQLDQRRALLNMIGMSGGNQGARAGRDGVVRVWDVKNADLLNNQFGTMPSLTLACLTKQGQVDLNDVVQALTDLGLIYTAKYPNTSDLDRLTQSHPILKMIDANKSSLNISGYNFSLGAAVKAGACMLDGGNMLETIKVSPQTMDGILKSILKVKKSLGMFISDTPGERNPYENILYKICLSGDGWPYIASRTSIIGRAWENTVVDLESDGKPQKTGSNNSSKSLQSAGFAAGLTYSQLMTLKDAMLQLDPNAKTWMDIEGRPEDPVEIALYQPSSGCYIHFFREPTDLKQFKQDAKYSHGIDVTDLFAAQPGLTSAVIEALPRNMVITCQGSDDIRKLLESQGRKDIKLIDIALSKTDSRKYENAVWDQYKDLCHMHTGIVVEKKKRGGKEEITPHCALMDCIMFDAAVSGGLNTLVLRAVLPRDMVFRTSTPKVVL

SEQ ID NO: 7704 - protein, 569 aa, Artificial Sequence
  derived and/or modified protein sequence (wt) from LASV(G1442-SLE-2011;Clade IV)__AIT17181__NP
MSASKEVKSFLWTQSLRRELSGYCSNIKLQVVKDAQALLHGLDFSEVSNVQRLMRKQRRDDNDLKRLRDLNQAVNNLVELKSTQQKSVLRVGTLTSDDLLVLAADLEKLKSKVIRTERPLSAGVYMGNLSSQQLDQRRALLNMIGMSGGIQGTRTGRDGVVRVWDVKNADLLNNQFGTMPSLTLACLTKQGQVDLNDVVQALTDLGLIYTAKYPNASDLDRLTQSHPILNMIDTKKSSLNISGYNFSLGAAVKAGACMLDGGNMLETIKVSPQTMDGILKSILKVKKTLGMFISDTPGERNPYENILYKICLSGDGWPYIASRTSITGRAWENTVVDLESDGKPQKAGSNNSNKSLQSAGFAAGLTYSQLMTLKDAMLQLDPNAKTWMDIEGRPEDPVEIALYQPSSGCYIHFFREPTDLKQFKQDAKYSHGIDVTDLFAAQPGLTSAVIEALPRNMVITCQGSDDIKKLLESQGRKDIKLIDIALSKTDSRKYENAVWDQYKDLCHMHTGVVVEKKKRGGKEEITPHCALMDCIMFDAAVSGGLNTLVLRAVLPRDMVFRTSTPRVVL

SEQ ID NO: 7705 - protein, 569 aa, Artificial Sequence
  derived and/or modified protein sequence (wt) from LASV(G1529-SLE-2011;Clade IV)__AIT17185__NP
MSASKEIKSFLWTQSLRRELSGYCSNIKLQVVKDAQALLHGLDFSEVSNVQRLMRKQRRDDGDLKRLRDLNQAVNNLVELKSTQQKSVLRVGTLTSDDLLILAADLEKLKSKVTRTERPLSAGVYMGNLSSQQLDQRRALLNMIGMSGGNRGARTGKDGVVRIWDVKNADLLNNQFGTMPSLTLACLTKQGQVDLNDVVQALTDLGLIYTAKYPNTSDLDRLTQSHPILNMIDTNKSSLNISGYNFSLGAAVKAGACMLDGGNMLETIKVSPQTMDGILKSILKVKKSLGMFISDTPGERNPYENILYKICLSGDGWPYIASRTSITGRAWENTVVDLESDEKPQKAGSNNSNKSLQSTGFTAGLTYSQLMTLKDAMLQLDPNAKTWMDIEGRPEDPVEIALYQPSSGCYIHFFREPTDLKQFKQDAKYSHGIDVTDLFAAQPGLTSAVIDTLPRNMVITCQGSDDIRKLLESQGRKDIKLIDIALSKTDSRKYENAVWDQYKDLCHMHTGVVVEKKKRGGKEEITPHCALMDCIMFDAAVSGGLNASVLRAVLPRDMVFRTSTPRVVL

SEQ ID NO: 7706 - protein, 569 aa, Artificial Sequence
  derived and/or modified protein sequence (wt) from LASV(G1618-SLE-2011;Clade IV)__AIT17189__NP
MSASKEIKSFLWTQSLRRELSGYCSNIKLQVVKDAQALLHGLDFSEVSNVQRLMRKERRDDNDLKRLRDLNQAVNNLVELKSTQQKSVLRVGTLTSDDLLILAADLEKLKSKVTRTERPLSAGVYMGNLSSQQLDQRRALLSMIGMSGGNQGARTGRDGVVRVWDVKNAELLNNQFGTMPSLTLACLTKQGQVDLNDVVQALTDLGLIYTAKYPNTSDLDRLTQSHPILNMIDTKKSSLNISGYNFSLGAAVKAGACMLDGGNMLETIKVSPQTIDGILKSILKVKKALGMFISDTPGERNPYENILYKICLSGDGWPYIASRTSITGRAWENTVVDLESDGKPQKAGSNNSNKSLQSAGFTAGLTYSQLMTLKDAMLQLDPNAKTWMDIEGRPEDPVEIALYQPSSGCYIHFFREPTDLKQFKQDAKYSHGIDVTDLFAAQPGLTSAVIDALPRNMVITCQGSDDIRKLLESQGRKDIKLIDIALSKTDSRKYENAVWDQYKDLCHMHTGVVVEKKKRGGKEEITPHCALMDCIMFDAAVSGGLNSLVLRAVLPRDMVFRTSTPRVVL

SEQ ID NO: 7707 - protein, 569 aa, Artificial Sequence
  derived and/or modified protein sequence (wt) from LASV(G1646-SLE-2011;Clade IV)__AIT17193__NP
MSASKEIKSFLWTQSLRRELSGYCSNIKLQVVKDAQALLHGLDFSEVSNVQRLMRKERRDDNDLKRLRDLNQAVNNLVELKSTQQKSVLRVGTLTSDDLLILAADLEKLKSKVTRTERPLSAGVYMGNLSSQQLDQRRALLSMIGMSGGNQGARTGRDGVVRVWDVKNAELLNNQFGTMPSLTLACLTKQGQVDLNDAVQALTDLGLIYTAKYPNTSDLDRLTQSHPILNMIDTKKSSLNISGYNFSLGAAVKAGACMLDGGNMLETIKVSPQTMDGILKSILKVKKALGMFISDTPGERNPYENILYKICLSGDGWPYIASRTSITGRAWENTVVDLESDGKPQKAGNNNSNKSLQSAGFTAGLTYSQLMTLKDAMLQLDPNAKTWMDIEGRPEDPVEIALYQPSSGCYIHFFREPTDLKQFKQDAKYSHGIDVTDLFAAQPGLTSAVIDALPRNMVITCQGSDDIRKLLESQGRKDIKLIDIALSKTDSRKYENAVWDQYKDLCHMHTGVVVEKKKRGGKEEITPHCALMDCIMFDAAVSGGLNSLVLRAVLPRDMVFRTSTPRVVL

SEQ ID NO: 7708 - protein, 569 aa, Artificial Sequence
  derived and/or modified protein sequence (wt) from LASV(G1647-SLE-2011;Clade IV)__AIT17197__NP
MSASKEIKSFLWTQSLRRELSGYCSNIKLQVVKDAQALLHGLDFSEVSNVQRLMRKERRDDNDLKRLRDLNQAVNNLVELKSTQQKSILRVGTLTSDDLLILAADLEKLKSKVIRTERPLSAGVYMGNLSLQQLDQRRALLNMIGMSGSNQGVRAGRDGVVRVWDVKNAELLNNQFGTMPSLTLACLTKQGQVDLNDAVQALTDLGLIYTAKYPNTSDLDRLTQSHPILNMIDTKKSSLNISGYNFSLGAAVKAGACMLDGGNMLETIKVSPQTMDGILKSILKVKKALGMFISDTPGERNPYENILYKICLSGDGWPYIASRTSITGRAWENTVVDLESDGKPQKAGSNGSNKSLQSAGFTAGLTYSQLMTLKDAMLQLDPNAKTWMDIEGRPEDPVEIALYQPSSGCYIHFFREPTDLKQFKQDAKYSHGIDVTDLFAAQPGLTSAVIDALPRNMVITCQGSDDIRKLLESQGRKDIKLIDIALSKTDSRKYENAVWDQYKDLCHMHTGIVVEKKKRGGKEEITPHCALMDCIMFDAAVSGGLNTSVLRAVLPRDMVFRTSTPRVVL

SEQ ID NO: 7709 - protein, 569 aa, Artificial Sequence
  derived and/or modified protein sequence (wt) from LASV(G1727-SLE-2011;Clade IV)__AIT17201__NP
MSASKEIKSFLWTQSLRRELSGYCSNIKLQVVKDAQALLHGLDFSEVSNVQRLMRKERRDDNDLKRLRDLNQAVNNLVELKSTQQKSILRVGTLTSDDLLILAADLEKLKSKVTRTERPLSAGVYMGNLSSQQLDQRRALLNMIGMSGSNQGARAGRDGVVRVWDVKNAELLNNQFGTMPSLTLACLTKQGQVDLNDAVQALTDLGLIYTAKYPNTSDLDRLTQSHPILNMIDTKKSSLNISGYNFSLGAAVKAGACMLDGGNMLETIKVSPQTMDGILKSILKVKKALGMFISDAPGERNPYENILYKICLSGDGWPYIASRTSITGRAWENTVVDLESDGKPQKAGSNGSNKSLQSAGFTAGLTYSQLMTLKDAMLQLDPNAKTWMDIEGRPEDPVEIALYQPSSGCYIHFFREPTDLKQFKQDAKYSHGIDVTDLFAAQPGLTSAVIDALPRNMVITCQGSDDIKKLFESQGRKDIKLIDIALSKTDSRKYENAVWDQYKDLCHMHTGIVVEKKKRGGKEEITPHCALMDCIMFDAAVSGGLNTSVLRAVLPRDMVFRTSTPRVVL

SEQ ID NO: 7710 - protein, 569 aa, Artificial Sequence
  derived and/or modified protein sequence (wt) from LASV(G1774-SLE-2011;Clade IV)__AIT17205__NP
MSASKEIKSFLWTQSLRRELSGYCSNIKLQVVKDAQALLHGLDFSEVSNVQRLMRKERRDDNDLKRLRDLNQAVNNLVELKSTQQKSILRVGTLTSDDLLILAADLEKLKSKVTRTERPLSAGVYMGNLSSQQLDQRKALLNMIGMSGSNQGARIGRDGVVRVWDVKNAELLNNQFGTMPSLTLACLTKQGQVDLNDAVQALTDLGLIYTAKYPNTSDLDRLTQSHPILNMIDTKKSSLNISGYNFSLGAAVKAGACMLDGGNMLETIKVSPQTMDGILKSILKVKKALGMFISDTPGERNPYENILYKICLSGDGWPYIASRTSITGRAWENTVVDLESDGKPQKAGSNSSNKSLQSAGLTAGLTYSQLMTLKDAMLQLDPNAKTWMDIEGRPEDPVEIALYQPSSGCYIHFFREPTDLKQFKQDAKYSHGIDVTDLFAAQPGLTSAVIDALPRNLVITCQGSDDIRKLLESQGRKDIKLIDIALSKTDSRKYENAVWDQYKDLCHMHTGIVVEKKKRGGKEEITPHCALMDCIMFDAAVSGGLNASVLRAVLPRDMVFRTSTPRVVL

SEQ ID NO: 7711 - protein, 569 aa, Artificial Sequence
  derived and/or modified protein sequence (wt) from LASV(G1792-SLE-2011;Clade IV)__AIT17209__NP
MSASKEIKSFLWTQSLRRELSGYCSNIKLQVVKDAQALLHGLDFSEVSNVQRLMRKERRDDNDLKRLRDLNQAVNNLVELKSTQQKSILRVGTLTSDDLLILAADLEKLKSKVTRTERPLSAGVYMGNLSSQQLDQRRALLSMIGMSGGNQGARAGRDGVVRVWDVKNAELLNNQFGTMPSLTLACLTKQGQVDLNDVVQALTDLGLIYTAKYPNTSDLDRLTQSHPILNMIDTKKSSLNISGYNFSLGAAVKAGACMLDGGNMLETIKVSPQTMDGILKSILKVKKALGMFISDTPGERNPYENILYKICLSGDGWPYIASRTSITGRAWENTVVDLESDGKLQKTGSNNSNKSLQSAGFTAGLTYSQLMTLKDAMLQLDPNAKIWMDIEGRPEDPVEIALYQPSSGCYIHFFREPTDLKQFKQDAKYSHGIDVTDLFAAQPGLTSAVIDALPRNMVITCQGSDDIRKLLESQGRKDIKLIDIALNKTDSRKYENAVWDQYKDLCHMHTGVVVEKKKKGGKEEITPHCALMDCIMFDAAVSGGLNTSVLRAVLPRDMVFRTSTPRVVL

SEQ ID NO: 7712 - protein, 569 aa, Artificial Sequence
  derived and/or modified protein sequence (wt) from LASV(G1897-SLE-2011;Clade IV)__AIT17211__NP
MSASKEIKSFLWTQSLRRELSGYCSNIKLQVVKDAQALLHGLDFSEVSNVQRLMRKERRDDNDLKRLRDLNQAVNNLVELKSTQQKSILRVGTLTSDDLLILAADLEKLKSKVTRTERPLSAGVYMGNLSSQQLDQRRALLNMIGMSGGNQGAQAGRDGVVRVWDVKNAELLNNQFGTMPSLTLACLTKQGQVDLNDAVQALTDLGLIYTAKYPNTSDLDRLTQSHPILNMIDTKKSSLNISGYNFSLGAAVKAGACMLDGGNMLETIKVSPQTMDGILKSILKVKKALGMFISDTPGERNPYENILYKICLSGDGWPYIASRTSITGRAWENTVVDLESDGKPQKANSNSSNKSLQSAGFTAGLTYSQLMTLKDAMLQLDPNAKTWMDIEGRPEDPVEIALYQPSSGCYIHFFREPTDLKQFKQDAKYSHGIDVTDLFAAQPGLTSAVIDALPRNMVITCQGSDDIRKLLESQGRKDIKLIDIALSKTDSRKYENAVWDQYKDLCHMHTGIVVEKKKRGGKEEITPHCALMDCIMFDAAVSGGLNTSVLRAVLPRDMVFRTSTPRVVL

SEQ ID NO: 7713 - protein, 569 aa, Artificial Sequence
  derived and/or modified protein sequence (wt) from LASV(G1932-SLE-2011;Clade IV)__AIT17213__NP
MSASKEIKSFLWTQSLRRELAGYCSNIKLQVVKDAQALLHGLDFSEVSNVQRLMRKERRDDNDLKRLRDLNQAVNNLVELKSTQQKSVLRVGTLTSDDLLILAADLEKLKSKVIRTERPLSAGVYMGNLSSQQLDQRRALLNMIGMSGSNQGVRAGRDGVVRVWDVKNAELLNNQFGTMPSLTLACLTKQGQVDLNDAVQALTDLGLIYTAKYPNTSDLDRLTQSHPILNMIDTKKSSLNISGYNFSLGAAVKAGACMLDGGNMLETIKVSPQTMDGILKSILKVKKALGMFISDTPGERNPYENILYKICLSGDGWPYIASRTSITGRAWENTVVDLESDGKPQKAGSNGSNKSLQSAGFTAGLTYSQLMTLKDAMLQLDPNAKTWMDIEGRPEDPVEIALYQPSSGCYIHFFREPTDLKQFKQDAKYSHGIDVTDLFAAQPGLTSAVIDALPRNMVITCQGSDDIRKLLESQGRKDIKLIDIALSKTDSRKYENAVWDQYKDLCHMHTGIVVEKKKRGGKEEITPHCALMDCIMFDAAVSGGLNTSVLRAVLPRDMVFRTSTPRVVL

SEQ ID NO: 7714 - protein, 569 aa, Artificial Sequence
  derived and/or modified protein sequence (wt) from LASV(G1959-SLE-2011;Clade IV)__AIT17217__NP
MSASKEIKSFLWTQSLRRELSGYCSNIKLQVVKDAQALLHGLDFSEVSNVQRLMRKERRDDNDLKRLRDLNQAVNNLVELKSTQQKSILRVGTLTSDDLLILAADLEKLKSKVTRTERPLSAGVYMGNLSSQQLDQRRALLSMIGMSSGVQGARAGRDGVVRVWDVKNAELLNNQFGTMPSLTLACLTKQGQVDLNDVVQALTDLGLIYTAKYPNTSDLDRLTQSHPILNMIDTKKSSLNISGYNFSLGAAVKAGACMLDGGNMLETIKVSPQTMDGILKSILKVKKALGMFISETPGERNPYENILYKICLSGDGWPYIASRTSITGRAWENTVVDLESDGKPQKAGSNNSNKSLQSTGFAAGLTYSQLMTLKDAMLQLDPNAKTWMDIEGRPEDPVEVALYQPSSGCYIHFFREPTDLKQFKQDAKYSHGIDVTDLFAAQPGLTSAVIDALPRNMVITCQGSDDIKKLLESQGRKDIKLIDIALSKTDSRKYENAVWDQYKDLCHMHTGVVVEKKKRGGKEEITPHCALMDCIMFDAAVSGGLNTSVLRAVLPRDMVFRTSTPRVVL

SEQ ID NO: 7715 - protein, 569 aa, Artificial Sequence
  derived and/or modified protein sequence (wt) from LASV(G2141-SLE-2011;Clade IV)__AIT17225__NP
MSASKEIKSFLWTQSLRRELSGYCSNIKLQVVKDAQALLHGLDFSEVSNVQRLMRKQRRDDNDLKRLRDLNQAVNNLVELKSTQQKSVLRVGTLTSDDLLVLAADLEKLKSKVTRTERPLSAGVYMGNLSSQQLDQRRALLNMIGMSGGNQGARAGNDGVVRVWDVKNADLLNNQFGTMPSLTLACLTKQGQVDLNDVVQALTDLGLIYTAKYPNTSDLDRLTQSHPILNMIDTKKSSLNISGYNFSLGAAVKAGACMLDGGNMLETIKVSPQTMDGILKSILKVKKALGMFISDTPGERNPYENILYKICLSGDGWPYIASRTSITGRAWENTVVDLESDGKPQKTGNNSSNKSLQSAGFTAGLTYSQLMTLKDAMLQLDPNAKTWMDIEGRPEDPVEVALYQPSSGCYIHFFREPTDLKQFKQDAKYSHGIDVTDLFAAQPGLTSAVIEALPRNMVITCQGSDDIRKLLESQGRKDIKLIDIALSKIDSRKYENAVWDQYKDLCHMHTGVVVEKKKRGGKEEITPHCALMDCIMFDAAVSGGLNTLVLRAVLPRDMVFRTSTPKVVL

SEQ ID NO: 7716 - protein, 569 aa, Artificial Sequence
  derived and/or modified protein sequence (wt) from LASV(G2147-SLE-2011;Clade IV)__AIT17229__NP
MSASKEIKSFLWTQSLRRELSGYCSNIKLQVVKDAQALLHGLDFSEVSNVQRLMRKERRDDNDLKRLRDLNQAVNNLVELKSTQQKSVLRVGTLTSDDLLILAADLEKLKSKVIRTERPLSAGVYMGNLSSQQLDQRRALLSMIGMSGGNQGTRAGRDGVVRVWDVKNAELLNNQFGTMPSLTLACLTKQGQVDLNDAVQALTDLGLIYTAKYPNTSDLDRLTQSHPILNMIDTKKSSLNISGYNFSLGAAVKAGACMLDGGNMLETIKVSPQTMDGILKSILKVKKALGMFISDTPGERNPYENILYKICLSGDGWPYIASRTSITGRAWENTVVDLESDGKPQKAGSNNSNKSLQSAGFTAGLTYSQLMTLKDAMLQLDPNAKTWMDIEGRPEDPVEIALYQPSSGCYIHFFREPTDLKQFKQDAKYSHGIDVTDLFAAQPGLTSAVIDALPRNMVITCQGSDDIRKLLESQGRKDIKLIDIALSKADSRKYENAVWDQYKDLCHMHTGVVVEKKKRGGKEEITPHCALMDCIMFDAAVSGGLNTSVLRAVLPRDMVFRTSTPRVVL

SEQ ID NO: 7717 - protein, 569 aa, Artificial Sequence
  derived and/or modified protein sequence (wt) from LASV(G2165-SLE-2011;Clade IV)__AIT17233__NP
MSASKEVKSFLWTQSLRRELSGYCSNIKLQVVKDAQALLHGLDFSEVSNVQRLMRKERRDDNDLKRLRDLNQAVNNLVELKSTQQKSILRVGTLTSDDLLVLAADLEKLKSKVTRTERPLSAGVYMGNLSSQQLDQRRALLSMIGMSGGNQGAQAGRDGVVRVWDVKNAELLNNQFGTMPSLTLACLTKQGQVDLNDAVQALTDLGLIYTAKYPNTSDLDRLTQSHPILNMIDTKKSSLNISGYNFSLGAAVKAGACMLDGGNMLETIKVSPQTMDGILKSILKVKKALGMFISDTPGERNPYENILYKICLSGDGWPYIASRTSITGRAWENTVVDLESDGKPQKAGSNNSNKSLQSAGFTAGLTYSQLMTLKDAMLQLDPNAKTWMDIEGRPEDPVEVALYQPSSGCYIHFFREPTDLKQFKQDAKYSHGIDVTDLFAAQPGLTSAVIDALPRNMVITCQGSDDIRKLLESQGRKDIKLIDIALSKTDSRKYENAVWDQYKDLCHMHTGVVVEKKKRGGKEEITPHCALMDCIMFDAAVSGGLNTSVLRAVLPRDMVFRTSTPRVVL

SEQ ID NO: 7718 - protein, 569 aa, Artificial Sequence
  derived and/or modified protein sequence (wt) from LASV(G2184-SLE-2011;Clade IV)__AIT17237__NP
MSASKEIKSFLWTQSLRRELSGYCSNIKLQVVKDAQALLHGLDFSEVSNVQRLMRKERRDDNDLKRLRDLNQAVNNLVELKSTQQKSILRVGTLTSDDLLILAADLEKLKSKVTRTERPLSAGVYMGNLSSQQLDQRRALLSMIGMSGGNQGARAGRDGVVRVWDVKNAELLNNQFGTMPSLTLACLTKQGQVDLNDAVQALTDLGLIYTAKYPNTSDLDRLTQSHPILNMIDTKKSSLNISGYNFSLGAAVKAGACMLDGGNMLETIKVSPQTMDGILKSILKVKKALGMFISDTPGERNPYENILYKICLSGDGWPYIASRTSITGRAWENTVVDLESDGKPQKAGSNNSNKSLQSAGFTAGLTYSQLMTLKDAMLQLDPNAKTWMDIEGRPEDPVEVALYQPSSGCYIHFFREPTDLKQFKQDAKYSHGIDVTDLFAAQPGLTSAVIDALPRNMVITCQGSDDIRKLLESQGRKDIKLIDIALSKTDSRKYENAVWDQYKDLCHMHTGVVVEKKKRGGKEEITPHCALMDCIMFDAAVSGGLNTSVLRAVLPRDMVFRTSTPRVVL

SEQ ID NO: 7719 - protein, 569 aa, Artificial Sequence
  derived and/or modified protein sequence (wt) from LASV(G2197-SLE-2011;Clade IV)__AIT17241__NP
MSASKEIKSFLWTQSLRRELSGYCSNIKLQVVKDAQALLHGLDFSEVSNVQRLMRKERRDDNDLKRLRDLNQAVNNLVELKSTQQKSILRVGTLTSDDLLILAADLEKLKSKVTRTERPLSAGVYMGNLSSQQLDQRRALLSMIGMSGGNQGARAGRDGVVRVWDVKNAELLNNQFGTMPSLTLACLTKQGQVDLNDAVQALTDLGLIYTAKYPNTSDLDRLTQSHPILNMIDTKKSSLNISGYNFSLGAAVKAGACMLDGGNMLETIKVSPQTMDGILKSILKVKKALGMFISDTPGERNPYENILYKICLSGDGWPYIASRTSITGRAWENTVVDLESDGKPQKAGSNNSNKSLQSAGFTAGLTYSQLMTLKDAMLQLDPNAKTWMDIEGRPEDPVEIALYQPSSGCYIHFFREPTDLKQFKQDAKYSHGIDVTDLFAAQPGLTSAVIDALPRNMVITCQGSDDIRKLFESQGRKDIKLIDIALSKTDSRKYENAVWDQYKDLCHMHTGVVVEKKKRGGKEEITPHCALMDCIMFDAAVSGGLNTSVLRAVLPRDMVFRTSTPRVVL

SEQ ID NO: 7720 - protein, 569 aa, Artificial Sequence
  derived and/or modified protein sequence (wt) from LASV(G2222-SLE-2011;Clade IV)__AIT17245__NP
MSASKEIKSFLWTQSLRRELSGYCSNIKLQVVKDAQALLHGLDFSEVSNVQRLMRKERRDDNDLKRLRDLNQAVNNLVELKSTQQKSILRVGTLTSDDLLILAADLEKLKSKVTRTERPLSAGVYMGNLSSQQLDQRRALLNMIGMSGSNQGARTGRDGVVRVWDVKNAELLNNQFGTMPSLTLACLTKQGQVDLNDAVQALTDLGLIYTAKYPNTSDLDRLTQSHPILNMIDTKKSSLNISGYNFSLGAAVKAGACMLDGGNMLETIKVSPQTMDGILKSILKVKKALGMFISDTPGERNPYENILYKICLSGDGWPYIASRTSITGRAWENTVVDLESDGKPQKAGSNNSNKSLQSAGLTAGLTYSQLMTLKDAMLQLDPNAKTWMDIEGRPEDPVEIALYQPSSGCYIHFFREPTDLKQFKQDAKYSHGIDVADLFAAQPGLTSAVIDALPRNLVITCQGSDDIRKLLESQGRKDIKLIDIALSKTDSRKYENAVWDQYKDLCHMHTGIVVEKKKRGGKEEITPHCALMDCIMFDAAVSGGLNASVLRAVLPRDMVFRTSTPRVVL

SEQ ID NO: 7721 - protein, 569 aa, Artificial Sequence
  derived and/or modified protein sequence (wt) from LASV(G2230-SLE-2012;Clade IV)__AIT17247__NP
MSASKEIKSFLWTQSLRRELSGYCSNIKLQVVKDAQALLHGLDFSEVSNVQRLMRKQRRDDSDLKRLRDLNQAVNNLVELKSTQQKSVLRVGTLTSDDLLILAADLEKLKSKVIRTERPLSSGVYMGNLSSQQLDQRRALLNMIGMSGGNQGAQVGRDGVVRVWDVKNADLLNNQFGTMPSLTLACLTKQGQVDLNDVVQALTDLGLIYTAKYPNTSDLDRLAQSHPILNMIDTKKSSLNISGYNFSLGAAVKAGACMLDGGNMLETIKVSPQTMDGILKSILKVKKALGMFISETPGERNPYENILYKICLSGDGWPYIASRTSITGRAWENTIVDLESDGKPQKAGSNNSNKSLQSAGFTAGLTYSQLMTLKDSMLQLDPNAKTWMDIEGRPEDPVEVALYQPSSGCYIHFFREPTDLKQFKQDAKYSHGIDVTDLFAAQPGLTSAVIEALPRNMVITCQGSDDIRKLLESQGRKDIKLIDIALNKTDSRKYENAVWDQYKDLCHMHTGVVVEKKKRGGKEEITPHCALMDCIMFDAAVSGGLKTLVLRAVLPRDMVFRTSTPKVVL

SEQ ID NO: 7722 - protein, 569 aa, Artificial Sequence
  derived and/or modified protein sequence (wt) from LASV(G2259-SLE-2012;Clade IV)__AIT17251__NP
MSASKEIKSFLWTQSLRRELSGYCSNIKLQVVKDAQALLHGLDFSEVSNVQRLMRKQRRDDSDLKRLRDLNQAVNNLVELKSTQQKSVLRVGTLTSDDLLILAADLEKLKSKVIRTERPLSSGVYMGNLSSQQLDQRRALLNMIGMSGGNQGAQVGRDGVVRVWDVKNADLLNNQFGTMPSLTLACLTKQGQVDLNDVVQALTDLGLIYTAKYPNTSDLDRLAQSHPILNMIDTKKSSLNISGYNFSLGAAVKAGACMLDGGNMLETIKVSPQTMDGILKSILKVKKALGMFISETPGERNPYENILYKICLSGDGWPYIASRTSITGRAWENTIVDLESDGKPQKTGSNNSNKSLQSAGFTAGLTYSQLMTLKDSMLQLDPNAKTWMDIEGRPEDPVEVALYQPSSGCYIHFFREPTDLKQFKQDAKYSHGIDVTDLFAAQPGLTSAVIEALPRNMVITCQGSDDIRKLLESQGRKDIKLIDIALNKTDSRKYENAVWDQYKDLCHMHTGVVVEKKKRGGKEEITPHCALMDCIMFDAAVSGGLKTLVLRAVLPRDMVFRTSTPKVVL

SEQ ID NO: 7723 - protein, 569 aa, Artificial Sequence
  derived and/or modified protein sequence (wt) from LASV(G2263-SLE-2012;Clade IV)__AIT17255__NP
MSASKEIKSFLWTQSLRRELSGYCSNIKLQVVKDAQALLHGLDFSEVSNVQRLMRKERRDDNDLKRLRDLNQAVNNLVELKSTQQKSVLRVGTLTSDDLLVLAADLEKLKSKVTRTERPLSAGVYMGNLSSQQLDQRRALLSMIGMSGGNQRAQAGRDGVVRVWDVKNAELLNNQFGTMPSLTLACLTKQGQVDLNDAVQALTDLGLIYTVKYPNASDLDRLTQSHPILNMIDTKKSSLNISGYNFSLGAAVKAGACMLDGGNMLETIKVSPQTMDGILKSILKVKKTLGMFISDTPGERNPYENILYKICLSGDGWPYIASRTSITGRAWENTVVDLESNGKPQKADSNSSNKSLQSAGFTAGLTYSQLMTLKDAMLQLDPNAKTWMDIEGRPEDPVEIAFYQPSSGCYIHFFREPTDLKQFKQDAKYSHGIDVTDLFAAQPGLTSAVIDALPRNMVITCQGSDDIRKLLESQGRKDIKLIDIALSKTDSRKYENAVWDQYKDLCHMHTGVVVEKKKRGGKEEITPHCALMDCIMFDAAVSGGLNTLVLRAVLPRDMVFRTSTPRVVL

SEQ ID NO: 7724 - protein, 569 aa, Artificial Sequence
  derived and/or modified protein sequence (wt) from LASV(G2280-SLE-2012;Clade IV)__AIT17259__NP
MSASKEIKSFLWTQSLRRELSSYCSNIKLQVVKDAQALLHGLDFSEVSNVQRLMRKERRDDNDLKRLRDLNQAVNNLVELKSTQQKSILRVGTLTSDDLLILAADLEKLKSKVTRTERPLSAGVYMGNLSSQQLDQRRALLNMLGMSGSNQGARAGRDGVVRVWDVKNAELLNNQFGTMPSLTLACLTKQGQVDLNDAVQALTDLGLIYTAKYPNTSDLDRLTQSHPILNMIDTKKSSLNISGYNFSLGAAVKAGACMLDGGNMLETIKVSPQTMDGILKSILKVKKALGMFISDTPGERNPYENILYKICLSGDGWPYIASRTSITGRAWENTVVDLESDGKPQKAGSNSSNKSLQSAGFTAGLTYSQLMTLKDAMLQLDPNAKTWMDIEGRPEDPVEIALYQPSSGCYIHFFREPTDLKQFKQDAKYSHGIDVTDLFAAQPGLTSAVIDALPRNMVITCQGSDDIRKLLESQGRKDIKLIDIALSKTDSRKYENAVWDQYKDLCHMHTGIVVEKKKRGGKEEITPHCALMDCIMFDAAVSGGLNASVLRAVLPRDMVFRTSTPRVVL

SEQ ID NO: 7725 - protein, 569 aa, Artificial Sequence
  derived and/or modified protein sequence (wt) from LASV(G2295-SLE-2012;Clade IV)__AIT17263__NP
MSASKEIKSFLWTQSLRRELSGYCSNIKLQVVKDAQALLHGLDFSEVSNVQRLMRKERRDDNDLKRLRDLNQAVNNLVELKSTQQKSVLRVGTLTSDDLLILAADLEKLKSKVIRTERPLSAGVYMGNLSSQQLDQRRALLNMIGMGGSNQGARAGRDGVVRVWDVKNAELLNNQFGTMPSLTLACLTKQGQVDLNDAVQALTDLGLIYTAKYPNTSDLDRLTQSHPILNMIDTKKSSLNISGYNFSLGAAVKAGACMLDGGNMLETIKVSPQTMDGILKSILKVKKALGMFISDTPGERNPYENILYKICLSGDGWPYIASRTSITGRAWENTVVDLESDGKPQKAGSNGSNKSLQSAGFTAGLTYSQLMTLKDAMLQLDPNTKTWMDIEGRPEDPVEVALYQPSSGCYIHFFREPTDLKQFKQDAKYSHGIDVTDLFAAQPGLTSAVIDALPRNMVITCQGSDDIRKLLESQGRKDIKLIDIALSKTDSRKYENAVWDQYKDLCHMHTGIVVEKKKRGGKEEITPHCALMDCIMFDAAVSGGLNTSVLRAVLPRDMVFRTSTPRVVL

SEQ ID NO: 7726 - protein, 569 aa, Artificial Sequence
  derived and/or modified protein sequence (wt) from LASV(G2315-SLE-2012;Clade IV)__AIT17267__NP
MSASKEIKSFLWTQSLRRELSGYCSNIKLQVVKDAQALLHGLDFSEVSNVQRLMRKERRDDNDLKRLRDLNQAVNNLVELKSTQQKSVLRVGTLTSDDLLILAADLEKLKSKVTRTERPLSAGVYMGNLSSQQLDQRRALLNMIGMSGGNQGARAGRDGVVRVWDVKNAELLNNQFGTMPSLTLACLTKQGQVDLNDAVQALTDLGLIYTAKYPNTSDLDRLTQSHPILNMIDTKKSSLNISGYNFSLGAAVKAGACMLDGGNMLETIKVSPQTMDSILKSILKVKKALGMFISDTPGERNPYENILYKICLSGDGWPYIASRTSITGRAWENTVVDLESDGKPQKAGSNNSNKSLQSAGFAAGLTYSQLMTLKDAMLQLDPNAKTWMDIEGRPEDPVEIALYQPSSGCYIHFFREPTDLKQFKQDAKYSHGIDVTDLFAAQPGLTSAVIDALPRNMVITCQGSDDIRKLLESQGRKDIKLIDIALSKTDSRKYENAVWDQYKDLCHMHTGVVVEKKKRGGKEEITPHCALMDCIMFDAAVSGGLNTSVLRAVLPRDMVFRTTTPRVVL

SEQ ID NO: 7727 - protein, 569 aa, Artificial Sequence
  derived and/or modified protein sequence (wt) from LASV(G2318-SLE-2012;Clade IV)__AIT17271__NP
MSASKEIKSFLWTQSLRRELSGYCSNIKLQVVKDAQALLHGLDFSEVSNVQRLMRKERRDDNDLKRLRDLNQAVNNLVELKSTQQKSILRVGTLTSDDLLILAADLEKLKSKVTRTERPLSAGVYMGNLSSQQLDQRRALLNMIGMSGGNQGARAGRDGVVRVWDVKNAELLNNQFGTMPSLTLACLTKQGQVDLNDAVQALTDLGLIYTAKYPNTSDLDRLTQSHPILNMIDTKKSSLNISGYNFSLGAAVKAGACMLDGGNMLETIKVSPQTMDGILKTILKVKKALGMFISDTPGERNPYENILYKICLSGDGWPYIASRTSITGRAWENTVVDLESDGKPQKTGSNNSNKSLQSAGFAAGLTYSQLMTLKDAMLQLDPNAKTWMDIEGRPEDPVEIALYQPSSGCYIHFFREPTDLKQFKQDAKYSHGIDVTDLFAAQPGLTSAVIDALPRNMVITCQGSDDIRKLLESQGRKDIKLIDIALSKADSRKYENAVWDQYKDLCHMHTGVVVEKKKRGGKEEITPHCALMDCIMYDAAVSGGLSTSVLRAVLPRDMVFRTSTPRVVL

SEQ ID NO: 7728 - protein, 569 aa, Artificial Sequence
  derived and/or modified protein sequence (wt) from LASV(G2363-SLE-2012;Clade IV)__AIT17275__NP
MSASKEIKSFLWTQSLRRELSGYCSNIKLQVVKDAQALLHGLDFSEVSNVQRLMRKQRRDDGDLKRLRDLNQAVNNLVELKSTQQKSVLRVGTLTSDDLLTLAADLEKLKSKVTRTERPLSAGVYMGNLSSQQLDQRRALLNMIGMSGGNQGARTGKDGVVRIWDVKNADLLNNQFGTMPSLTLACLTKQGQVDLNDVVQALTDLGLIYTAKYPNISDLDRLAQSHPILKMIDTSKSSLNISGYNFSLGAAVKAGACMLDGGNMLETVKVSPQTMDGILKSILKVKKSLGMFISDTPGERNPYENILYKICLSGDGWPYIASRTSITGRAWENTVVDLESDGKPQKVGSNNSNKSLQSTGFTAGLTYSQLMTLKDAMLQLDPNAKTWMDIEGRPEDPVEIALYQPSSGCYIHFFREPTDLKQFKQDAKYSHGIDVTDLFAAQPGLTSAVIDTLPRNMVITCQGSDDIGKLLESQGRKDIKLIDIALSKTDSRKYENAVWDQYKDLCHMHTGVVVEKKKRGGKEEITPHCALMDCIMFDAAVSGGLNASVLRAVLPRDMVFRTSTPRVVL

SEQ ID NO: 7729 - protein, 569 aa, Artificial Sequence
  derived and/or modified protein sequence (wt) from LASV(G2384-SLE-2012;Clade IV)__AIT17277__NP
MSASKEIKSFLWTQSLRRELSSYCSNIKLQVVKDAQALLHGLDFSEVSNVQRLMRKERRDDNDLKRLRDLNQAVNNLVELKSTQQKSILRVGTLTSDDLLILAADLEKLKSKVTRTERPLSAGVYMGNLSSQQLDQRRALLSMIGMSGSNQGARAGRDGVVRVWDVKNAELLNNQFGTMPSLTLACLTKQGQVDLNDAVQALTDLGLIYTAKYPNTSDLDRLTQSHPILNMIDTKKSSLNISGYNFSLGAAVKAGACMLDGGNMLETIKVSPQTMDGILKSILKVKKALGMFISDTPGERNPYENILYKICLSGDGWPYIASRTSITGRAWENTVVDLESDGKPQKAGSNNSNKSLQSAGFTAGLTYSQLMTLKDAMLQLDPNAKTWMDIEGRPEDPVEVALYQPSSGCYIHFFREPTDLKQFKQDAKYSHGIDVTDLFAAQPGLTSAVIDALPRNMVITCQGSDDIRKLLESQGRKDIKLIDIALSKTDSRKYENAVWDQYKDLCHMHTGVVVEKKKRGGKEEITPHCALMDCIMFDAAVSGGLNTSVLRAVLPRDMVFRTSTPRVVL

SEQ ID NO: 7730 - protein, 569 aa, Artificial Sequence
  derived and/or modified protein sequence (wt) from LASV(G2392-SLE-2012;Clade IV)__AIT17281__NP
MSASKEIKSFLWTQSLRRELSGYCSNIKLQVVKDAQALLHGLDFSEVSNVQRLMRKERRDDSDLKRLRDLNQAVNNLVELKSTQQKSVLRVGTLTSDDLLVLAADLEKLKSKVTRTERPLSAGVYMGNLSSQQLDQRRALLSMIGMSGGNQGARAGRDGVVRIWDVKNAELLNNQFGTMPSLTLACLTKQGQVDLNDVVQALTDLGLIYTAKYPNTSDLDRLTQSHPILNMIDTKKSSLNISGYNFSLGAAVKAGACMLDGGNMLETIKVSPQTMDGILKSILKVKKALGMFISDTPGERNPYENILYKICLSGDGWPYIASRTSITGRAWENTIVDLESDGKPQKTSTTNSNKSLQSAGFAAGLTYSQLMTLKDAMLQLDPNAKTWMDIEGRPEDPVEIALYQPSSGCYIHFFREPTDLKQFKQDAKYSHGIDVTDLFAAQPGLTSAVIDTLPRNMVITCQGSEDIRRLLESQGRKDIKLIDIALSKTDSRKYENAVWDQYKDLCHMHTGVVVEKKKKGGKEEITPHCALMDCIMFDAAVSGGLNTSVLRAVLPRDMVFRTSTPRVVL

SEQ ID NO: 7731 - protein, 569 aa, Artificial Sequence
  derived and/or modified protein sequence (wt) from LASV(G2405-SLE-2012;Clade IV)__AIT17285__NP
MSASKEIKSFLWTQSLRRELSGYCSNIKLQVVKDAQALLHGLDFSEVSNVQRSMRKERRDDNDLKRLRDLNQAVNNLVELKSTQQKSILRVGTLTSDDLLILAADLEKLKSKVTRTERPLSAGVYMGNLSSQQLDQRRALLNMIGMSGSNQGARAGRDGVVRVWDVKNAELLNNQFGTMPSLTLACLTKQGQVDLNDVVQALTDLGLIYTAKYPNASDLDRLTQSHPILNMIDTKKSSLNISGYNFSLGAAVKAGACMLDGGNMLETIKVSPQTMDGILKSILKVKKALGMFISDTPGERNPYENILYKICLSGDGWPYIASRTSITGRAWENTIVDLESDGKPQKAGNNGSNKSLQSAGFTAGLTYSQLMTLKDAMLQLDPNAKTWMDIEGRPEDPVEIALYQPSSGCYIHFFREPTDLKQFKQDAKYSHGIDVTDLFAAQPGLTSAVIDALPRNLVITCQGSDDIRKLLESQGRKDIKLIDIALSKTDSRKYENAVWDQYKDLCHMHTGIVVEKKKRGGKEEITPHCALMDCIMFDAAVSGGLNTSVLRAVLPRDMVFRTSTPRVVL

SEQ ID NO: 7732 - protein, 569 aa, Artificial Sequence
  derived and/or modified protein sequence (wt) from LASV(G2427-SLE-2012;Clade IV)__AIT17289__NP
MSASKEIKSFLWTQSLRRELSGYCSNIKLQVVKDAQALLHGLDFSEVSNVQRLMRKERRDDSDLKRLRDLNQAVNNLVELKSTQQKSVLRVGTLTSDDLLVLAADLEKLKSKVTRTERPLSAGVYMGNLSSQQLDQRRALLSMIGMSGGNQGVRAGRDGVVRIWDVKNAELLNNQFGTMPSLTLACLTKQGQVDLNDVVQALTDLGLIYTAKYPNTSDLDRLTQSHPILNMIDTKKSSLNISGYNFSLGAAVKAGACMLDGGNMLETIKVSPQTMDGILKSILKVKKALGMFISDTPGERNPYENILYKICLSGDGWPYIASRTSITGRAWENTIVDLESDGKPQKTGSINSNKSLQSTGFAAGLTYSQLMTLKDAMLQLDPNAKTWMDIEGRPEDPVEIALYQPSSGCYIHFFREPTDLKQFKQDAKYSHGIDVTDLFAAQPGLTSAVIDALPRNMVITCQGSDDIRKLLESQGRKDIKLIDIALSKTDSRKYENAVWDQYKDLCHMHTGIVVEKKKRGGKEEITPHCALMDCIMFDAAVSGGLNTSVLRAVLPRDMVFRTSTPRVVL

SEQ ID NO: 7733 - protein, 569 aa, Artificial Sequence
  derived and/or modified protein sequence (wt) from LASV(G2431-SLE-2012;Clade IV)__AIT17293__NP
MSASKEIKSFLWTQSLRRELSGYCSNIKLQVVKDAQALLHGLDFSEVSNVQRLMRKQRRDDNDLKRLRDLNQAVNNLVELKSTQQKSVLRVGTLTSDDLLVLAADLEKLKSKVTRTERPLSAGVYMGNLSTQQLDQRRALLNMIGMSGGNQGARAGRDGVVRVWDVKNADLLNNQFGTMPSLTLACLTKQGQVDLNDVVQALTDLGLIYTAKYPNTSDLDRLTQSHPILNMIDTNKSSLNISGYNFSLGAAVKAGACMLDGGNMLETIKVSPQTMDGILKSILKVKKALGMFISDTPGERNPYENILYKICLSGDGWPYIASRTSITGRAWENTVVDLESDGKPQKAGGNNSNKSLQSAGFTAGLTYSQLMTLKDAMLQLDPNAKTWMDIEGRPEDPVEIALYQPSSGCYIHFFREPTDLKQFKQDAKYSHGIDVTDLFAAQPGLTSAVIDALPRNMVITCQGSDDIRKLLESQGRKDIKLIDIALSKTDSRKYENAVWDQYKDLCNMHTGIVVEKKKRGGKEEITPHCALMDCIMFDAAVSGGMNTSVLRAVLPRDMVFRTSTPRVVL

SEQ ID NO: 7734 - protein, 569 aa, Artificial Sequence
  derived and/or modified protein sequence (wt) from LASV(G2511-SLE-2012;Clade IV)__AIT17295__NP
MSASKEIKSFLWTQSLRRELSGYCSNIKLQVVKDAQALLHGLDFSEVSNVQRLMRKERRDDNDLKRLRDLNQAVNNLVELKSTQQKSVLRVGTLTSDDLLILAADLEKLKSKVIRTERPLSAGVYMGNLSSQQLDQRRALLNMIGMGGSNQGARAGRDGVVRVWDVKNAELLNNQFGTMPSLTLACLTKQGQVDLNDAVQALTDLGLIYTAKYPNTSDLDRLTQSHPILNMIDTKKSSLNISGYNFSLGAAVKAGACMLDGGNMLETIKVSPQTMDGILKSILKVKKALGMFISDTPGERNPYENILYKICLSGDGWPYIASRTSITGRAWENTIVDLESDGKPQKAGSNGSNKSLQSAGFTAGLTYSQLMTLKDAMLQLDPNAKTWMDIEGRPEDPVEIALYQPSSGCYIHFFREPTDLKQFKQDAKYSHGIDVTDLFAAQPGLTSAIIDALPRNMVITCQGSDDIRKLLESQGRKDIKLIDIALSKTDSRKYENAVWDQYKDLCHMHTGIVVEKKKRGGKEEITPHCALMDCIMFDAAVSGGLNTSVLRAVLPRDMVFRTSTPRVVL

SEQ ID NO: 7735 - protein, 569 aa, Artificial Sequence
  derived and/or modified protein sequence (wt) from LASV(G2554-SLE-2012;Clade IV)__AIT17299__NP
MSASKEIKSFLWTQSLRRELSGYCSNIKLQVVKDAQALLHGLDFSEVSNVQRLMRKERRDDNDLKRLRDLNQAVNNLVELKSTQQKSVLRVGTLTSDDLLVLAADLEKLKSKVTRTERPLSAGVYMGNLSSQQLDQRRALLSMIGMSGGNQGARTGRDGVVRVWDVKNAELLNNQFGTMPSLTLACLTKQGQVDLNDVVQALTDLGLIYTAKYPNTSDLDRLTQSHPILNMIDTKKSSLNISGYNFSLGAAVKAGACMLDGGNMLETIKVSPQTMDGILKSILKVKKALGMFISDTPGERNPYENILYKICLSGDGWPYIASRTSITGRAWENTVVDLESDGKPQKAGSNNSNKSLQSAGFTAGLTYSQLMTLKDAMLQLDPNAKTWMDIEGRPEDPVEIALYQPSSGCYIHFFREPSDLKQFKQDAKYSHGIDVTDLFAAQPGLTSAVIDALPRNMVITCQGSDDIRKLFESQGRKDIKLIDIALSKTDSRKYENAVWDQYKDLCHMHTGVVVEKKKRGGKEEITPHCALMDCIMFDAAVSGGLNSLVLRAVLPRDMVFRTSTPRVVL

SEQ ID NO: 7736 - protein, 569 aa, Artificial Sequence
  derived and/or modified protein sequence (wt) from LASV(G2557-SLE-2012;Clade IV)__AIT17303__NP
MSASKEIKSFLWTQSLRRELSGYCSNIKLQVVKDAQALLHGLDFSEVSNVQRLMRKQRRDDSDLKRLRDLNQAVNNLVELKSTQQKSVLRVGTLTSDDLLVLAADLEKLKSKVIRTERPLSSGVYMGNLSSQQLDQRRALLNMIGMSGGNQGAQVGRDGVVRVWDVKNADLLNNQFGTMPSLTLACLTKQGQVDLNDVVQALTDLGLIYTAKYPNTSDLDRLVQSHPILNMIDTKKSSLNISGYNFSLGAAVKAGACMLDGGNMLETIKVSPQTMDGILKSILKVKKALGMFISETPGERNPYENILYKICLSGDGWPYIASRTSITGRAWENTIVDLESDGKPQKAGSNNSNKSLQSAGFTAGLTYSQLMTLKDSMLQLDPNAKTWMDIEGRPEDPVEVALYQPSSGCYIHFFREPTDLKQFKQDAKYSHGIDVTDLFAAQPGLTSAVIEALPRNMVITCQGSDDIRKLLESQGRKDIKLIDIALNKTDSRKYENAVWDQYKDLCHMHTGVVVEKKKRGGKEEITPHCALMDCIMFDAAVSGGLKTLVLRAVLPRDMVFRTSTPKVVL

SEQ ID NO: 7737 - protein, 569 aa, Artificial Sequence
  derived and/or modified protein sequence (wt) from LASV(G2565-SLE-2012;Clade IV)__AIT17307__NP
MSASKEIKSFLWTQSLRRELSGYCSNIKLQVVKDAQALLHGLDFSEVSNVQRLMRKERRDDNDLKRLRDLNQAVNNLVELKSTQQKSVLRVGTLTSDDLLILAADLEKLKSKVTRTERPLSAGVYMGNLSSQQLDQRRALLSMIGMSGGNQGARTGRDGVVRVWDVKNAELLNNQFGTMPSLTLACLTKQGQVDLNDVVQALTDLGLIYTAKYPNTSDLDRLTQSHPILNMIDTKKSSLNISGYNFSLGAAVKAGACMLDGGNMLETIKVSPQTMDGILKSILKVKKALGMFISDTPGERNPYENILYKICLSGDGWPYIASRTSITGRAWENTVVDLESDGKLQKTGSNNSNKSLQSAGFTAGLTYSQLMTLKDAMLQLDPNAKIWMDIEGRPEDPVEIALYQPSSGCYIHFFREPTDLKQFKQDAKYSHGIDVTDLFAAQPGLTSAVIDALPRNMVITCQGSDDIRKLLESQGRKDIKLIDIALNKTDSRKYENAVWDQYKDLCHMHTGVVVEKKKKGGKEEITPHCALMDCIMFDAAVSGGLNTSVLRAVLPRDMVFRTSTPRVVL

SEQ ID NO: 7738 - protein, 569 aa, Artificial Sequence
  derived and/or modified protein sequence (wt) from LASV(G2587-SLE-2012;Clade IV)__AIT17311__NP
MSASKEIKSFLWTQSLRRELSGYCSNIKLQVVKDAQALLHGLDFSEVSNVQRLMRKERRDDNDLKRLRDLNQAVNNLVELKSTQQKSVLRVGTLTSDDLLILAADLEKLKSKVIRTERPLSAGVYMGNLSSQQLDQRRALLNMIGMGGSNQGARAGRDGVVRVWDVKNAELLNNQFGTMPSLTLACLTKQGQVDLNDAVQALTDLGLIYTAKYPNTSDLDRLTQSHPILNMIDTKKSSLNISGYNFSLGAAVKAGACMLDGGNMLETIKVSPQTMDGILKSILKVKKALGMFISDTPGERNPYENILYKICLSGDGWPYIASRTSITGRAWENTVVDLESDGKPQKAGSNGSNKSLQSAGFTAGLTYSQLMTLKDAMLQLDPNAKTWMDIEGRPEDPVEVALYQPSSGCYIHFFREPTDLKQFKQDAKYSHGIDVTDLFAAQPGLTSAVIDALPRNMVITCQGSDDIRKLLESQGRKDIKLIDIALSKTDSRKYENAVWDQYKDLCHMHTGIVVEKKKRGGKEEITPHCALMDCIMFDAAVSGGLNTSVLRAVLPRDMVFRTSTPRVVL

SEQ ID NO: 7739 - protein, 569 aa, Artificial Sequence
  derived and/or modified protein sequence (wt) from LASV(G2612-SLE-2012;Clade IV)__AIT17315__NP
MSASKEIKSFLWTQSLRRELSGYCSNIKLQVVKDAQALLHGLDFSEVSNVQRLMRKERRDDNDLKRLRDLNQAVNNLVELKSTQQKSVLRVGTLTSDDLLILAADLEKLKSKVTRTERPLSAGVYMGNLSSQQLDQRRALLNMIGMSGSNQGARAGRDGVVRVWDVKNVELLNNQFGTMPSLTLACLTKQGQVDLNDAVQALTDLGLIYTAKYPNTSDLDRLTQSHPILNMIDTKKSSLNISGYNFSLGAAVKAGACMLDGGNMLETIKVSPQTMDGILKSILKVKKALGMFISDTPGERNPYENILYKICLSGDGWPYIASRTSITGRAWENTVVDLESDGKPQKAGSNSSNKSLQSAGFTAGLTYSQLMTLKDAMLQLDPNAKTWMDIEGRPEDPVEIALYQPSSGCYIHFFREPTDLKQFKQDAKYSHGIDVTDLFAAQPGLTSAVIDALPRNMVITCQGSDDIRKLLESQGRKDIKLIDIALSKTDSRKYENAVWDQYKDLCHMHTGIVVEKKKKGSKEEITPHCALMDCIMFDAAVSGGLNASVLRAVLPRDMVFRTSTPRVVL

SEQ ID NO: 7740 - protein, 569 aa, Artificial Sequence
  derived and/or modified protein sequence (wt) from LASV(G2615-SLE-2012;Clade IV)__AIT17319__NP
MSASKEIKSFLWTQSLRRELSGYCSNIKLQVVKDAQALLHGLDFSEVSNVQRLMRKQRRDDSDLKRLRDLNQAVNNLVELKSTQQKSVLRVGTLTSDDLLVLAADLEKLKSKVIRTERPLSSGVYMGNLSSQQLDQRRALLNMIGMSGGNQGAQVGRDGVVRVWDVKNADMLNNQFGTMPSLTLACLTKQGQVDLNDVVQALTDLGLIYTAKYPNTSDLDRLAQSHPILNMIDTKKSSLNISGYNFSLGAAVKAGACMLDGGNMLETIKVSPQTMDGILKSILKVKKALGMFISETPGERNPYENILYKICLSGDGWPYIASRTSITGRAWENTIVDLESDGKPQKAGSNNSNKSLQSAGFTAGLTYSQLMTLKDSMLQLDPNAKTWMDIEGRPEDPVEVALYQPSSGCYIHFFREPTDLKQFKQDAKYSHGIDVTDLFAAQPGLTSAVIEALPRNMVITCQGSDDIRKLLESQGRKDIKLIDIVLNKTDSRKYENAVWDQYKDLCHMHTGVVVEKKKRGGKEEITPHCALMDCIMFDAAVSGGLKTMVLRAVLPRDMVFRTSTPKVVL

SEQ ID NO: 7741 - protein, 569 aa, Artificial Sequence
  derived and/or modified protein sequence (wt) from LASV(G2723-SLE-2012;Clade IV)__AIT17323__NP
MSASKEIKSFLWTQSLRRELSGYCSNIKLQVVKDAQALLHGLDFSEVSNVQRLMRKQRRDDSDLKRLRDLNQAVNNLVELKSTQQKSVLRVGTLTSDDLLVLAADLEKLKSKVIRTERPLSSGVYMGNLSSQQLDQRRALLNMIGMSGGNQGAQVGRDGVVRVWDVKNADLLNNQFGTMPSLTLACLTKQGQVDLNDVVQALTDLGLIYTAKYPNTSDLDRLAQSHPILNMIDTKKSSLNISGYNFSLGAAVKAGACMLDGGNMLETIKVSPQTMDGILKSILKVKKALGMFISETPGERNPYENILYKICLSGDGWPYIASRTSITGRAWENTIVDLESDGKPQKAGSNNSNKSLQSAGFTAGLTYSQLMTLKDSMLQLDPNAKTWMDIEGRPEDPVEVALYQPSSGCYIHFFREPTDLKQFKQDAKYSHGIDVTDLFAAQPGLTSAVIEALPRNMVITCQGSDDIRKLLESQGRKDIKLIDIALNKTDSRKYENAVWDQYKDLCHMHTGVVVEKKKRGGKEEITPHCALMDCIMFDAAVSGGLKTLVLRAVLPRDMVFRTSTPKVVL

SEQ ID NO: 7742 - protein, 569 aa, Artificial Sequence
  derived and/or modified protein sequence (wt) from LASV(G2789-SLE-2012;Clade IV)__AIT17325__NP
MSASKEIKSFLWTQSLRRELSGYCSNIKLQVVKDAQALLHGLDFSEVSNVQRLMRKQRRDDNDLKRLRDLNQAVNNLVELKSTQQKSVLRVGTLTSDDLLVLAADLEKLKSKVTRTERPLSAGVYMGNLSSQQLDQRRALLNMIGMTGGSRGAQAGGDGVVRVWDVKNADLLNNQFGTMPSLTLACLTKQGQVDLNDVVQALTDLGLIYTAKYPNTSDLDRLTQSHPILNMIDTKKSSLNISGYNFSLGAAVKAGACMLDGGNMLETIKVSPQTMDGILKSILKVKKSLGMFISDTPGERNPYENILYKICLSGDGWPYIASRTSITGRAWENTVVDLESDGKPQKAGGNNSNKSLQSAGFTAGLTYSQLMTLKDTMLQLDPNAKTWMDIEGRPEDPVEVALYQPSSGCYIHFFREPTDLKQFKQDAKYSHGIDVTDLFAAQPGLTSAVIEALPRNMVITCQGSDDIRKLLESQGRKDIKLIDIALSKVDSRKYENAVWDQYKDLCHMHTGVVVEKKKRGGKEEITPHCALMDCIMFDAAVSGGLNTLVLRAVLPRDMVFRTSTPKVVL

SEQ ID NO: 7743 - protein, 569 aa, Artificial Sequence
  derived and/or modified protein sequence (wt) from LASV(G2868-SLE-2012;Clade IV)__AIT17329__NP
MSASKEIKSFLWTQSLRRELSGYCSNIKLQVVKDAQALLHGLDFSEVSNVQRLMRKERRDDSDLKRLRDLNQTVNNLVELKSTQQKSILRVGTLTSDDLLILAADLEKLKSKVIRTERPLSAGVYMGNLSSQQLDQRRALLNMIGMSSGNQGAQAGRDGVVRVWDVKNAELLNNQFGTMPSLTLACLTKQGQVDLNDAVQALTDLGLIYTAKYPNTSDLDRLTQSHPILNMIDTKKSSLNISGYNFSLGAAVKAGACMLDGGNMLETIKVSPQTMDGILKSILKVKKALGMFISDTPGERNPYENILYKICLSGDGWPYIASRTSITGRAWENTVVDLESDGMPQKAGSSSSNKSLQSAGFVAGLTYSQLMTLKDAMLQLDPNAKTWMDIEGRPEDPVEIALYQPSSGCYIHFFREPTDLKQFKQDAKYSHGIDVTDLFAAQPGLTSAVIDALPRNMVITCQGSDDIRKLLESQGRKDIKLIDIALSKADSRKYENAVWDQYKDLCHMHTGVVVEKKKRGGKEEITPHCALMDCIMYDAAVSGGLNTSVLRAVLPRDMVFRTSTPRVVL

SEQ ID NO: 7744 - protein, 569 aa, Artificial Sequence
  derived and/or modified protein sequence (wt) from LASV(G2903-SLE-2012;Clade IV)__AIT17333__NP
MSASKEIKSFLWTQSLRRELSGYCSNIKLQVVKDAQALLHGLDFSEVSNVQRLMRKERRDDNDLKRLRDLNQAVNNLVELKSTQQKSVLRVGTLTSDDLLILAADLEKLKSKVTRTERPLSAGVYMGNLSSQQLDQRRALLNMIGMSGGNQGARAGRDGVVRVWDVKNAELLNNQFGTMPSLTLACLTKQGQVDLNDAVQALTDLGLIYTAKYPNTSDLDRLTQSHPILNMIDTKKSSLNISGYNFSLGAAVKAGACMLDGGNMLETIKVSPQTMDSILKSILKVKKALGMFISDTPGERNPYENILYKICLSGDGWPYIASRTSITGRAWENTVVDLESDGKPQKAGSNNSNKSLQSAGFAAGLTYSQLMTLKDAMLQLDPNAKTWMDIEGRPEDPVEIALYQPSSGCYIHFFREPTDLKQFKQDAKYSHGIDVTDLFAAQPGLTSAVIDALPRNMVITCQGSDDIRKLLESQGRKDIKLIDIALSKTDSRKYENAVWDQYKDLCHMHTGIVVEKKKRGGKEEITPHCALMDCIMFDAAVSGGLNTSVLRAVLPRDMVFRTSTPRVVL

SEQ ID NO: 7745 - protein, 569 aa, Artificial Sequence
  derived and/or modified protein sequence (wt) from LASV(G2906-SLE-2012;Clade IV)__AIT17335__NP
MSASKEIKSFLWTQSLRRELSGYCSNIKLQVVKDAQALLHGLDFSEVSNVQRLMRKERRDDSDLKRLRDLNQAVNNLVELKSTQQKSILRVGTLTSDDLLILAADLEKLKSKVTRTERPLSAGVYMGNLSSQQLDQRRALLSMIGMSSGVQGARAGRDGVVRVWDVKNAELLNNQFGTMPSLTLACLTKQGQVDLNDVVQALTDLGLIYTAKYPNTSDLDRLTQSHPILNMIDTKKSSLNISGYNFSLGAAVKAGACMLDGGNMLETIKVSPQTMDGILKSILKVKKALGMFISETPGERNPYENILYKICLSGDGWPYIASRTSITGRAWENTVVDLESDGKPQKAGSNNSNKSLQSTGFAAGLTYSQLMTLKDAMLQLDPNAKTWMDIEGRPEDPVEVALYQPSSGCYIHFFREPTDLKQFKQDAKYSHGIDVTDLFAAQPGLTSAVIDALPRNMVITCQGSDDIKKLLESQGRKDIKLIDIALSKTDSRKYENAVWDQYKDLCHMHTGVVVEKKKRGGKEEITPHCALMDCIMFDAAVSGGLNTSVLRAVLPRDMVFRTSTPRVVL

SEQ ID NO: 7746 - protein, 569 aa, Artificial Sequence
  derived and/or modified protein sequence (wt) from LASV(G2944-SLE-2012;Clade IV)__AIT17341__NP
MSASKEIKSFLWTQSLRRELSGYCSNIKLQVVKDAQALLHGLDFSEVSNVQRLMRKERRDDNDLKRLRDLNQAVNNLVELKSTQQKSILRVGTLTSDDLLILAADLEKLKSKVTRTERPLSAGVYMGNLSSQQLDQRRALLNMIGMSGGNQGARAGRDGVVRVWDVKNAELLNNQFGTMPSLTLACLTKQGQVDLNDAVQALTDLGLIYTAKYPNTSDLDRLTQSHPILNMIDTKKSSLNISGYNFSLGAAVKAGACMLDGGNMLETIKVSPQTMDGILKSILKVKKALGMFISDAPGERNPYENILYKICLSGDGWPYIASRTSITGRAWENTVVDLESDGKPQKAGSNGSNKSLQSAGFTAGLTYSQLMTLKDAMLQLDPNAKTWMDIEGRPEDPVEIALYQPSSGCYIHFFREPTDLKQFKQDAKYSHGIDVTDLFAAQPGLTSAVIDALPRNMVITCQGSDDIRKLFESQGRKDIKLIDIALSKADSRKYENAVWDQYKDLCHMHTGVVVEKKKRGGKEEITPHCALMDCIMFDAAVSGGLNTSVLRAVLPRDMVFRTSTPRVVL

SEQ ID NO: 7747 - protein, 569 aa, Artificial Sequence
  derived and/or modified protein sequence (wt) from LASV(G3010-SLE-2013;Clade IV)__AIT17345__NP
MSASKEIKSFLWTQSLRRELSGYCSNIKLQVVKDAQALLHGLDFSEVSNVQRLMRKERRDDNDLKRLRDLNQAVNNLVELKSTQQKSILRVGTLTSDDLLILAADLEKLKSKVTRTERPLSAGVYMGNLSSQQLDQRRALLSMIGMSSGVQGARAGRDGVVRVWDVKNAELLNNQFGTMPSLTLACLTKQGQVDLNDVVQALTDLGLIYTAKYPNTSDLDRLTQSHPILNMIDTKKSSLNISGYNFSLGAAVKAGACMLDGGNMLETIKVSPQTMDGILKSILKVKKALGMFISETPGERNPYENILYKICLSGDGWPYIASRTSITGRAWENTVVDLESDGKPQKAGSNNSNKSLQSAGFTAGLTYSQLMTLKDAMLQLDPNAKTWMDIEGRPEDPVEVALYQPSSGCYIHFFREPTDLKQFKQDAKYSHGIDVTDLFAAQPGLTSAVIDALPRNMVITCQGSDDIKKLLESQGRKDIKLIDIALSKTDSRKYENAVWDQYKDLCHMHTGVVVEKKKRGGKEEITPHCALMDCIMFDAAVSGGLNTSVLRAVLPRDMVFRTSTPRVVL

SEQ ID NO: 7748 - protein, 569 aa, Artificial Sequence
  derived and/or modified protein sequence (wt) from LASV(G3016-SLE-2013;Clade IV)__AIT17349__NP
MSASKEIKSFLWTQSLRRELSGYCSNIKLQVVKDAQALLHGLDFSEVSNVQRLMRKERRDDSDLKRLRDLNQAVNNLVELKSTQQKSILRVGTLTSDDLLILAADLEKLKSKVTRTERPLSAGVYMGNLSSQQLDQRRALLNMLGMSGSNQGARAGRDGVVRVWDVKNAELLNNQFGTMPSLTLACLTKQGQVDLNDAVQALTDLGLIYTAKYPNTSDLDRLTQSHPILNMIDTKKSSLNISGYNFSLGAAVKAGACMLDGGNMLETIKVSPQTMDGILKSILKVKKALGMFISDTPGERNPYENILYKICLSGDGWPYIASRTSITGRAWENTVVDLESDEKPQKAGSNSSNKSLQSAGFTAGLTYSQLMTLKDAMLQLDPNAKTWMDIEGRPEDPVEIALYQPSSGCYIHFFREPTDLKQFKQDAKYSHGIDVTDLFAAQPGLTSAVIDALPRNMVITCQGSDDIRKLLESQGRKDIKLIDIALSKTDSRKYENAVWDQYKDLCHMHTGIVVEKKKRGGKEEITPHCALMDCIMFDAAVSGGLNASVLRAVLPRDMVFRTSTPRVVL

SEQ ID NO: 7749 - protein, 569 aa, Artificial Sequence
  derived and/or modified protein sequence (wt) from LASV(G3034-SLE-2013;Clade IV)__AIT17351__NP
MSASKEIKSFLWTQSLRRELSGYCSNIKLQVVKDAQALLHGLDFSEVSNVQRLMRKQRRDDGDLKRLRDLNQAVNNLVELKSTQQKSVLRVGTLTSDDLLILAADLEKLKSKVIRTERPLSAGVYMGNLSSQQLEQRRALLNMIGMSSGNQGARTGKDGVVRIWDVKNADLLNNQFGTMPSLTLACLTKQGQVDLNDVVQALTDLGLIYTAKYPNTSDLDRLTQSHPILNMVDTSKSSLNISGYNFSLGAAVKAGACMLDGGNMLETIKVSPQTMDGILKSILKVKKSLGMFVSDTPGERNPYENILYKICLSGDGWPYIASRTSITGRAWENTVVDLESNGKPQKAGSNNSNKSLQSTGFTAGLTYSQLMTLKDAMLQLDPNAKTWMDIEGRPEDPVEIALYQPSSGCYIHFFREPTDLKQFKQDAKYSHGIDVTDLFAAQPGLTSAVIDTLPRNMVITCQGSDDIRKLLESQGRKDIKLIDIALSKIDSRKYENAVWDQYKDLCHMHTGVVVEKKKRGGKEEITPHCALMDCIMFDAAVSGGLNASVLRAVLPRDMVFRTSTPRVVL

SEQ ID NO: 7750 - protein, 569 aa, Artificial Sequence
  derived and/or modified protein sequence (wt) from LASV(G3110-SLE-2013;Clade IV)__AIT17361__NP
MSASKEIKSFLWTQSLRRELSGYCSNIKLQVVKDAQALLHGLDFSEVSNVQRLMRKERRDDSDLKRLRDLNQAVNNLVELKSTQQKSVLRVGTLTSDDLLVLAADLEKLKSKVTRTERPLSAGVYMGNLSSQQLDQRRALLNMIGMSGGNQGARAGRDGVVRIWDVKNAELLNNQFGTMPSLTLACLTKQGQVDLNDVVQALTDLGLIYTAKYPNTSDLDRLTQSHPILNMIDTKKSSLNISGYNFSLGAAVKAGACMLDGGNMLETIKVSPQTMDGILKSILKVKKALGMFISDTPGERNPYENILYKICLSGDGWPYIASRTSITGRAWENTIVDLESDGKPQKTNNTNSNKSLQSAGFAAGLTYSQLMTLKDAMLQLDPNAKTWMDIEGRPEDPVEIALYQPSSGCYIHFFREPTDLKQFKQDAKYSHGIDVTDLFAAQPGLTSAVIDTLPRNMVITCQGSEDIRRLLESQGRKDIKLIDIALSKTDSRKYENAVWDQYKDLCHMHTGVVVEKKKKGGKEEITPHCALMDCIMFDAAVSGGLNTSVLRAVLPRDMVFRTSTPRVVL

SEQ ID NO: 7751 - protein, 569 aa, Artificial Sequence
  derived and/or modified protein sequence (wt) from LASV(G3148-SLE-2013;Clade IV)__AIT17365__NP
MSASKEIKSFLWTQSLRRELSGYCSNIKLQVVKDAQALLHGLDFSEVSNVQRLMRKERRDDNDLKRLRDLNQAVNNLVELKSTQQKSILRVGTLTSDDLLILAADLEKLKSKVTRTERPLSAGVYMGNLSSQQLDQRRALLNMIGMSGSNQGAQAGRDGVVRVWDVKNAELLNNQFGTMPSLTLACLTKQGQVDLNDAVQALTDLGLIYTAKYPNTSDLDRLTQSHPILNMIDTKKSSLNISGYNFSLGAAVKAGACMLDGGNMLETIKVSPQTMDGILKSILKVKKALGMFISDAPGERNPYENILYKICLSGDGWPYIASRTSITGRAWENTVVDLESDGKPQKAGSNGSNKSLQSAGFTAGLTYSQLMTLKDAMLQLDPNAKTWMDIEGRPEDPVEIALYQPSSGCYIHFFREPTDLKQFKQDAKYSHGIDVTDLFAAQPGLTSAVIDALPRNMVITCQGSDDIRKLFESQGRKDIKLIDIALSKTDSRKYENAVWDQYKDLCHMHTGIVVEKKKRGGKEEITPHCALMDCIMFDAAVSGGLNTSVLRAVLPRDMVFRTSTPRVVL

SEQ ID NO: 7752 - protein, 569 aa, Artificial Sequence
  derived and/or modified protein sequence (wt) from LASV(G3151-SLE-2013;Clade IV)__AIT17369__NP
MSASKEIKSFLWTQSLRRELSGYCSNIKLQVVKDAQALLHGLDFSEVSNVQRLMRKERRDDSDLKRLRDLNQAVNNLVELKSTQQKSVLRVGTLTSDDLLVLAADLEKLKSKVTRTERPLSAGVYMGNLSSQQLDQRRALLSMIGMSGGNQGARAGRDGVVRIWDVKNAELLNNQFGTMPSLTLACLTKQGQVDLNDVVQALTDLGLIYTAKYPNTSDLDRLTQSHPILNMIDTKKSSLNISGYNFSLGAAVKAGACMLDGGNMLETIKVSPQTMDGILKSILKVKKALGMFISDTPGERNPYENILYKICLSGDGWPYIASRTSITGRAWENTIVDLESDGKPQKTSNTNSNKSLQSAGFAAGLTYSQLMTLKDAMLQLDPNAKTWMDIEGRPEDPVEIALYQPSSGCYIHFFREPTDLKQFKQDAKYSHGIDVTDLFAAQPGLTSAVIDALPRNMVITCQGSEDIRKLLESQGRKDIKLIDIALSKTDSRKYENAVWDQYKDLCHMHTGVVVEKKKKGGKEEITPHCALMDCIMFDAAVSGGLNTSVLRAVLPRDMVFRTSTPRVVL

SEQ ID NO: 7753 - protein, 569 aa, Artificial Sequence
  derived and/or modified protein sequence (wt) from LASV(G3157-SLE-2013;Clade IV)__AIT17371__NP
MSASKEIKSFLWTQSLRRELSGYCSNIKLQVVKDAQALLHGLDFSEVSNVQRLMRKERRDDNDLKRLRDLNQAVNNLVELKSTQQKSILRVGTLTSDDLLILAADLEKLKSKVTRTERPLSAGVYMGNLSSQQLDQRRALLNMIGMSGSNQGAQAGRDGVVRVWDVKNAELLNNQFGTMPSLTLACLTKQGQVDLNDAVQALTDLGLIYTAKYPNTSDLDRLTQSHPILNMIDTKKSSLNISGYNFSLGAAVKAGACMLDGGNMLETIKVSPQTMDGILKSILKVKKALGMFISDAPGERNPYENILYKICLSGDGWPYIASRTSITGRAWENTVVDLESDGKPQKAGSNSSNKSLQSAGFTAGLTYSQLMTLKDAMLQLDPNAKTWMDIEGRPEDPVEIALYQPSSGCYIHFFREPTDLKQFKQDAKYSHGIDVTDLFAAQPGLTSAVIDALPRNMVITCQGSDDIRKLFESQGRKDIKLIDIALSKTDSRKYENAVWDQYKDLCHMHTGIVVEKKKRGGKEEITPHCALMDCIMFDAAVSGGLNTSVLRAVLPRDMVFRTSTPRVVL

SEQ ID NO: 7754 - protein, 569 aa, Artificial Sequence
  derived and/or modified protein sequence (wt) from LASV(G3206-SLE-2013;Clade IV)__AIT17379__NP
MSASKEIKSFLWTQSLRRELSGYCSNIKLQVVKDAQALLHGLDFSEVSNVQRLMRKERRDDSDLKRLRDLNQAVNNLVELKSTQQKSVLRVGTLTSDDLLILAADLEKLKSKVTRTERPLSAGVYMGNLSSQQLDQRRALLNMIGMSSGNRGAQAGRDGVVRVWDVKNAELLNNQFGTMPSLTLACLTKQGQVDLNDAVQALTDLGLIYTAKYPNTSDLDRLTQSHPILNMVDTKKSSLNISGYNFSLGAAVKAGACMLDGGNMLETIKVSPQTMDGILKSILKVKKALGMFISDTPGERNPYENILYKICLSGDGWPYIASRTSITGRAWENTVVDLESDGKPQKAGSNNSNKSLQSAGFAAGLTYSQLMTLKDAMLQLDPNAKTWMDIEGRPEDPVEIALYQPSSGCYIHFFREPTDLKQFKQDAKYSHGIDVTDLFAAQPGLTSAVIDALPRNMVITCQGSDDIRKLLESQGRKDIKLIDIALSKTDSRKYENAVWDQYKDLCHMHTGIVVEKKKRGGKEEITPHCALMDCIMFDAAVSGGLNTSVLRAVLPRDMVFRTSTPRVVL

SEQ ID NO: 7755 - protein, 569 aa, Artificial Sequence
  derived and/or modified protein sequence (wt) from LASV(G3234-SLE-2013;Clade IV)__AIT17389__NP
MSASKEIKSFLWTQSLRRELSGYCSNIKLQVVKDAQALLHGLDFSEVSNVQRLMRKQRRDDGDLKRLRDLNQAVNNLVELKSTQQKSVLRVGTLTSDDLLILAADLEKLKSKVTRTERPLSAGVYMGNLSSQQLDQRRALLNMIGMSGGNQGARTGKDGVVRIWDVKNADLLNNQFGTMPSLTLACLTKQGQVDLNDVVQALTDLGLIYTAKYPNTSDLDRLTQSHPILNMIDTSKSSLNISGYNFSLGAAVKAGACMLDGGNMLETIKVSPQTMDGILKSILKVKKSLGMFISDTPGERNPYENILYKICLSGDGWPYIASRTSITGRAWENTVVDLESDGKPQKAGSNNSNKSLQSTGFTAGLTYSQLMTLKDAMLQLDPNAKTWMDIEGRPEDPVEIALYQPSSGCYIHFFREPTDLKQFKQDAKYSHGIDVTDLFAAQPGLTSAVIDTLPRNMVITCQGSDDIRKLLESQGRKDIKLIDIALSKTDSRKYENAVWDQYKDLCHMHTGVVVEKKKRGGKEEITPHCALMDCIMFDAAVSGGLNVSVLRAVLPRDMVFRTSTPRVVL

SEQ ID NO: 7756 - protein, 569 aa, Artificial Sequence
  derived and/or modified protein sequence (wt) from LASV(G3278-SLE-2013;Clade IV)__AIT17399__NP
MSASKEIKSFLWTQSLRRELSGYCSNIKLQVVKDAQALLHGLDFSEVSNVQRLMRKQRRDDSDLKRLRDLNQAVNNLVELKSTQQKSVLRVGTLTSDDLLVLAADLEKLKSKVIRTERPLSSGVYMGNLSSQQLDQRRALLNMIGMSGGNQGAQVGRDGVVRVWDVKNADLLNNQFGTMPSLTLACLTKQGQVDLNDVVQALTDLGLIYTAKYPNTSDLDRLAQSHPILNMIDTKKSSLNISGYNFSLGAAVKAGACMLDGGNMLETIKVTPQTMDGILKSILKVKKALGMFISETPGERNPYENILYKICLSGDGWPYIASRTSITGRAWENTVVDLESDGKPQKAGNNNSNKSLQSAGFTAGLTYSQLMTLKDSMLQLDPNAKTWMDIEGRPEDPVEVALYQPSSGCYIHFFREPTDLKQFKQDAKYSHGIDVTDLFATQPGLTSAVIEALPRNMVITCQGSDDIRKLLESQGRKDIKLIDIALNKTDSRKYENAVWDQYKDLCHMHTGVVVEKKKRGGKEEITPHCALMDCIMFDAAVSGGLKTLALRAVLPRDMVFRTSTPKVVL

SEQ ID NO: 7757 - protein, 569 aa, Artificial Sequence
  derived and/or modified protein sequence (wt) from LASV(G502-SLE-2009;Clade IV)__AIT17127__NP
MSASKEIKSFLWTQSLRRELSGYCSNIKLQVVKDAQALLHGLDFSEVSNVQRLMRKERRDDNDLKRLRDLNQAVNNLVELKSTQQKSILRVGTLTSDDLLILAADLEKLKSKVIRTERPLSAGVYMGNLSSQQLDQRRALLSMIGMSGGNQGVRAGKDGVVRVWDVKNAELLNNQFGTMPSLTLACLTKQGQVDLNDAVQALTDLGLIYTAKYPNTSDLDRLTQSHPILNMIDTKKSSLNISGYNFSLGAAVKAGACMLDGGNMLETIKVSPQTMDGILKSILKVKKALGMFISDTPGERNPYENILYKICLSGDGWPYIASRTSITGRAWENTVVDLESDGKPQKAGSNNSNKSLQSAGFTAGLTYSQLMTLKDAMLQLDPNTKTWMDIEGRPEDPVEIALYQPSSGCYIHFFREPTDLKQFKQDAKYSHGIDVTDLFAAQPGLTSAVIDALPRNMVITCQGSDDIRKLLESQGRKDIKLIDIALNKTDSRKYENAVWDQYKDLCHMHTGVVVEKKKRGGKEEITPHCALMDCIMFDAAVSGGLNTSVLRAVLPRDMVFRTSTPRVVL

SEQ ID NO: 7758 - protein, 569 aa, Artificial Sequence
  derived and/or modified protein sequence (wt) from LASV(G503-SLE-2009;Clade IV)__AIT17131__NP
MSASKEIKSFLWTQSLRRELSGYCSNIKLQVVKDAQALLHGLDFSEVSNVQRLMRKERRDDNDLKRLRDLNQAVNNLVELKSTQQKSILRVGTLSSDDLLVLAADLEKLKSKVTRTERPLSAGVYMGNLSSQQLDQRRALLNMIGMSGGNQGARAGRDGVVRVWDVKNAELLNNQFGTMPSLTLACLTKQGQVDLNDVVQALTDLGLIYTAKYPNTSDLDRLTQSHPILNMVDTKKSSLNISGYNFSLGAAVKAGACMLDGGNMLETIKVSPQTIDGILKSILKVKKALGMFISDTPGERNPYENILYKICLSGDGWPYIASRTSITGRAWENTVVDLESDGKPQKAGSNNSNKSLQSAGFTAGLTYSQLMTLKDAMLQLDPNAKIWMDIEGRPEDPVEIALYQPSSGCYIHFFREPTDLKQFKQDAKYSHGIDVTDLFAAQPGLTSAVIDALPRNMVITCQGADDIRKLLESQGRKDIKLIDIALNKADSRKYENAVWDQYKDLCHMHTGVVVEKKKRGGKEEITPHCALMDCIMFDAAVSGGLNTSVLRAVLPRDMVFRTSTPRVVL

SEQ ID NO: 7759 - protein, 569 aa, Artificial Sequence
  derived and/or modified protein sequence (wt) from LASV(G610-SLE-2009;Clade IV)__AIT17135__NP
MSASKEIKSFLWTQSLRRELSGYCSNIKLQVVKDAQALLHGLDFSEVSNVQRLMRKERRDDNDLKRLRDLNQAVNNLVELKSTQQKSILRVGTLTSDDLLILAADLEKLKSKVTRTERPLSAGVYMGNLSSQQLDQRRALLSMIGMSGGNQGARAGRDGVVRVWDVKNAELLNNQFGTMPSLTLACLTKQGQVDLNDVVQALTDLGLIYTAKYPNTSDLDRLTQSHPILNMIDTKKSSLNISGYNFSLGAAVKAGACMLDGGNMLETIKVSPQTMDGILKSILKVKKALGMFISDTPGERNPYENILYKICLSGDGWPYIASRTSITGRAWENTVVDLESDGKLQKAGSNNSNKSLQSAGFTAGLTYSQLMTLKDAMLQLDPNAKTWMDIEGRPEDPVEIALYQPSSGCYIHFFREPTDLKQFKQDAKYSHGIDVTDLFAAQPGLTSAVIDALPRNMVITCQGSDDIRKLLESQGRKDIKLIDIALNKTDSRKYENAVWDQYKDLCHMHTGVVVEKKKKGGKEEITPHCALMDCIMFDAAVSGGLNTSVLRAVLPRDMVFRTSTPRVVL

SEQ ID NO: 7760 - protein, 569 aa, Artificial Sequence
  derived and/or modified protein sequence (wt) from LASV(G636-SLE-2009;Clade IV)__AIT17139__NP
MSASKEIKSFLWTQSLRRELSGYCSNIKLQVVKDAQALLHGLDFSEVSNVQRLMRKERRDDNDLKRLRDLNQAVNNLVELKSTQQKSVLRVGTLTSDDLLILAADLEKLKSKVTRTERPLSAGVYMGNLSSQQLDQRRALLNMIGMSGGNQGARAGRDGVVRVWDVKNAELLNNQFGTMPSLTLACLTKQGQVDLNDAVQALTDLGLIYTAKYPNTSDLDRLTQSHPILNMIDTKKSSLNISGYNFSLGAAVKAGACMLDGGNMLETIKVSPQTMDSILKSILKVKKALGMFISDTPGERNPYENILYKICLSGDGWPYIASRTSITGRAWENTVVDLESDGKPQKAGSNNSNKSLQSAGFAAGLTYSQLMTLKDAMLQLDPNAKTWMDIEGRPEDPVEIALYQPSSGCYIHFFREPTDLKQFKQDAKYSHGIDVTDLFAAQPGLTSAVIDALPRNMVITCQGSDDIRKLLESQGRKDIKLIDIALSKTDSRKYENAVWDQYKDLCHMHTGIVVEKKKRGGKEEITPHCALMDCIMFDAAVSGGLNTSVLRAVLPRDMVFRTTTPRVVL

SEQ ID NO: 7761 - protein, 569 aa, Artificial Sequence
  derived and/or modified protein sequence (wt) from LASV(G676-SLE-2009;Clade IV)__AIT17143__NP
MSASKEIKSFLWTQSLRRELSGYCSNIKLQVVKDAQALLHGLDFSEVSNVQRLMRKERRDDNDLKRLRDLNQAVNNLVELKSTQQKSILRVGTLTSDDLLILAADLEKLKSKVTRTERPLSAGVYMGNLSSQQLDQRRALLNMIGMSGSNQGARAGRDGVVRVWDVKNAELLNNQFGTMPSLTLACLTKQGQVDLNDAVQALTDLGLIYTAKYPNTSDLDRLTQSHPILNMIDTKKSSLNISGYNFSLGAAVKAGACMLDGGNMLETIKVSPQTMDGILKSILKVKKALGMFISDTPGERNPYENILYKICLSGDGWPYIASRTSITGRAWENTVVDLESDGKPQKAGNNGSNKSLQSAGFTAGLTYSQLMTLKDAMLQLDPNAKTWMDIEGRPEDPVEIALYQPSSGCYIHFFREPTDLKQFKQDAKYSHGIDVTDLFAAQPGLTSAVIDALPRNLVITCQGSDDIRKLLESQGRKDIKLIDIALSKTDSRKYENAVWDQYKDLCHMHTGIVVEKKKRGGKEEITPHCALMDCIMFDAAVSGGLNTSVLRAVLPRDMVFRTSTPRVVL

SEQ ID NO: 7762 - protein, 569 aa, Artificial Sequence
  derived and/or modified protein sequence (wt) from LASV(G692-SLE-2009;Clade IV)__AIT17147__NP
MSASKEIKSFLWTQSLRRELSGYCSNIKLQVVKDAQALLHGLDFSEVSNVQRLMRKERRDDNDLKRLRDLNQAVNNLVELKSTQQKSVLRVGTLTSDDLLILAADLEKLKSKVTRTERPLSAGVYMGNLSSQQLEQRRALLNMIGMSGSNQGAQAGRDGVVRVWDVKNAELLNNQFGTMPSLTLACLTKQGQVDLNDAVQALTDLGLIYTVKYPNTSDLDRLTQSHPILNMIDTKKSSLNISGYNFSLGAAVKAGACMLDGGNMLETIKVSPQTMDGILKSILKVKKALGMFISDTPGERNPYENILYKICLSGDGWPYIASRTSITGRAWENTVVDLESDGKPQKADSNSSNKSLQSAGFTAGLTYSQLMTLKDAMLQLDPNAKTWMDIEGRPEDPVEVALYQPSSGCYIHFFREPTDLKQFKQDAKYSHGIDVTDLFAAQPGLTSAVIDALPRNMVITCQGSDDIRKLLESQGRKDIKLIDIALSKTDSRKYENAVWDQYKDLCHMHTGVVVEKKKRGGKEEITPHCALMDCIMFDAAVSGGLNTSVLRAVLPRDMVFRTSTPRVVL

SEQ ID NO: 7763 - protein, 569 aa, Artificial Sequence
  derived and/or modified protein sequence (wt) from LASV(G733-SLE-2010;Clade IV)__AIT17155__NP
MSASKEIKSFLWTQSLRRELSGYCSNIKLQVVKDAQALLHGLDFSEVSNVQRLMRKERRDDNDLKRLRDLNQAVNNLVELKSTQQKSVLRVGTLTSDELLVLAADLEKLKSKVIRTERPLSAGVYMGNLSSQQLDQRRALLSMIGMSGGNQGARTGRDGVVRVWDVKNAELLNNQFGTMPSLTLACLTKQGQVDLNDAVQALTDLGLIYTAKYPNTSDLDRLTQSHPILNMIDTKKSSLNISGYNFSLGAAVKAGACMLDGGNMLETIKVSPQTMDGILKSILKVKKALGMFISDTPGERNPYENILYKICLSGDGWPYIASRTSITGRAWENTVVDLESDGKPQKAGSNNSNKSLQSAGFTAGLTYSQLMTLKDAMLQLDPNAKTWMDIEGRPEDPVEIALYQPSSGCYIHFFREPTDLKQFKQDAKYSHGIDVTDLFAAQPGLTSAVIDALPRNMVITCQGSDDIRKLLESQGRKDIKLIDIALSKIDSRKYENAVWDQYKDLCHMHTGVVVEKKKRGGKEEITPHCALMDCIMFDAAVSGGLNSLVLRAVLPRDMVFRTSTPRVVL

SEQ ID NO: 7764 - protein, 569 aa, Artificial Sequence
  derived and/or modified protein sequence (wt) from LASV(G806-SLE-2010;Clade IV)__AIT17161__NP
MSASKEIKSFLWTQSLRRELSGYCSNIKLQVVKDAQALLHGLDFSEVSNVQRLMRKERRDDNDLKRLRDLNQAVNNLVELKSTQQKSILRVGTLTSDDLLILAADLEKLKSKVTRTERPLSAGVYMGNLSSQQLDQRRALLNMIGMSGSNQGARTGRDGVVRVWDVKNAELLNNQFGTMPSLTLACLTKQGQVDLNDAVQALTDLGLIYTAKYPNTSDLDRLTQSHPILNMIDTKKSSLNISGYNFSLGAAVKAGACMLDGGNMLETIKVSPQTMDGILKSILKVKKALGMFISDTPGERNPYENILYKICLSGDGWPYIASRTSITGRAWENTVVDLESDGKPQKAGSNSSNKSLQSAGLTAGLTYSQLMTLKDAMLQLDPNAKTWMDIEGRPEDPVEIALYQPSSGCYIHFFREPTDLKQFKQDAKYSHGIDVTDLFAAQPGLTSAVIDALPRNLVITCQGSDDIRKLLESQGRKDIKLIDIALSKTDSRKYENAVWDQYKDLCHMHTGIVVEKKKRGGKEEITPHCALMDCIMFDAAVSGGLNASVLRAVLPRDMVFRTSTPRVVL

SEQ ID NO: 7765 - protein, 569 aa, Artificial Sequence
  derived and/or modified protein sequence (wt) from LASV(G808-SLE-2010;Clade IV)__AIT17165__NP
MSASKEIKSFLWTQSLRRELSGYCSNIKLQVVKDAQALLHGLDFSEVNNVQRLMRKERRDDNDLKRLRDLNQAVNNLVELKSTQQKSILRVGTLTSDDLLILAADLEKLKSKVTRTERPLSAGVYMGNLSSQQLDQRRALLNMIGMSNGNQGTRAGRDGVVRVWDVKNAELLNNQFGTMPSLTLACLTKQGQVDLNDVVQALTDLGLIYTAKYPNTSDLDRLTQSHPILNMIDTKKSSLNISGYNFSLGAAVKAGACMLDGGNMLETIKVSPQTMDGILKSILKVKKALGMFISDTPGERNPYENILYKICLSGDGWPYIASRTSITGRAWENTVVDLESDGKPQKADSSNSNKSLQSAGFTAGLTYSQLMTLKDAMLQLDPNAKTWMDIEGRPEDPVEVALYQPSSGCYIHFFREPTDLKQFKQDAKYSHGIDVTDLFAAQPGLTSAVIDALPRNMVITCQGSDDIRKLLESQGRKDIKLIDIALSKADSRKYENAVWDQHKDLCHMHTGVVVEKKKRGGKEEITPHCALMDCIMYDAAVSGGLNTSVLRAVLPRDMVFRTSTPRVVL

SEQ ID NO: 7766 - protein, 569 aa, Artificial Sequence
  derived and/or modified protein sequence (wt) from LASV(Guinea Faranah;Clade IV)__AMZ00380__NP
MSVSKEVKSFLWTQSLRRELSGYCSNIKLQVVKDAQALLHGLDFSEVSNVQRLMRKQRRDDSDLKRLRDLNQAVNNLVELKSTQQKSVLRVGTLTSDDLLILAADLEKLKSKVTRTERPLSAGVYMGNLSSQQLDQRRALLNMIGMNGGNQGVQAGRDGVVRVWDVKNAELLNNQFGTMPSLTLACLTKQGQVDLNDAVQALTDLGLIYTAKYPNTSDLDRLAQSHPILNMIDTKKSSLNISGYNFSLGAAVKAGACMLDGGNMLETIKVSPQTMDGILKAILKVKRTLGMFVSDTPGERNPYENILYKICLSGDGWPYIASRTSITGRAWENTVVDLESDGKPQKVGNNGSNKSLQSAGFSAGLTYSQLMTLKDAMLQLDPNTKTWMDIEGRPEDPVEVALYQPSSGCYIHFFREPTDLKQFKQDAKYSHGIDVTDLFAAQPGLTSAVIEALPRNMVITCQGSEDIRKLLESQGRKDIKLIDIALSKADSRKYENAVWDQCKDLCHMHTGIVVEKKKRGGKEEITPHCALMDCIMFDAAVSGGLNTQVLRAVLPRDMVFRTSTPKVVL

SEQ ID NO: 7767 - protein, 569 aa, Artificial Sequence
  derived and/or modified protein sequence (wt) from LASV(GUINEA Z-185a;Clade IV)__AMZ00376__NP
MSVSKEIKSFLWTQSLRRELSGYCSNIKLQVVKDAQALLHGLDFSEVSNVQRLMRKQRRDDNDLKRLRDLNQAVNNLVELKSTQQKSVLRVGTLTSDDLLILAADLEKLKSKVTRTERPLSAGVYMGNLSSQQLDQRRALLNMIGMSGGNQGAQTGRDGVVRIWDVKNAELLNNQFGTMPSLTLACLTKQGQVDLNDVVQALTDLGLIYTAKYPNTSDLDRLTQSHPILNMIDTKKSSLNISGYNFSLGAAVKAGACMLDGGNMLETIKVSPQTMDGILKSILKVKKALGMFISDTPGERNPYENILYKICLSGDGWPYIASRTSITGRAWENTVVDLESGEKPQKIGSNNSNKCLQSAGFTAGLSYSQLMTLKDAMLQLDPNAKTWMDIEGRPEDPVEIALYQPSSGCYIHFFREPTDLKQFKQDAKYSHGIDVTDLFAAQPGLTSAVIEALPRNMVMTCQGSDDIRKLLESQGRKDIKLIDIALSKTDSRKYENAVWDQYKDLCHMHTGVVVEKKKKGGKEEITPHCALMDCIMFDAAVSGGLNTSVLRAVLPRDMVFRTSTPKVVL

SEQ ID NO: 7768 - protein, 569 aa, Artificial Sequence
  derived and/or modified protein sequence (wt) from MOPV/LASV reassortant(IGS-1;Clade IV)__AFY05578__NP
MSASKEIKSFLWTQSLRRELSGYCSNIKLQVVKDAQALLHGLDFSEVSNVQRLMRKERRDDNDLKRLRDLNQAVNNLVELKSTQQKSILRVGTLTSDDLLILAADLEKLRSKVIRTERPLSAGVYMGNLSSQQLDQRRALLNMIGMSGGNQGARAGRDGVVRVWDVKNAELLSNQFGTMPSLTLACLTKQGQVDLNDAVQALTDLGLIYTAKYPNTSDLDRLTQSHPILNMIDTKKSSLNISGYNFSLGAAVKAGACMLDGGNMLETIKVSPQTMDGILKSILKVKKALGMFISDTPGERNPYENILYKICLSGDGWPYIASRTSITGRAWENTVVDLESDGKPQKADSNNSSKSLQSAGFTAGLTYSQLMTLKDAMLQLDPNAKTWMDIEGRPEDPVEIALYQPSSGCYIHFFREPTDLKQFKQDAKYSHGIDVTDLFATQPGLTSAVIDALPRNMVITCQGSDDIRKLLESQGRKDIKLIDIDLSKTDSRKYENAVWDQYKDLCHMHTGVVVEKKKRGGKEEITPHCALMDCIMFDAAVSGGLNTSVLRAVLPRDMVFRTSTPRVVL

SEQ ID NO: 7769 - protein, 569 aa, Artificial Sequence
  derived and/or modified protein sequence (wt) from MOPV/LASV reassortant(IGS-11;Clade IV)__AFY05589__NP
MSASKEIKSFLWTQSLRRELSGYCSNIKLQVVKDAQALLHGLDFSEVSNVQRLMRKERRDDNDLKRLRDLNQAVNNLVELKSTQQKSILRVGTLTSDDLLILAADLEKLKSKVIRTERPLSAGVYMGNLSSQQLDQRRALLNMIGMSGGNQGARAGRDGVVRVWDVKNAELLSNQFGTMPSLTLACLTKQGQVDLNDAVQALTDLGLIYTAKYPNTSDLDRLTQSHPILNMIDTKKSSLNISGYNFSLGAAVKAGACMLDGGNMLETIKVSPQTMDGILKSILKVKKALGMFISDTPGERNPYENILYKICLSGDGWPYIASRTSITGRAWENTVVDLESDGKPQKADSNNSSKSLQSAGFTAGLTYSQLMTLKDAMLQLDPNAKTWMDIEGRPEDPVEIALYQPSSGCYIHFFREPTDLKQFKQDAKYSHGIDVTDLFATQPGLTSAVIDALPRNMVITCQGSDDIRKLLESQGRKDIKLIDIDLSKTDSRKYENAVWDQYKDLCHMHTGVVVEKKKRGGKEEITPHCALMDCIMFDAAVSGGLNTSVLRAVLPRDMVFRTSTPRVVL

SEQ ID NO: 7770 - protein, 569 aa, Artificial Sequence
  derived and/or modified protein sequence (wt) from MOPV/LASV reassortant(IGS-12;Clade IV)__AFY05591__NP
MSASKEIKSFLWTQSLRRELSGYCSNIKLQVVKDAQALLHGLDFSEVSNVQRLMRKERRDDNDLKRLRDLNQAVNNLVELKSTQQKSILRVGTLTSDDLLILAADLEKLKSKVIRTERPLSAGVYMGNLSSQQLDQRRALLNMIGMSGGNQGARAGRDGVVRVWDVKNVELLSNQFGTMPSLTLACLTKQGQVDLNDAVQALTDLGLIYTAKYPNTSDLDRLAQSHPILNMIDTKKSSLNISGYNFSLGAAVKAGACMLDGGNMLETIKVSPQTMDGILKSILKVKKALGMFISDTPGERNPYENILYKICLSGDGWPYIASRTSITGRAWENTVVDLESDGKPQKADSNNSSKSLQSAGFTAGLTYSQLMTLKDAMLQLDPNAKTWMDIEGRPEDPVEIALYQPSSGCYIHFFREPTDLKQFKQDAKYSHGIDVTDLFATQPGLTSAVIDALPRNMVITCQGSDDIRKLLESQGRKDIKLIDIDLSKTDSRKYENAVWDQYKDLCHMHTGVVVEKKKRGGKEEITPHCALMDCIMFDAAVSGGLNTSVLRAVLPRDMVFRTSTPRVVL

SEQ ID NO: 7771 - protein, 569 aa, Artificial Sequence
  derived and/or modified protein sequence (wt) from MOPV/LASV reassortant(IGS-14;Clade IV)__AFY05595__NP
MSASKEIKSFLWTQSLRRELSGYCSNIKLQVVKDAQALLHGLDFSEVSNVQRLMRKERRDDNDLKRLRDLNQAVNNLVELKSTQQKSILRVGTLTSDDLLILAADLEKLKSKVIRTERPLSAGVYMGNLSSQQLDQRRALLNMIGMSGGNQGARAGRDGVVRVWDVKNAELLSNQFGTMPSLTLACLTKQGQVDLNDAVQALTDLGLIYTAKYPNTSDLDRLAQSHPILNMIDTKKSSLNISGYNFSLGAAVKAGACMLDGGNMLETIKVSPQTMDGILKSILKVKKALGMFISDTPGERNPYENILYKICLSGDGWPYIASRTSITGRAWENTVVDLESDGKPQKADSNNSSKSLQSAGFTAGLTYSQLMTLKDAMLQLDPNAKTWMDIEGRPEDPVEIALYQPSSGCYIHFFREPTDLKQFKQDAKYSHGIDVTDLFATQPGLTSAVIDALPRNMVITCQGSDDIRKLLESQGRKDIKLIDIDLSKTDSRKYENAVWDQYKDLCHMHTGVVVEKKKRGGKEEITPHCALMDCIMFDAAVSGGLNTSVLRAVLPRDMVFRTSTPRVVL

SEQ ID NO: 7772 - protein, 569 aa, Artificial Sequence
  derived and/or modified protein sequence (wt) from MOPV/LASV reassortant(IGS-23;Clade IV)__AFY05610__NP
MSASKEIKSFLWTQSLRRELSGYCSNIKLQVVKDAQALLHGLDFSEVSNVQRLMRKERRDDNDLKRLRDLNQAVNNLVELKSTQQKSILRVGTLTSDDLLILAADLEKLKSKVIRTERPLSAGVYMGNLSSQQLDQRRALLNMIGMSGGNQGARAGRDGVVRVWDVKNAELLSNQFGTMPSLTLACLTKQGQVDLNDAVQALTDLGLIYTAKYPNTSDLDRLTQSHPILNMIDTKKSSLNISGYNFSLGAAVKAGACMLDGGNMLETIKVSPQTMDGILKSILKVKKALGMFISDTPGERNPYENILYKICLSGDGWPYIASRTSITGRAWENTVVDLESDGKPQKADSNNSSKSLQSAGFTAGLTYSQLMTLKDAMLQLDPNTKTWMDIEGRPEDPVEIALYQPSSGCYIHFFREPTDLKQFKQDAKYSHGIDVTDLFATQPGLTSAVIDALPRNMVITCQGSDDIRKLLESQGRKDIKLIDIDLSKTDSRKYENAVWDQYKDLCHMHTGVVVEKKKRGGKEEITPHCALMDCIMFDAAVSGGLNTSVLRAVLPRDMVFRTSTPRVVL

SEQ ID NO: 7773 - protein, 571 aa, Artificial Sequence
  derived and/or modified protein sequence (wt) from MOPV/LASV reassortant(IGS-27;Clade IV)__AFY05618__NP
MSASKEIKSFLWTQSLRRELSGYCSNIKLQVVKDAQALLHGLDFSEVSNVQRLMRKERRDDNDLKRLRDLNQAVNNLVELKSTQQKSILRVGTLTSDDLLILAADLEKLRSKVIRTERPLSAGVYMGNLSSQQLDQRRALLNMIGMSGGNQGARAGRDGVVRVWDVKNAELLSNQFGTMPSLTLACLTKQGQVDLNDAVQALTDLGLIYTAKYPNTSDLDRLTQSHPILNMIDTKKSSLNISGYNFSLGAAVKAGACMLDGGNMLETIKVSPQTMDGILKSILKVKKALGMFISDTPGERNPYENILYKICLSGDGWPYIASRTSITGRAWENTVVDLESDGKPQKADSNNSSKSLQSAGFTAGLTYSQLMTLKDAMLQLDPNAKTWMDIEGRPEDPVEIALYQPSSGCYIHFFREPTDLKQKQFKQDAKYSHGIDVTDLFATQPGLTSAVIDALPRNMVITCQGSDDIRKLLESQGRKDIKLIDIDLSKTDSRKYENAVWDQYKDLCHMHTGVVVEKKKRGGKEEITPHCALMDCIMFDAAVSGGLNTSVLRAVLPRDMVFRTSTPRVVL

SEQ ID NO: 7774 - protein, 569 aa, Artificial Sequence
  derived and/or modified protein sequence (wt) from MOPV/LASV reassortant(IGS-3;Clade IV)__AFY05580__NP
MSASKEIKSFLWTQSLRRELSGYCSNIKLQVVKDAQALLHGLDFSEVSNVQRLMRKERRDDNDLKRLRDLNQAVNNLVELKSTQQKSILRVGTLTSDDLLILAADLEKLRSKVIRTERPLSAGVYMGNLSSQQLDQRRALLNMIGMSGGNQGARAGRDGVVRVWDVKNAELLSNQFGTIPSLTLACLTKQGQVDLNDAVQALTDLGLIYTAKYPNTSDLDRLTQSHPILNMIDTKKSSLNISGYNFSLGAAVKAGACMLDGGNMLETIKVSPQTMDGILKSILKVKKALGMFISDTPGERNPYENILYKICLSGDGWPYIASRTSITGRAWENTVVDLESGGKPQKADSNNSSKSLQSAGFTAGLTYSQLMTLKDAMLQLDPNAKTWMDIEGRPEDPVEIALYQPSSGCYIHFFREPTDLKQFKQDAKYSHGIDVTDLFATQPGLTSAVIDALPRNMVITCQGSDDIRKLLESQGRKDIKLIDIDLSKTDSRKYENAVWDQYKDLCHMHTGVVVEKKKRGGKEEITPHCALMDCIMFDAAVSGGLNTSVLRAVLPRDMVFRTSTPRVVL

SEQ ID NO: 7775 - protein, 569 aa, Artificial Sequence
  derived and/or modified protein sequence (wt) from MOPV/LASV reassortant(IGS-4;Clade IV)__AFY05581__NP
MSASKEIKSFLWTQSLRRELSGYCSNIKLQVVKDAQALLHGLDFSEVSNVQRLMRKERRDDNDLKRLRDLNQAVNNLVELKSTQQKSILRVGTLTSDDLLILAADLEKLKSKVIRTERPLSAGVYMGNLSSQQLDQRRALLNMIGMSGGNQGARAGRDGVVRVWDVKNAELLSNQFGTIPSLTLACLTKQGQVDLNDAVQALTDLGLIYTAKYPNTSDLDRLTQSHPILNMIDTKKSSLNISGYNFSLGAAVKAGACMLDGGNMLETIKVSPQTMDGILKSILKVKKALGMFISDTPGERNPYENILYKICLSGDGWPYIASRTSITGRAWENTVVDLESGGKPQKADSNNSSKSLQSAGFTAGLTYSQLMTLKDAMLQLDPNAKTWMDIEGRPEDPVEIALYQPSSGCYIHFFREPTDLKQFKQDAKYSHGIDVTDLFATQPGLTSAVIDALPRNMVITCQGSDDIRKLLESQGRKDIKLIDIDLSKTDSRKYENAVWDQYKDLCHMHTGVVVEKKKRGGKEEITPHCALMDCIMFDAAVSGGLNTSVLKAVLPRDMVFRTSTPRVVL

SEQ ID NO: 7776 - protein, 569 aa, Artificial Sequence
  derived and/or modified protein sequence (wt) from MOPV/LASV reassortant(IGS-9;Clade IV)__AFY05585__NP
MSASKEIKSFLWTQSLRRELSGYCSNIKLQVVKDAQALLHGLDFSEVSNVQRLMRKERRDDNDLKRLRDLNQAVNNLVELKSTQQKSILRVGTLTSDDLLILAADLEKLRSKVIRTERPLSAGVYMGNLSSQQLDQRRALLNMIGMSGGNQGARAGRDGVVRVWDVKNAELLSNQFGTIPSLTLACLTKQGQVDLNDAVQALTDLGLIYTAKYPNTSDLDRLTQSHPILNMIDTKKSSLNISGYNFSLGAAVKAGACMLDGGNMLETIKVSPQTMDGILKSILKVKKALGMFISDTPGERNPYENILYKICLSGDGWPYIASRTSITGRAWENTVVDLESDGKPQKADSNNSSKSLQSAGFTAGLTYSQLMTLKDAMLQLDPNAKTWMDIEGRPEDPVEIALYQPSSGCYIHFFREPTDLKQFKQDAKYSHGIDVTDLFATQPGLTSAVIDALPRNMVITCQGSDDIRKLLESQGRKDIKLIDIDLSKTDSRKYENAVWDQYKDLCHMHTGVVVEKKKRGGKEEITPHCALMDCIMFDAAVSGGLNTSVLRAVLPRDMVFRTSTPRVVL

SEQ ID NO: 7777 - protein, 569 aa, Artificial Sequence
  derived and/or modified protein sequence (wt) from LASV(LM032-SLE-2010;Clade IV)__AIT17803__NP
MSASKEIKSFLWTQSLRRELSGYCSNIKLQVVKDAQALLHGLDFSEVSNVQRLMRKERRDDNDLKRLRDLNQAVNNLVELKSTQQKSILRVGTLTSDDLLILAADLEKLKSKVIRTERPLSAGVYMGNLSSQQLDQRRALLSMIGMSGGSQEARAGRDGVVRVWDVKNAELLNNQFGTMPSLTLACLTKQGQVDLNDAVQALTDLGLIYTAKYPNTSDLDRLTQSHPILNMIDTKKSSLNISGYNFSLGAAVKAGACMLDGGNMLETIKVSPQTVDGILKSILKVKKALGMFISDTPGERNPYENILYKICLSGDGWPYIASRTSITGRAWENTVVDLESDGKPQKAGSNNSNKSLQSAGFTAGLTYSQLMTLKDAMLQLDPNAKTWMDIEGRPEDPVEIALYQPSSGCYIHFFREPTDLKQFKQDAKYSHGIDVTDLFAAQPGLTSAVIDALPRNMVITCQGSDDIRKLLESQGRKDIKLIDIALSKTDSRKYENAVWDQYKDLCHMHTGVVVEKKKKGGKEEITPHCALMDCIMFDAAVSGGLNTSVLRAVLPRDMVFRTSTPRVVL

SEQ ID NO: 7778 - protein, 569 aa, Artificial Sequence
  derived and/or modified protein sequence (wt) from LASV(LM395-SLE-2009;Clade IV)__AIT17811__NP
MSASKEIKSFLWTQSLRRELSGYCSNIKLQVVKDAQALLHGLDFSEVSNVQRLMRKERRDDNDLKRLRDLNQAVNNLVELKSTQQKSILRVGTLTSDDLLILAADLEKLKSKVTRTERPLSAGVYMGNLSSQQLDQRRALLNMIGMSGSNQGARAGRDGVVRVWDVKNAELLNNQFGTMPSLTLACLTKQGQVDLNDAVQALTDLGLIYTAKYPNTSDLDRLTQSHPILNMIDTKKSSLNISGYNFSLGAAVKAGACMLDGGNMLETIKVSPQTMDGILKSILKVKKALGMFISDTPGERNPYENILYKICLSGDGWPYIASRTSITGRAWENTVVDLESDGKPQKAGSNGSNKSLQSAGFTAGLTYSQLMTLKDAMLQLDPNAKTWMDIEGRPEDPVEIAFYQPSSGCYIHFFREPTDLKQFKQDAKYSHGIDVTDLFAAQPGLTSAVIDALPRNLVITCQGSDDIRKLFESQGRKDIKLIDIALSKTDSRKYENAVWDQYKDLCHMHTGIVVEKKKRGGKEEITPHCALMDCIMFDAAVSGGLNASVLRAVLPRDMVFRTSTPRVVL

SEQ ID NO: 7779 - protein, 569 aa, Artificial Sequence
  derived and/or modified protein sequence (wt) from LASV(LM765-SLE-2012;Clade IV)__AIT17815__NP
MSASKEIKSFLWTQSLRRELSGYCSNIKLQVVKDAQALLHGLDFSEVSNVQRLMRKERRDDNDLKRLRDLNQAVNNLVELKSTQQKSILRVGTLTSDDLLILAADLEKLKSKVTRTERPLSAGVYMGNLSSQQLDQRRALLDMIGMSGSNQGARAGRDGVVRVWDVKNAELLNNQFGTMPSLTLACLTKQGQVDLNDAVQALTDLGLIYTAKYPNTSDLDRLTQSHPILNMIDTKKSSLNISGYNFSLGAAVKAGACMLDGGNMLETIKVSPQTMDGILKSILKVKKALGMFISDAPGERNPYENILYKICLSGDGWPYIASRTSITGRAWENTVVDLESDGKPQKAGSNGSNKSLQSAGFTAGLTYSQLMTLKDAMLQLDPNAKTWMDIEGRPEDPVEIALYQPSSGCYIHFFREPTDLKQFKQDAKYSHGIDVTDLFAAQPGLTSAVIDALPRNMVITCQGSDDIRKLFESQGRKDIKLIDIALSKTDSRKYENAVWDQYKDLCHMHTGIVVEKKKRGGKEEITPHCALMDCIMFDAAVSGGLNTSVLRAVLPRDMVFRTSTPRVVL

SEQ ID NO: 7780 - protein, 569 aa, Artificial Sequence
  derived and/or modified protein sequence (wt) from LASV(LM774-SLE-2012;Clade IV)__AIT17821__NP
MSASKEIKSFLWTQSLRRELSGYCSNIKLQVVKDAQALLHGLDFSEVSNVQRLMRKERRDDNDLKRLRDLNQAVNNLVELKSTQQKSILRVGTLTSDDLLILAADLEKLKSKVIRTERPLSAGVYMGNLSSQQLDQRRALLSMIGMSGGNQGARAGRDGVVRVWDVKNAELLNNQFGTMPSLTLACLTKQGQVDLNDAVQALTDLGLIYTAKYPNTSDLDRLTQSHPILNMIDTKKSSLNISGYNFSLGAAVKAGACMLDGGNMLETIKVSPQTVDGILKSILKVKKALGMFISDTPGERNPYENILYKICLSGDGWPYIASRTSITGRAWENTVVDLESDGKPQKTGSNNSNKSLQSAGFTAGLTYSQLMTLKDAMLQLDPNAKTWMDIEGRPEDPVEVALYQPSSGCYIHFFREPTDLKQFKQDAKYSHGIDVTDLFAAQPGLTSAVIDALPRNMVITCQGSDDIRKLLESQGRKDIKLIDIALSKTDSRKYENAVWDQYKDLCHMHTGVVVEKKKRGGKEEITPHCALMDCIMFDAAVSGGLNTSVLRAVLPRDMVFRTSTPRVVL

SEQ ID NO: 7781 - protein, 569 aa, Artificial Sequence; identical to SEQ ID NO: 7729
  derived and/or modified protein sequence (wt) from LASV(LM776-SLE-2012;Clade IV)__AIT17825__NP

SEQ ID NO: 7782 - protein, 569 aa, Artificial Sequence
  derived and/or modified protein sequence (wt) from LASV(Mad39;Clade IV)__ANH09723__NP
MSASKEIKSFLWTQSLRRELSGYCSNIKLQVVKDAQALLHGLDFSEVSNVQRLMRKQRRDDNDLKRLRDLNQAVNNLVELKSTQQKSVLRVGTLTSDDLLTLAADLEKLKSKVTRTERPLTAGVYMGNLSSQQLDQRRALLNMIGMSGGNQGARTGRDGVVRVWDVKNAELLNNQFGTMPSLTLACLTKQGQVDLNDVVQALTDLGLIYTAKYPNTSDLDRLTQSHPILNMIDTNKSSLNISGYNFSLGAAVKAGACMLDGGNMLETIKVSPQTMDGILKSILKVKKSLGMFISDTPGERNPYENILYKICLSGDGWPYIASRTSITGRAWENTVVDLESGGKPQKAGSNNSNKSLQSAGFAAGLTYSQLMTLKDAMLQLDPNAKTWMDIEGRPEDPVEIALYQPISGCYIHFFREPTDLKQFKQDAKYSHGIDVTDLFAAQPGLTSAVIEALPRNMVITCQGSDDIRKLFESQGRKDIKLIDIALSKTDSRKYENAVWDQYKDLCHMHTGVVVEKKKKGGKEEITPHCALMDCIMFDAAVSGGLNTLVLRAVLPRDMVFRTSTPKVVL

SEQ ID NO: 7783 - protein, 569 aa, Artificial Sequence
  derived and/or modified protein sequence (wt) from LASV(Mad41;Clade IV)__ANH09725__NP
MSASKEIKSFLWTQSLRRELSGYCSNIKLQVVKDAQALLHGLDFSEVSNVQRLMRKQRRDDNDLKRLRDLNQAVNNLVELKSTQQKSVLRVGTLTSDDLLILAADLEKLKSKVTRTERPLSAGVYMGNLSSQQLDQRRALLNMIGMSGGNQGARAGRDGVVRVWDVKNADLLNNQFGTMPSLTLACLTKQGQVDLNDVVQALTDLGLIYTAKYPNTSDLDRLTQSHPILNMIDTNKSSLNISGYNFSLGAAVKAGACMLDGGNMLETIKVSPQTMDGILKSILKVKKSLGMFISDTPGERNPYENILYKICLSGDGWPYIASRTSITGRAWENTVVDLESGGKPQKAGSNNSNKSLQSAGFAAGLTYSQLMTLKDAMLQLDPNAKTWMDIEGRPEDPVEIALYQPISGCYIHFFREPTDLKQFKQDAKYSHGIDVTDLFAAQPGLTSAVIEALPRNMVITCQGSDDIRKLLESQGRKDIKLIDIALSKTDSRKYENAVWDQYKDLCHMHTGVVVEKKKRGGKEEITPHCALMDCIMFDAAVSGGLNTLVLRAVLPRDMVFRTSTPKVVL

SEQ ID NO: 7784 - protein, 569 aa, Artificial Sequence
  derived and/or modified protein sequence (wt) from LASV(Mad63;Clade IV)__ANH09729__NP
MSASKEIKSFLWTQSLRRELSGYCSNIKLQVVKDAQALLHGLDFSEVSNVQRLMRKQRRDDSDLKRLRDLNQAVNNLVELKSTQQKSVLRVGTLTSDDLLTLAADLEKLKSKVTRTERPLSAGVYMGNLSSQQLDQRRALLNMIGMSGGNQGARTGRDGVVRVWDVKNADLLNNQFGTMPSLTLACLTKQGQVDLNDVVQALTDLGLIYTAKYPNTSDLDRLTQSHPILNMIDTNKSSLNISGYNFSLGAAVKAGACMLDGGNMLETIKVSPQTMDGILKSILKVKKSLGMFISDTPGERNPYENILYKICLSGDGWPYIASRTSITGRAWENTVVDLESGGKPQRAGSNNSNKSLQSAGFAAGLTYSQLMTLKDAMLQLDPNAKTWMDIEGRPEDPVEIALYQPTSGCYIHFFREPTDLKQFKQDAKYSHGIDVTDLFAAQPGLTSAVIEALPRNMVITCQGSDDIRKLLESQGRKDIKLIDIALSKTDSRKYENAVWDQYKDLCHMHTGVVVEKKKKGGKEEITPHCALMDCIMFDAAVSGGLNTLVLRAVLPRDMVFRTSTPKVVL

SEQ ID NO: 7785 - protein, 569 aa, Artificial Sequence
  derived and/or modified protein sequence (wt) from LASV(Mad69;Clade IV)__ANH09731__NP
MSASKEIKSFLWTQSLRRELSGYCSNIKLQVVKDAQALLHGLDFSEVSNVQRLMRKQRRDDNDLKRLRDLNQAVNNLVELKSTQQKSVLRVGTLTSDDLLTLAADLEKLKSKVTRTERPLSAGVYMGNLSSQQLDQRRALLNMIGMTGGNQGARTGRDGVVRVWDVKNADLLNNQFGTMPSLTLACLTKQGQVDLNDVVQALTDLGLIYTAKYPNTSDLDRLTQSHPILNMIDTNKSSLNISGYNFSLGAAVKAGACMLDGGNMLETIKVSPQTMDGILKSILKVKKSLGMFISDTPGERNPYENILYKICLSGDGWPYIASRTSITGRAWENTVVDLESGGKPQRAGSNNSNKSLQSAGLAAGLTYSQLMTLKDAMLQLDPNAKTWMDIEGRPEDPVEIALYQPTSGCYIHFFREPTDLKQFKQDAKYSHGIDVTDLFAAQPGLTSAVIEALPRNMVITCQGSDDIRKLLESQGRKDIKLIDIALSKTDSRKYENAVWDQYKDLCHMHTGVVVEKKKKGGKEEITPHCALMDCIMFDAAVSGGLNTLVLRAVLPRDMVFRTSTPKVVL

SEQ ID NO: 7786 - protein, 569 aa, Artificial Sequence
  derived and/or modified protein sequence (wt) from LASV(Mad83;Clade IV)__ANH09733__NP
MSASKEIKSFLWTQSLRRELSGYCSNIKLQVVKDAQALLHGLDFSEVSNVQRLMRKQRRDDNDLKRLRDLNQAVNNLVELKSTQQKSVLRVGTLTSDDLLTLAADLEKLKSKVTRTERPLSAGVYMGNLSSQQLDQRRALLNMIGMSGGNQGARTGRDGVVRVWDVKNADLLNNQFGTMPSLTLACLTKQGQVDLNDVVQALTDLGLIYTAKYPNTSDLDRLTQSHPILNMIDTNKSSLNISGYNFSLGAAVKAGACMLDGGNMLETIKVSPQTMDGILKSILKVKKSLGMFISDTPGERNPYENILYKICLSGDGWPYIASRTSITGRAWENTVVDLESGGKPQRAGSNNSNKSLQSAGFAAGLTYSQLMTLKDAMLQLDPNAKTWMDIEGRPEDPVEIAFYQPISGCYIHFFREPTDLKQFKQDAKYSHGIDVTDLFAAQPGLTSAVIEALPRNMVITCQGSDDIRKLLESQGRKDIKLIDIALSKTDSRKYENAVWDQYKDLCHMHTGVVVEKKKKGGKEEITPHCALMDCIMFDAAVSGGLNTLVLRAVLPRDMVFRTSTPKVVL

SEQ ID NO: 7787 - protein, 569 aa, Artificial Sequence
  derived and/or modified protein sequence (wt) from LASV(NL;Clade IV)__AAO59513__NP
MSASKEVKSFLWTQSLRRELSGYCSNIKLQVVKDAQALLHGLDFSEVSNVQRLMRKERRDDSDLKRLRDLNQAVNNLVELKSTQQKSVLRVGTLTSDDLLVLAADLEKLRSKVTRTERPLSAGVYMGNLSSQQLDQRRALLSMIGMNGSNQGARAGRDGVVRVWDVKNAELLNNQFGTMPSLTLACLTKQGQVDLNDAVQALTDLGLIYTAKYPNTSDLDRLTQSHPILNMIDTKKSSLNVSGYNFSLGAAVKAGACMLDGGNMLETIKVSPQTMDGILKSILKVKKALGMFISDTPGERNPYENILYKICLSGDGWPYIASRTSITGRAWENTVVDLESDEKPQKAGSNNSNKSLQSAGFTAGLTYSQLMTLKDAMLQLDPNAKTWMDIEGRPEDPVEIALYQPSSGCYIHFFREPTDLKQFKQDAKYSHGIDITDLFAAQPGLTSAVIDALPRNMVITCQGSDDIRKLLESQGRKDIKLIDIALNKADSRKYENAVWDQYKDLCHMHTGVVVEKKKRGGKEEITPHCALMDCIMFDAAVSGGLKTLVLRAVLPRDMVFRTSTPRVVL

SEQ ID NO: 7788 - protein, 569 aa, Artificial Sequence
  derived and/or modified protein sequence (wt) from LASV(Z0947-SLE-2011;Clade IV)__AIT17841__NP
MSASKEIKSFLWTQSLRRELSGYCSNIKLQVVKDAQALLHGLDFSEVSNVQRLMRKERRDDNDLKRLRDLNQAVNNLVELKSTQQKSILRVGTLTSDDLLILAADLEKLKSKVTRTERPLSAGVYMGNLSSQQLDQRRALLNMIGMSGSNQGARTGRDGVVRVWDVKNAELLNNQFGTMPSLTLACLTKQGQVDLNDAVQALTDLGLIYTAKYPNTSDLDRLTQSHPILNMIDTKKSSLNISGYNFSLGAAVKAGACMLDGGNMLETIKVSPQTMDGILKSILKVKKALGMFISDAPGERNPYENILYKICLSGDGWPYIASRTSITGRAWENTVVDLESDGKPQKAGSNGSNKSLQSAGFTAGLTYSQLMTLKDAMLQLDPNAKTWMDIEGRPEDPVEIALYQPSSGCYIHFFREPTDLKQFKQDAKYSHGIDVTDLFAAQPGLTSAVIDALPRNMVITCQGSDDIRKLFESQGRKDIKLIDIALSKTDSRKYENAVWDQYKDLCHMHTGIVVEKKKRGGKEEITPHCALMDCIMFDAAVSGGLNTSVLRAVLPRDMVFRTSTPRVVL

SEQ ID NO: 7789 - protein, 569 aa, Artificial Sequence
  derived and/or modified protein sequence (wt) from LASV(Z0948-SLE-2011;Clade IV)__AIT17845__NP
MSASKEIKSFLWTQSLRRELSGYCSNIKLQVVKDAQALLHGLDFSEVSNVQRLMRKERRDDNDLKRLRDLNQAVNNLVELKSTQQKSILRVGTLTSDDLLILAADLEKLKSKVTRTERPLSAGVYMGNLSSQQLDQRRALLNMIGMSGSNQGAQTGRDGVVRVWDVKNAELLNNQFGTMPSLTLACLTKQGQVDLNDAVQALTDLGLIYTAKYPNTSDLDRLTQSHPILNMIDTKKSSLNISGYNFSLGAAVKAGACMLDGGNMLETIKVSPQTMDGILKSILKVKKALGMFISDAPGERNPYENILYKICLSGDGWPYIASRTSITGRAWENTVVDLESDGKPQKAGSNGSNKSLQSAGFTAGLTYSQLMTLKDAMLQLDPNAKTWMDIEGRPEDPVEIALYQPSSGCYIHFFREPTDLKQFKQDAKYSHGIDVTDLFAAQPGLTSAVIDALPRNMVITCQGSDDIRKLFESQGRKDIKLIDIALSKTDSRKYENAVWDQYKDLCHMHTGIVVEKKKRGGKEEITPHCALMDCIMFDAAVSGGLNTSVLRAVLPRDMVFRTSTPRVVL

SEQ ID NO: 7790 - protein, 569 aa, Artificial Sequence
  derived and/or modified protein sequence (wt) from LASV(Z148;Clade IV)__AAT49007__NP
MSVSKEIKSFLWTQSLRRELSGYCSNIKLQVVKDAQALLHGLDFSEVSNVQRLMRKQRRDDNDLKRLRDLNQAVNNLVELKSTQQKSVLRVGTLTSDDLLILAADLEKLKSKVTRTERPLSAGIYMGNLSSQQLDQRRALLNMIGMSGGNQGAQTGRDGVVRIWDVKNAELLNNQFGTMPSLTLACLTKQGQVDLNDVVQALTDLGLIYTAKYPNTSDLDRLTQSHPILNMIDTKKSSLNISGYNFSLGAAVKAGACMLDGGNMLETIKVSPQTMDGILKSILKVKKALGMFISDTPGERNPYENILYKICLSGDGWPYIASRTSITGRAWENTVVDLESGEKPQKIGSNNSNKSLQSAGFTAGLTYSQLMTLKDAMLQLDPNAKTWMDIEGRPEDPVEIALYQPSSGCYIHFFREPTDLKQFKQDAKYSHGIDVTDLFAAQPGLTSAVIEALPRNMVMTCQGSDDIRKLLESQGRKDIKLIDIALSKTDSRKYENAVWDQYKDLCHMHTGVVVEKKKKGGKEEITPHCALMDCIMFDAAASGGLNTLVLRAVLPRDMVFRTSTPKVVL

SEQ ID NO: 7791 - protein, 569 aa, Artificial Sequence
  derived and/or modified protein sequence (wt) from LASV(Bamba-R114;Clade V)__AHC95554__NP
MSASKEVRSFLWTQSLRRELSGYCSNIKLQVVKDAQALLHGLDFSEVSNVQRLMRKQRRDDGDLKRLRDLNQAVNNLVELKSTQQKSVLRVGTLNSDDLLTLAADLEKLKSKVTRTERPLSSGVYMGNLSSQQLDQRRALLNMIGMTGGNQGAQAGRDGVVRVWDVKNAELLNNQFGTMPSLTLACLTKQGQVDLNDVVQALTDLGLIYTAKYPNTSDLDRLTQSHPILNMIDTKKSSLNISGYNFSLGAAVKAGACMLDGGNMLETIKISPQSVDGILKSILKVKRSLGMFVSDTPGERNPYENILYKICLSGDGWPYIASRTSIVGRAWENTVVDLEADGKPQKPNSGSSNKSLQSAGFPAGLTYSQLMTLKDAMLQLDPNAKTWMDIEGRPEDPVEVALYQPSSGCYIHFFREPTDLKQFKQDAKYSHGIDVTDLFAAQPGLTSAVIEALPRNMVITCQGSEDIKKLLESQGRKDIKLIDIALSKIDSRKFENAVWDQYKDLCHMHTGVVVEKKKRGGKEEITPHCALMDCIMFDAAVSGGLNASVLRAVLPRDMVFRTSTPKVVL

SEQ ID NO: 7792 - protein, 569 aa, Artificial Sequence
  derived and/or modified protein sequence (wt) from LASV(Komina-R16;Clade V)__AHC95556__NP
MSASKEVKSFLWTQSLRRELSGYCSNIKLQVVKDAQALLHGLDFSEVSNVQRLMRKQRRDDGDLKRLRDLNQAVNNLVELKSTQQKNVLRVGTLNSDDLLTLAADLEKLKSKVTRTERPLSSGVYMGNLSSQQLDQRRALLNMIGMTGGNQGTQTGRDGVVRVWDVKNAELLNNQFGTMPSLTLACLTKQGQADLNDVVQALTDLGLIYTAKYPNASDLDRLTQSHPILNMIDTKKSSLNISGYNFSLGAAVKAGACMLDGGNMLETIKVSPQSMDGILKSILKVKRALGMFVSDTPGERNPYENILYKICLSGDGWPYIASRTSIVGRAWENTVVDLEADGNPKKLNSNGSNKSLQSAGFPAGLTYSQLMTLKDAMLQLDPNAKTWMDIEGRPEDPVEVALYQPNSGCYIHFFREPTDLKQFKQDAKYSHGIDVTDLFAAQPGLTSAVIEALPRNMVITCQGSEDIRKLLESQGRKDIKLIDIALSKTDSRKFENAVWDQHKDLCHMHTGVVVEKKKRGGKEEITPHCALMDCIMFDAAVSGGLNTLVLRAVLPRDMVFRTSTPKVVL

SEQ ID NO: 7793 - protein, 569 aa, Artificial Sequence
  derived and/or modified protein sequence (wt) from LASV(Ouoma-R123;Clade V)__AHC95558__NP
MSASKEVRSFLWTQSLRRELSGYCSNIKLQVVKDAQALLHGLDFSEVSNVQRLMRKQRRDDSDLKRLRDLNQAVNNLVELKSTQQKSVLRVGTLSSDDLLTLAADLEKLKSKVIRTERPLSSGVYMGNLSSQQLDQRRALLNMIGMTGGNQGAQAGRDGVVRVWDVRNAELLNNQFGTMPSLTLACLTKQGQVDLNDVVQALTDLGLIYTAKYPNTSDLDRLTQNHPILNMIDTKKSSLNISGYNFSLGAAVKAGACMLDGGNMLETIKVSPQSIDGILKSILKVKRTLGMFVSDTPGERNPYENILYKICLSGDGWPYIASRTSIVGRAWENTVVDLETDRKSQGPNSGNSNKSLQSAGFSAGLTYSQLMTLKDAMLQLDPNAKTWMDIEGRPEDPVEVALYQPISGCYIHFFREPTDLKQFKQDAKYSHGIDITDLFAAQPGLTSAVIEALPRNMVITCQGSEDIKKLLESQGRKDIKLIDIALSKIDSRKFENAVWDQYKDLCHMHTGVVVEKKKRGGKEEITPHCALMDCIMFDAAVSGGLNASVLRAVLPRDMVFRTSTPKVVL

SEQ ID NO: 7794 - protein, 569 aa, Artificial Sequence
  derived and/or modified protein sequence (wt) from LASV(Soromba-R;Clade V)__AHC95552__NP
MSASKEVKSFLWTQSLRRELSGYCSNIKLQVVKDAQALLHGLDFSEVSNVQRLMRKQRRDDGDLKRLRDLNQAVNNLVELKSTQQKNVLRVGTLNSDDLLTLAADLEKLKSKVTRTERPLSSGVYMGNLSSQQLDQRRALLNMIGMTGGNQGTQAGRDGVVRVWDVKNAELLNNQFGTMPSLTLACLTKQGQADLNDVVQALTDLGLIYTAKYPNASDLDRLTQSHPILNMIDTKKSSLNISGYNFSLGAAVKAGACMLDGGNMLETIKVSPQSMDGILKSILKVKRALGMFVSDTPGERNPYENILYKICLSGDGWPYIASRTSIVGRAWENTVVDLEADGNPKKLNSNGSNKSLQSAGFPAGLTYSQLMTLKDAMLQLDPNAKTWMDIEGRPEDPVEVALYQPNSGCYIHFFREPTDLKQFKQDAKYSHGIDVTDLFAAQPGLTSAVIEALPRNMVITCQGSEDIRKLLESQGRKDIKLIDIALSKTDSRKFENAVWDQYKDLCHMHTGVVVEKKKRGGKEEITPHCALMDCIMFDAAVSGGLNTLVLRAVLPRDMVFRTSTPRVVL

SEQ ID NO: 7795 - protein, 569 aa, Artificial Sequence
  derived and/or modified protein sequence (wt) from LASV(Soromba-R30;Clade V)__AHC95560__NP
MSASKEVKSFLWTQSLRRELSGYCSNIKLQVVKDAQALLHGLDFSEVSNVQRLMRKQRRDDGDLKRLRDLNQAVNNLVELKSTQQKNVLRVGTLNSDDLLTLAADLEKLKSKVTRTERPLSSGVYMGNLSSQQLDQRRALLNMIGMSGGNQGTQVGRDGVVRVWDVKNAELLNNQFGTMPSLTLACLTKQGQADLNDVVQALTDLGLIYTAKYPNASDLDRLTQSHPILNMIDTKKSSLNISGYNFSLGAAVKAGACMLDGGNMLETIKVSPQSMDGILKSILKVKRALGMFVSDTPGERNPYENILYKICLSGDGWPYIASRTSIVGRAWENTVVDLEADGNPKKLNSNGSNKSLQSAGFPAGLTYSQLMTLKDAMLQLDPNAKTWMDIEGRPEDPVEVALYQPNSGCYIHFFREPTDLKQFKQDAKYSHGIDVTDLFAAQPGLTSAVIEALPRNMVITCQGSEDIRKLLESQGRKDIKLIDIALSKTDSRKFENAVWDQHKDLCHMHTGVVVEKKKRGGKEEITPHCALMDCIMFDAAVSGGLNTLVLRAVLPRDMVFRTSTPKVVL

SEQ ID NO: 7796 - protein, 569 aa, Artificial Sequence; identical to SEQ ID NO: 7552
  derived and/or modified protein sequence (wt) from LASV(Alzey;Clade VI)__SCA79106__NP

SEQ ID NO: 7797 - protein, 569 aa, Artificial Sequence
  derived and/or modified protein sequence (wt) from LASV(NIGERIA IKEJI;Clade II)__AMZ00372__NP
MSVSKEVKSFLWTQSLRRELSGYCSNIKLQVVKDAQALLHGLDFSEVSNVQRLMRKQKRDDNDLKRLRDLNQAVNNLVELKSVQQKSILRVGTLTSDDLLTLAADLEKLKSKVIRTERPLSSGVYMGNLSSQQLEQRKALLTMIGMTGGSQSAQPGRDGVVRVWDVKNSDLLNNQFGTMPSLTLACLTKQGQVDLNDAVLALTDLGLIYTAKYPNTSDLDRLSQSHPILNMVDTKKSSLNISGYNFSLGAAVKAGACMLDGGNMLETIKVTPQTMDGILKSILKVKRALGMFVSDTPGERNPYENILYKICLSGDGWPYIASRTSIVGRAWENTIVDLESDSKPQKVGAIGSNKSLQSAGFPAGLTYSQLMTLKDSMMQLDPSAKTWIDIEGRPEDPVEIALYQPISGCYIHFFREPTDLKQFKQDAKYSHGIDVADLFSAQPGLTSAVIEALPRNMVLTCQGSDDIKKLLDSQGRRDIKLIDISLNKADSRRFENAVWDQCKDLCHMHTGVVVEKKKRGGKEEITPHCALMDCIMFDAAVSGGLNIPTLRAVLPRDMVFRTSSPKVVL

SEQ ID NO: 7798 - RNA, 1710 nt, Artificial Sequence
  derived and/or modified CDS sequence (wt) from LASV(Josiah;Clade IV)__NP_694869__NP
augagugccucaaaggaaauaaaauccuuuuuguggacacaaucuuugaggagggaauuaucugguuacugcuccaacaucaaacuacagguggugaaagaugcccaggcucuuuuacauggacuugacuucuccgaagucaguaauguucaacgguugaugcgcaaggagagaagggaugacaaugauuugaaacgguugagggaccuaaaucaagcggucaacaaucuuguugaauuaaaaucaacucaacaaaagaguauacugagaguugggacucuaaccucagaugacuuauuaaucuuagccgcugaucuagagaaguuaaagucaaaggugaucagaacagaaaggccauuaagugcaggugucuauaugggcaaccuaagcucacagcaacuugaccaaagaagagcucuccugaauaugauaggaaugaguggugguaaucaaggggcucgggcugggagagauggaguggugagaguuugggaugugaaaaaugcagaguugcucaauaaucaguucgggaccaugccaagucugacacuggcaugucugacaaaacaggggcagguugacuugaaugaugcaguacaagcauugacagauuuggguuugaucuacacagcaaaguaucccaacacuucagacuuagacaggcugacucaaagucaucccauccuaaauaugauugacaccaagaaaagcucuuugaauaucucagguuauaauuuuagcuugggugcagcugugaaggcaggagcuugcaugcuggaugguggcaauauguuggagacaaucaaggugucaccucagacaauggaugguauccucaaauccauuuuaaaggucaagaaggcucuuggaauguucauuucagacaccccuggugaaaggaauccuuaugaaaacauacucuacaagauuuguuugucaggagauggauggccauauauugcaucaagaaccucaauaacaggaagggccugggaaaacacugucguugaucuggaaucagaugggaagccacagaaagcugacagcaacaauuccaguaaaucccugcagucggcaggguuuaccgcugggcuuaccuauucucagcugaugacccucaaggaugcaaugcugcaacuugacccaaaugcuaagaccuggauggacauugaaggaagaccugaagauccaguggaaauugcccucuaucaaccaaguucaggcugcuacauacacuucuuccgugaaccuacugauuuaaagcaguucaagcaggaugcuaaguacucacaugggauugaugucacagaccucuucgcuacacaaccgggcuugaccagugcugucauugaugcacucccccggaauauggucauuaccugucagggguccgaugacauaaggaaacuccuugaaucacaaggaagaaaagacauuaaacuaauugauauugcccucagcaaaacugauuccaggaaguaugaaaaugcagucugggaccaguauaaagacuuaugccacaugcacacaggugucguuguugaaaagaagaaaagaggcgguaaagaggaaauaaccccucacugugcacuaauggacugcaucauguuugaugcagcagugucaggaggacugaacacaucgguuuugagagcagugcugcccagagauaugguguucagaacaucgacaccuagagucguucuguaa

SEQ ID NO: 7799 - RNA, 1710 nt, Artificial Sequence
  derived and/or modified CDS sequence (wt) from LASV(LP;Clade I)__AAF86702__NP
augagcaacuccaaggaaaucaaaucauuccuuuggacucaguccuuacgaagggaacuaucugguuacuguucuaacauaaaguugcaaguugucaaagaugcucaggcucuccugcauggccuugacuuuucugaggucagcaaugugcagaggcugaugcgcaagcagaagagagaugaugcagaccuaaagcgacugagggaucugaaucaagcugucaacaaucuuguugaacugaagucaacucaacagaagaaugucuuaagggucggcaccuugaguucagaugaucuaauaacuuuggcagcggaccuggaaaaacucaaguccaaagucauaaggacagaaaggccuuugagcucagguguuuacauggggaauuuaagcucacaacagcuugaucaaaggagggcucucuugagcaugauugggaugucagguggaccucaaggaaauaggacagguggggauggugucgucaggguuugggacguaaaaaaugcagaauuacucaauaaccaauuuggaaccaugccaagccucaccuuggcgugccucaccaaacaagggcaaguggaccucaaugaugcugugcaagcuuuaacagauuuagguuugauuuacacagcaaaguacccgaacucuucagaucuagacaugcucacucagagucacccuauacuaggaaugguugacacaaaaaagaguucccugaacaucucagguuacaacuucagucugggggcugcaguuaaagcuggugcuugcaugcuugaugggggcaacauguuggaaacaauaaaagugucaccacaaacaauggacgguauuuugaaaucuauucugaaggucaaaagaucacugggaauguucauuucugacacuccuggugaaagaaacccauaugagaacauccucuauaagaucugccuuucaggugaagguuggccguauauugcaucaagaacaucaauuacugggagagcuugggaaaacacucuuguugauuuggaaucugacaacaaaccaccgaaacuaaauagcgcugguuccaauaaaagcuugcaggcugcaggucuaaaugcuggguugaccuauucucaacugaugacacuaaaagauuguauguuacaguuggacccaaguagcaaaacauggauagauauugagggcaggccugaagacccaguggagauugcuuuguuucaaccaagcucugguuguuacauacacuuuuuuagagaaccuacugaccuuaagcaauucaaacaggaugcuaaguacucacaugggauagauguuacagaucuuuuuuccacacaacccgggcugacaagugcugucauagaggcacuuccccgcaauaugguguugaccugccaggggucagaugacaucaaaaagcuguuggagucucaagggagaagagacaucaaauugauugauauuucuuugagcaaagcagauucaaggaaguuugaaaaugcugugugggaccaauacaaagacuugugucacaugcacacgggaguagucguugagaagaaaaagagggguggaaaagaggaaaucaccccacauugcgcuuuacuggacugcaucauguuugaugcagcuacuacugguaguuugaacaucacaacacugagggcaguacuucccagagacauggucuucaggaccagcaccccuaaagucguucuguaa

SEQ ID NO: 7800 - RNA, 1710 nt, Artificial Sequence
  derived and/or modified CDS sequence (wt) from LASV(803213;Clade II)__AAF86704__NP
augagugcuuccaaggaggugaaaucauuccuuuggacacagucauugaggagagagcuuucagguuauuguucuaacauaaagcuucaaguuguuaaggaugcccaggcccuccuucacggccuugacuucucugaggucaacaaugugcaacgucuaaugcgcaaacagaaaagagaugauggugauuuaaaacgucuuagagaccugaaucaggcagucaacaaccuuguugaacucaaaucaacacaacaaaagagcauuuugagaguuggaacacugaccucagaugacuugcugacauuggcagcugacuuagagaaacugaagucaaaagucaucagaacagaaagaccacuaagcucggguguguacauggggaauuuaaguacacagcagcuugagcagagaagggcauugcugaacaugauuggcaugguugguggagcacagggcacccaaccuggaagagacggaguuguuagggugugggaugucaaaaauccagaucucuuaaacaaccaguucggcaccaugccuaguuugacauuagcaugucuuacuaaacagggucaaguugaccuaaaugaugcuguccuagcacugacggacuugggacugauauacacagcuaaguacccuaacaguuccgaccuggacaggcuuucccaaagucauccgauacugaacaugguggacacuaagaagagcuccuugaacauuucugguuacaauuuuagcuugggagcugcaguaaaggcuggggccuguaugcucgaugggggcaacauguuggaaaccauuaagguuacgccucagacaauggaugguaucuugaaguccauuuuaaaggugaaaagaucuuugggaauguuugucucagauacaccuggugagaggaacccuuaugagaacauacuuuauaaaaucugucucucuggugauggcuggcccuacauagccucaagaaccuccauugugggcagggcuugggagaauacuacuguggaucucgagucagaugggaagccacaaaaagugggaacugcuggguccaauaagucuuugcaguccgcaggguuuccaacaggguugacuuauucacagcugaugacucuuaaagacucaaugaugcagcuugacccaagugccaaaacuuggauagacauugaaggucguccagaagacccuguggagauagcucuuuaucaaccuaugucaggcuguuacauacauuucuuuagagaaccaacagaucugaaacaguucaagcaagacgccaaguauucucaugggauugauguggcagaucuuuucccugcucaaccugguuugacuagugcaguuauugaagcucuuccucgcaauaugguguugacuugccaagguucagaugauaucaagaaacucuuagacucucaaggaaggagggacauaaagcuuauugauauuucauuaagcaagguugacucuaggaaguuugaaaaugcuguuugggaccagugcaaagacuugugccacaugcacacuggagugguuguugagaagaagaaaagaggaggcaaagaagaaaucaccccacauugugcccugauggauugcauaauguuugaugcagcugugucaggagggcucaacauaccaguuuuaagagcuguucuucccagagacaugguauuuagaaccucaagccccaaggucguccuguaa

SEQ ID NO: 7801 - RNA, 1713 nt, Artificial Sequence
  derived and/or modified CDS sequence (wt) from LASV(GA391;Clade III)__CAA36646__NP
augagugcuuccaaggaagugaggucauucuuguggacucaaucccuaagaagggaacuaucuggcuacuguuccaacauaaaguugcagguaguuaaagacgcucaagcucuccuucauggucuugacuucuccgaggucaguaauguucagagauugaugcgcaagcagaaaagagaugauggcgaccuaaaacgacugagagaucucaaucaagcagucaacaaucuuguugagcucaaauccacacagcagaaaagugucuuaagaguuggaaccuuaaguucagacgaucuacuaauccuggccgcugauuuagaaaaacugaaaucaaaagucaccagaacagaaaggccuuugaguucaggaguuuauauggggaauuugaguucacaacagcuugaucaaaggagagcccuuuugaacaugauuggcaugacuggaguaaguggagggggaaagggugccagugauggcauugugagaguuugggaugucaaaaaugcagaguuacucaacaaucaguucggaacaaugccaagccuaacuuuagcaugccugaccaaacaggggcaaguggaccugaaugaugccguucaagcuuugacagauuuagggcugauuuacacagccaaauaccccaacucaucugaucucgacagauugucucagagucauccaauucugaauaugauugacacuaagaaaaguucacucaacaucucugguuacaauuucaguuugggugcugcugucaaagcaggggccugcaugcuugauggugguaacauguuagagacuauuaagguuucaccucagaccauggaugguaucuugaagucaaucuugaaaguuaagaagagucugggaauguuuguaucagacacaccgggugaaaggaacccuuaugagaacauccuauacaagaucugucucucaggagacggauggcccuauauugcaucaaggaccucgauugugggaagagcaugggaaaauacugugguggaccuugagcaagacaacaagccccagaaaauuggaaaugggggguccaacaagucauuacagucugcaggcuuugcugcaggauuaacuuacucucaguugaugacucucaaagauuucaagugcuucaacuugauucccaacgcaaaaaccuggauggauauugaaggaagaccagaagacccaguugagauagcccuuuaucaaccgagcucggguugcuauguacauuucuuuagggagccaacagauuugaagcaauucaaacaagaugcaaaguauucacaugguauugaugugacugauuuguuugcugcccaaccuggguuaaccagugcagugauagaagcccuuccucggaacauggucaucacuugccaaggaucagaggauaucagaaaacuccuugagucacaagggaggagagacauaaaacugauugacaucacucuuaguaaagcagauucaagaaaguuugagaaugcuguuugggaucaauucaaggaucuaugucacaugcacacugggguaguuguggagaaaaagaagagaggugguaaagaggaaauaacuccucauugugcacugauggauugcauuauguuugaugcagcaguuucaggaggacuugaugcaaaaguccugagaguugugcucccuagagacaugguguucagaacuucaacaccuaaagucguccuguag

SEQ ID NO: 7802 - RNA, 1710 nt, Artificial Sequence
  derived and/or modified CDS sequence (wt) from LASV(AV;Clade V)__CCA30315__NP
augagugccuccaaagaagugaaaucuuucuuauggacacaaucucugaggagggaguugucggguuacuguuccaauaucaaacuucaaguggugaaggacgcucaagcucucuugcaugggcuugacuucucugaggucagcaauguccagcggcugaugcgcaaacaaaggagagaugauagugaccuaaagcgucuuagggaucugaaucaagcugucaacaaucuuguugagcugaaaucgacacaacagaaaagugugcugagaguugggacccuaaguucggacgauuuacugacucuggcggcugauuuagaaaagcugaaaucaaaaguuacaagaacagaaaggcccuugaguucaggugucuacaugggaaaccuaaguucacagcagcucgaucagaggagggcacuucuaaauuugauugggaugacaaacggcagucaggggucacaggcugggagagauggagugguaagagucugggaugugaagaaugcagaauuguugaacaaucaauuugggacaaugccgagccugacauuagcaugucugacaaagcagggacaaguugacuuaaaugaugugguacaagcacucacagaucugggcuugauuuauacagcuaaauauccuaacacaucagauuuagauagguuaacucaaagucaucccauuuuaaacaugauugacaccaagaagagcucccugaacaucucaggcuacaauuuuagucugggugccgcagugaaagcaggugccugcaugcuggaugguggcaacauguuagaaacaaucaagguuucgccucaaucaauggauggcauuuuaaaauccaucuugaaggucaagagggcucuugggauguucgucucagauacuccgggugagagaaaccccuaugaaaacauacucuacaaaaucugcuuaucaggugacggguggccauacauugcaucuaggacaucaauaguaggaagggcuugggaaaacacuguaguggaccuugaaacagaugggaaaccacagaaaauuggcagugguaacuccaacaaaucucuccaaucugcaggcuucucggcuggacuaacuuacucccaacuuaugacccuuaaagaugcaauguugcagcuugacccaaaugccaagacguggauggacauagaagggaggccagaggacccgguggaaguugcucucuaucagccuaucucuggguguuauauacacuuuuucagagagcccacugaucucaaacaauuuaaacaagaugcaaaauauucucauggaauugacaucgcagaucuguuugcugcacaaccaggucugaccagugcuguuauugaggcgcucccccggaauaugguuaucacuugccaaggguccgaagacauaaagaagcuucuugaaucacaagggagaaaggauauaaaacugauugacauugcucuuaguaagauugauucaagaaaguuugaaaaugcuguuugggaucaauauaaagauuugugucacaugcacacagguguuguuguugagaagaagaagagagguggcaaagaagagaucaccccucacugugcauugauggauugcaucauguuugaugcugcugucucaggaggguugaacacacuggugcucagagcugugcuacccagagacaugguguuuagaacaucaacaccaagagucguccuguaa

SEQ ID NO: 7803 - RNA, 1710 nt, Artificial Sequence
  derived and/or modified CDS sequence (wt) from LASV(Togo/2016/7082;Clade VI)__AMR44578__NP
augaguaacucuaaagaggugaagucuuuucucuggacucagucucugaggagagagcugucagguuacugcucuaacaucaaacuccagguggucaaggaugcucaggccuuauuacaugggcuugauuucucugaagugagcaauguucagaggcugaugcgaaaacagaagagggaugauggugaccucaagaggcucagagaccugaaucaagcgguaaauaaucuuguugaacuaaaaucaguucaacaaaaaaguauauugagaguuggcacccugaccucugaugacuuacuaacacuugcugcugaccuagaaaaacuaaagucuaaaguaacuaggacugaaagaccuuugaguucaggaguuuauaugggaaaccucagcucucagcaacuugaccagaggagagcccuccugagcaugauagggaugaguggugggaaccagaacagccaacccaaaggagaugguguugugaggguuugggaugugaaaaaugcugaccugcugaacaaccaguuuggaacgaugcccagucuuacauuagcaugcuuaacaaagcagggacaaguggauuugaaugaugcuguucaggcacugacugaucuaggguugauuuacacagcuaaauacccgaacucaucugaccuagacagacuuucacaaagccauccaauccugaacaugaucgauaccaagaagagcucauugaacaucucuggcuacaauuuuaguuuaggggccgcaaucaagacuggggcaugcaugcuugaugggggcaacaugcuggagacaaucaaggucacuccccaaaccauggaugggauuuugaaauccauuuuaaaggugaagaggagucuugggauguuuauuucugauacaccuggagaaaggaauccuuaugaaaacauucuuuauaaaaucugucuuucaggagacggguggccuuacauagccucacgaacugccaucauugguagagcaugggaaaacacugugguugauuuggagucugauagcaagccacaaaagauugggagcaauggaucuaacaaaucauugcaaucugcaggcuuugccccuggacugacauacucucagcucaugacccucaaagacucaauguugcaauuagauccuaaugcaaagacuuggauagacauugaagguaggccggaagacccuguugaggucgccuuguuucagccuaucucagguugcuacauacacuucuuuagagaaccaacagaccugaagcaauuuaaacaagaugcaaaguacucacaugggauagaugucaccgauuuguuugcugcucagccagguuugaccagugcugucauugaggcacuucccaggaauauggugcugaccugucagggaucagacgacaucaaaaaauuguuggauucacaggggagaagggacauuaaacucauugauguuucucucaauaaaauugacucaagaaaguuugagaaugcuguaugggaucaauacaaagaucugugucacaugcauacagggguagucguggagaagaaaaagaagggagggaaagaagaaauaaccccucauugugccuugcuagacugcaucauguuugaugcagccguguccggaggccuaaaugccacaguuuugagagcuguucuaccuagagacaugguguuuagaacgucaucaccuaaagucguucuguaa

SEQ ID NO: 7804 - RNA, 1710 nt, Artificial Sequence
  derived and/or modified CDS sequence (wt) from LASV(KAK-428;Clade n.d. (VII))__ANH09741__NP
augagcaacucaaaggaggugaaaucuuuccuuuggacucagucucucagaagagaacugucugguuauugcaccaacauaaagcuucaaguugucaaagaugcucaggcacuauugcauggccuugacuucucugaaguuagcaauguccaacgucucaugcguaaacagaaaagagaugauaaugauuuaaagaggcuuagagacuugaaucaggccgucaacaaucuaguggaacuaaaaucagugcaacaaaagagcguccuuaaaguugggacacugaauucagaugaucuccugacauuagcugcagaucuggagaagcucaaaucuaaggugguuagaacugaaaggccucugagcucugguguuuacaugggcaaucuuaguucacaacagcuugaccaaaggagagcacuucuaaacaugauuggaauggcuggcgguagucagggaaaccaaccuagccgagaugguguagucagaguaugggaugucaaaaaugcagaccuacucaacaaccaauuuggcacaaugccaagucuuacauuagcaugucugacaaagcagggccaaguugacuuaaaugauguuguguuggcucugacugauuugggccuuauauacacagccaaauacccuaauucaucagauuuagauaggcugucucagaaccacccaguucugaacaugauugaugucaacaagaguucccuaaacauuucgggcuacaauuucagccugggggcagcagugaaagcuggagcuugcaugcuugauggcgggaacaugcuugagacaaucaagaucuccccucaaacaguggacggcauccugaaaucgaucuugaagguuaaaagggcuuuagggauguuugugucagacaccccuggugaaaggaacccuuaugagaacauacuguauaagguaugucuuucagggaauggguggccauacauagcuucaagaacaucaauuguugggagagcaugggaaaauacugugguagaucuugagucaaacaaaaaucagccuaagguugggaacaauggauccaacaagaugcugcagucuucgggauuugcuacugguuugacuuauucucaguugaugacuuugagggauucaauguuacaguuggacccaacugcaaagaccuggauugacauugaggguagaccugaagacccuguugaguuggcccucuuucagcccaguucaggguguuacauacauuucuuuagagagccuacugaccuaaagcaauucaaacaggaugcaaaauacucucaugggauugaugugaaugauuuguucucggcacaaccugguuuaaccagugcuguuuuggaagcacuaccacguaauauggugcugacuugucaaggcucugaugacauuagaaagcuuuuggacucacaggacaggaaagauauaaagcuaauugacaucucauugagcaaggcugaugcaaggaaguucgagaacgaugugugggaucaauuuaaggauuuaugccauaugcacaccgggauaguugucgagaagaagaagaaaggagggaaacaggaaaugacaccacacugugcauugcuagauuguaucauguuugaugcagcugucucuggggggcuuaauguccccacuuugagagcagugcuucccaccgacauggucuucagaacaauaacaaccaaagucguccuguaa

SEQ ID NO: 7805 - RNA, 1710 nt, Artificial Sequence; identical to SEQ ID NO: 7799
  derived and/or modified CDS sequence (wt) from LASV(Pinneo-NIG-1969;Clade I)__AIT17837__NP

SEQ ID NO: 7806 - RNA, 1710 nt, Artificial Sequence
  derived and/or modified CDS sequence (wt) from LASV(ISTH0009-NIG-2011;Clade II)__AIT17405__NP
augaguguuucuaaggaagugaagucauuucucuggacacagucauugaggagggagcuuucaggcuauugcuccaacauaaaacuucaaguuguuaaggaugcucaggcucuucuucauggucuugacuuuucugaagucagcaaugugcaacgcuuaaugcgcaagcaaaaaagggaugauagugaucugaaacgccucagagauuugaaucaggcugucaacaaucuuguagaacucaaaucgacacaacaaaagaguaucuugagaguugggaccuugaccucagaugaccugcugacauuggcagcugacuuagagaaacuaaagucgaaggucauuagaacagaaaggccucuaagcucagguguuuauauggggaauuugagcacacagcagcuugagcagagaagggcauugcugaacaugauaggcaugguugguggggcucagggcacccaaccuggaagagacggaguuguuagagugugggauguuaagaauccggaucuuuugaacaaccaguucggcaccaugccuagucugacauuagcaugucucaccaaacaaggucaaguugauuugaaugaugccgucuuagcacuaacagaccugggucuaauauacacagcuaaguacccaaauagcuccgaccuagauagacuuucccaaagccauccuauacugaauaugguggacauuaagaaaagcucccugaacauuucugguuacaacuucagcuuaggagcugcagugaaggcuggggccugcaugcucgauggggggaacauguuggagaccaucaagguuacaccucagacaauggauggcaucuugaagucuauuuuaaaaguaaaaagaucuuugggaauguuuguuucagauacaccuggugagagaaacccuuaugagaacauacuuuacaagaucugucuuuccggugacggcuggcccuacauagcuucaaggacuucuauuguggguagggcuugggagaauaccacuguggaucucgagucagauggaaaaccgcaaaaagugggcucugcuggguccaacaaguccuuacagucagcgggauucccaacagggcugaccuauucucaguugaugacacuuaaagacucaaugaugcagcuugacccaagugccaaaaccuggauagacauugaaggucguccagaagacccuguggaaauagcucuuuaccaaccuaugucgggcuguuacauacacuucuucagagagccaacagacuuaaaacaguucaaacaggaugccaaauauucucaugggauugauguggcagaucuuuucccugcucaaccugguuugaccagcgcaguuauugaggcccucccucgcaauauggugcugaccugucaagguucagaugacauuaagagacucuuagacucccaaggaagaagggacauaaagcuuauugacauugcacugagcaaggcugacucuaggagauuugaaaaugcuguuugggaucaguguaaagaccuaugccauaugcauacuggagugguugucgaaaagaagaaaagaggaggcaaagaagaaauaacuccgcacugugcuuuaauggacugcauaauguaugaugcagcugugucaggagggcucaauauaccaguuuuaagagcaguucuucccagagacaugguguuuagaaccucaagccccaaggucguccuguaa

SEQ ID NO: 7807 - RNA, 1710 nt, Artificial Sequence
  derived and/or modified CDS sequence (wt) from LASV(ISTH0012-NIG-2011;Clade II)__AIT17409__NP
augagcgcuucuaaggaagugaagucauuucucuggacacagucauugaggagggagcuuucagguuauugcuccaacauaaagcuucaaguuguuaaggaugcucaggcucuccuucauggucuugacuuuucugaaguuagcaaugugcagcgcuugaugcgcaaacaaaagagggaugauggugaucugaaacgucuaagagaucugaaucaggcugucaacaaucuuguagaacucaaaucaacacaacaaaagaguaucuugagaguugggaccuugaccucagaugaucugcugacauuggcagcugacuuagagaaacuaaagucgaaggucaucagaacagaaaggccacuaagcucagguguuuacauggggaauuugaguacacagcaacuugagcaaagaagggcauugcugaacaugauaggcaugguugguggggcucaaggcacccaaccugggagagacggaguuguuagggugugggauguuaagaauccagaucuuuugaacaaccaguucggcaccaugccuagucugacauuagcaugucucacuaaacagggucagguugauuugaaugaugccgucuuagcacuaacagaccugggucuaauauacacagcuaaguacccuaauagcuccgaccuggacagacuuucccaaagccauccuauauugaauaugguggacacuaagaagagcuccuugaacaucucugguuauaacuuuagcuuaggagcugcagugaaagcuggagcuuguaugcuugauggggggaacauguuggagaccaucaagguuacaccucagacaauggauggcaucuugaagucuauuuuaaaggugaaaaaauccuugggaauguuuguuucagauacaccuggugagaggaacccuuaugagaacauacuuuacaagaucugucuuuccggugacggcuggcccuacaucgcuucaaggacuucuauuguggguagagcuugggagaauacuacuguagaucucgagucagaugggaaaccacaaaaagugggaacugcuggguccaacaagucuuuacagucagcgggguuuccaacagggcugacuuauucucaguugaugacacucaaagauucaaugaugcagcuugacccaagugccaaaaccuggauagacauugaaggucguccagaagacccuguggaaauagcucuuuaccagccuaugucaggcugcuauauacacuucuucagagaaccaacagacuuaaaacaguucaagcaagaugccaaauauucucaugggauugaugugacagaucuuuucucugcucaaccuggauuaaccagugcagucauugaagcccucccucgcaauaugguacugaccugucaagguucagaugauauuaagcgacucuuggauucccaaggaagaagggauauaaagcuuauugacauugcacugaacaaggcugacucuaggagauuugaaaaugcuguuugggaucagugcaaagaucuaugccauaugcacacuggagugguugucgaaaagaagaaaagaggaggcaaagaagaaauuaccccacacugugcucuaauggacugcauaauguacgaugcagcugugucaggaggccucaauauaccaguuuugagagcaguccuccccagggacaugguguuuagaaccucaagccccaaagucguccuguaa

SEQ ID NO: 7808 - RNA, 1710 nt, Artificial Sequence
  derived and/or modified CDS sequence (wt) from LASV(ISTH0047-NIG-2011;Clade II)__AIT17413__NP
augagugcuuccaaagaaguaaagucauuccuuuggacacagucauugaggagggagcucucagguuacugcuccagcauaaagcuucaaguugucaaggaugcucaggcccuccuucauggucuugacuuuucugaagucaguaauguucagcgcuugaugcgcaaacaaaaaagggacgacagugaucugaaacgucucagagaucugaaccaggcugucaacaaucuuguagaacucaaaucaacacaacaaaagaguauucugagaguugggaccuugaccucagaugaucugcugacauuggcagcugacuuggagaaacuuaagucgaaggucaucagaacagaaaggccacuaagcucagguguuuacaugggaaaucugaguacacagcaacuugagcaaagaagagcauugcuaaacaugauaggcaugguugguggggcucaggguacccaaccuggaagagacggaguuguuagggugugggaugucaagaauccggaucuuuugaacaaccaauucggcaccaugccuagucugacauuagcaugucucaccaaacaaggucaaguugauuuaaaugaugccgucuuggcacuaacagaccugggucuaauauacacagcuaaguacccaaacagcuccgaccuggacagacuuucucaaagccauccuauacugaacaugguggacacuaagaagagcuccuugaacauuucugguuacaacuucaguuuaggagcugcagugaaagcuggagccuguaugcuugauggggggaacauguuggagaccaucaagguuacaccucaaacaauggauggcaucuugaaaucuauccuaaagguaaaaagaucuuugggaauguuuguuucagaugcaccuggugagaggaacccuuaugagaacauacuuuacaaaaucugucuuucuggagacgguuggcccuacauagcuucaagaacuuccauuguggguagagcuugggagaacaccacuguggaucucgagucagauggaaaaccacaaaagauggguacugcuggguccaacaagucuuuacagucagcgggguuuccaacaggguuaaccuacucucaguugaugacacuuaaagacucaaugaugcaacuugacccaagugcuaaaaccuggauagacauugaaggucguccagaagacccuguggaaauagcucuuuaccaaccuaugucggguuguuacauacacuucuucagagaaccaacagacuugaaacaguucaagcaagaugccaaauauucucaugggauugauguggcagaucuuuucccugcucaaccuggcuugaccagugcagucauugaagcccuuccucgcaauaugguacugaccugucaggguucagacgauaucaagaaacucuuagauucacaaggaagaagggacauaaagcuuauugacauugcacugagcaaggcugacucuaggagguuugagaaugcuguuugggaucaaugcaaggaucugugccauaugcauacuggggugguuguugagaaaaagaaaagaggaggcaaagaagaaauuaccccacacugugcucuaauggauugcauaauguaugaugcagcugugucaggaggacucaauauaccaguuuugagagcaguucuccccagagacaugguguuuagaacaucaagccccaaggucguccuguaa

SEQ ID NO: 7809 - RNA, 1710 nt, Artificial Sequence
  derived and/or modified CDS sequence (wt) from LASV(ISTH0230-NIG-2011;Clade II)__AIT17421__NP
augagugcuuccaaggaagugaagucauuucucuggacacagucauugaggagggagcuuucaggcuauugcuccaacauaaaacuucaaguuguuaaggaugcucaggcucuucuucauggucuugacuuuucugaagucagcaaugugcagcgcuuaaugcgcaagcaaaaaagggaugauagugaucugaaacgucucagagauuugaaucaggcugucaacaaucuuguagaacucaaaucgacacaacaaaagaguaucuugagaguugggaccuugacuucagaugaccugcugacauuggcagcugacuuagagaaacuaaagucgaaggucauuagaacagaaaggccucuaagcucagguguuuacauggggaauuugagcacacagcagcuugagcagagaagagcauugcugaacaugauaggcaugguuaguggggcucagggcacccaaccuggaagagacggaguuguuagggugugggauguuaagaauccggaucuuuugaacaaccaguucggcaccaugccuagucugacauuagcaugucucaccaaacaaggucaaguugauuugaaugaugccgucuuagcacuaacagaccugggucuaauauacacagcuaaguacccaaauagcuccgaccuagauagacucucccaaagccauccuauacugaauaugguggacauuaagaaaagcucccugaacauuucugguuacaacuucagcuuaggagcugcagugaaggcuggagccugcaugcucgauggggggaacauguuggagaccaucaagguuacaccucagacaauggauggcaucuugaagucuauuuuaaaagugaaaagaucuuuggggauguuuguuucagauacaccuggugagagaaacccuuaugagaacauacuuuacaagaucugucuuuccggugacggcuggcccuacauagcuucaaggacuucuauuguggguagggcuugggagaauacuacuguggaucucgagucagauggaaaaccgcaaaaaaugggcucugcuggguccaacaaguccuuacagucagcgggauucccaacagggcugaccuauucucaguugaugacacuuaaagacucaaugaugcagcuugacccaagugccaaaaccuggauagacauugaaggucguccagaagacccuguggaaauagcucuuuaccaaccuaugucgggcuguuacauacacuucuucagagagccaacagacuuaaaacaguucaagcaggaugccaaauauucucaugggauugauguggcagaucuuuucccugcucaaccugguuugaccagcgcaguuauugaagcccucccucgcaauauggugcugaccugucaagguucagaugauauuaagagacucuuagacucccaaggaagaagggacauaaagcuuauugacauugcacugagcaaggcugacucuaggagauuugaaaaugcuguuugggaucaguguaaagaccuaugccauaugcauacuggagugguugucgaaaagaagaaaagaggaggcaaagaagaaauaacuccgcacugugcuuuaauggacugcauaauguaugaugcagcugugucaggagggcucaauauaccaguuuuaagagcaguucuucccagagacaugguguuuagaaccucaagccccaaggucguccuguaa

SEQ ID NO: 7810 - RNA, 1710 nt, Artificial Sequence
  derived and/or modified CDS sequence (wt) from LASV(ISTH0531-NIG-2011;Clade II)__AIT17425__NP
augagugcuucuaaggaaguaaagucauuccucuggacacagucauugagaagggaacuuucagguuauugcuccagcauaaagcuucaaguuguuaaagaugcucaggcucuccuucauggucuugacuuuucugaagucagcaaugugcagcgccuaaugcgcaaacaaaaaagggaugauagugaucugaaacgucucagagaucugaaucaggcugucaacaaucuuguggaacucaaaucaacacaacaaaagaguaucuugagaguugggaccuuaaccucagaugaccuguugacauuggcagcugacuuagagaaacuaaagucaaaggucauuagaacagaaagaccacugagcucagguguuuauauggggaauuugagcacacagcagcuugagcaaaggagagcacuauugaacaugauaggcaugguugguggggcucagggcacccaaccuggaagggacggaguuguuagggugugggauguuaaaaauccggaucuuuugaacaaccaguuuggcaccaugccuagucugacauuggcaugucucacuaaacaaggucaaguugauuugaaugaugccgucuuagcacuaacagaccugggucugauauauacagcuaaguacccaaauagcuccgaccuggacagacuuucccaaagucauccuauacugaacaugguggacacuaagaaaagcuccuugaacauuucugguuacaacuucagcuuaggagcugcagugaaagcuggagcuuguaugcuugauggggggaacauguuggagaccaucaagguuacaccucagacaauggauggcauccugaagucuauuuuaaagguaaaaaaauccuugggaauguuuguuucagauacaccuggggagaggaacccuuaugagaacauacuuuacaaaaucugucuuuccggugacggcuggcccuacauagcuucuaggacuuccauugugggcagagcuugggagaauaccaucguggaucucgagucagauggaaaaccacaaaaagugggcacugcugggucuaacaagucuuuacagucagcgggguuuccaacagggcugaccuauucucaguugaugacacuuaaagacucaaugaugcagcuugacccaagugccaaaaccuggauagacauugaaggucguccagaggacccuguggaaauagcucuuuaccaaccuaugucgggcuguuauauacacuucuucagagaaccaacagacuuaaaacaguucaaacaagaugccaaauauucucaugggauugauguagcagaucuuuucccugcucaaccuggcuugaccagugcagucauugaagcccuuccccgcaauauggugcugaccugucaagguucagaugauauuaagagacucuuggauucucaagggagaagggacauaaagcuuauugacauugcacugagcaaggcugacucuagaagauuugaaaaugcuguuugggaucagugcaaagaucuaugccauaugcacacuggaguggucgucgaaaagaagaaaagagggggcaaagaagaaauuaccccgcauugugcuuuaauggacuguauaauguaugaugcagcugugucaggaggacucaauauaccaguuuuaagagcaguucuccccagagauaugguguuuagaaccucaagccccaaggucguccuguaa

SEQ ID NO: 7811 - RNA, 1710 nt, Artificial Sequence
  derived and/or modified CDS sequence (wt) from LASV(ISTH0595-NIG-2011;Clade II)__AIT17429__NP
augagugcuucuaaggaagugaagucauuccucuggacacagucauugaggagggagcuuucagguuauugcuccaacauaaagcuucaaguuguuaaggaugcucaggcucuccuucauggucuugacuuuucugaagucagcaaugugcagcgcuuaaugcgcaaacaaaagagggaugauagugaucugaaacgucucagagauuugaaucaggcugucaacaaucuuguagaacucaagucgacacaacaaaagagcaucuugagaguugggaccuugaccucagaugaccugcugacauuggcagcugaccuggagaaacugaagucgaaggucauuagaacagaaaggccauuaagcucagguguuuauauggggaauuuaagugcacagcagcuugagcaaagaagagcauugcugaacaugauaggcaugguugguggggcucaggguacucaaccugggagagacggaguuguuagggugugggauguuaagaauccggaucuuuugaacaaucaguucggcaccaugccuagucugacacuagcaugucucaccaaacaaggucagguugauuugaaugaugcugucuuagcacuaacagaccuggguuuaauauacacagcuaaguauccaaauagcuccgauuuagacagacuuucccaaagccaucccauauugaauaugguggacacaaagaagagcuccuugaacauuucugguuacaacuucagcuuaggggcugcagugaaagcuggagcuuguaugcuugauggggggaacauguuggagaccauuaagguuacaccucagacaauggauggcaucuugaagucuauuuuaaagguuaaaagaucuuugggaauguuuguaucagaugcaccuggugagaggaacccuuacgagaauauacucuacaagaucugucuuuccggugacggcuggcccuauauagcuucaagaacuucuauuguggguagagcuugggagaacacuacuguggaucucgaaucagaugggaaaccacaaaaaguggguacugccggguccaacaaaucucuacagucagcgggguuuccaacagggcugaccuauucucaguuaaugacacuuaaagacucaaugaugcagcuugacccgagugccaaaaccuggauagacauugaaggucguccagaagacccuguggaaauagcucuuuaccaaccuaugucgggcuguuacauacacuucuucagagaaccaacagauuuaaaacaguucaaacaagaugccaaauauucucaugggauugauguggcagaucuuuucccugcucaaccugguuuaaccagugcagucauugaagcucucccucgcaauaugguauuaaccugucaagguucagaugauaucaagagacucuuggacucccaaggaaggagggacauaaagcuuauugacauugcacugagcaaggcugacucuaggagauuugaaaaugcuguuugggaucagugcaaagaucuaugucauaugcauacuggagugguugucgaaaagaagaaaagaggaggcaaagaagaaauuaccccacacugugcuuuaauggacugcauaauguaugaugcagcugugucaggaggacucaauauaccaguuuuaagagcaguucuuccuagggacaugguguuuagaaccucaagccccaaggucguccuguaa

SEQ ID NO: 7812 - RNA, 1710 nt, Artificial Sequence
  derived and/or modified CDS sequence (wt) from LASV(ISTH0964-NIG-2011;Clade II)__AIT17431__NP
augagugcuucuaaggaagugaagucauuucucuggacacagucauugaggagggagcuuucagguuauuguucuaacauaaaacuucaaguuguuaaggaugcucaggcucuccuucauggucuugacuuuucugaagucagcaaugugcagcgcuuaaugcgcaaacaaaaaagagacgauagugaucugaaacgucucagagauuugaaucaggcugucaacaaucuuguagaacucaaaucgacacaacaaaagaguaucuugagaguugggaccuugaccucagaugaccugcugacauuggcagcugacuuagagaaacuaaagucgaaggucauuagaacagagaggccacuaagcucagguguuuauauggggaauuugaguacacagcagcuugagcagagaagagcauugcugaacaugauaggcaugguugguggggcucagggcacccaaccuggaagagacggaguuguuagggugugggauguuaagaauccggaucuuuuaaauaaccaguucggcaccaugccuagucugacauuagcaugucuaaccaaacaaggucaaguugauuugaaugaugccgucuuagcacuaacagaccugggccuaauauacacagcuaaguacccaaauagcuccgaccuggacagacuuucccaaagccaucccauacugaauaugguggacacuaagaaaagcuccuugaauauuucugguuucaacuucagcuuaggagcugcagugaaagcuggggcuuguaugcuugauggagggaacauguuggagaccaucaagguuacaccucagacaauggauggcaucuugaagucuauuuuaaagguaaaaaagucuuugggaauguuuguuucagauacacccggugagaggaacccuuaugagaacauacuuuacaagaucugucuuucuggugacggcuggccuuacauagcuucaaggacuucuauuguggguagagcuugggagaauacuacuguggaucucgagucagaugggaaaccgcaaaaagugggcacugcuggguccaacaagucuuuacagucagcaggguucccaacagggcugaccuauucucaguugaugacacuuaaagacucaaugaugcagcuugacccaagugccaaaaccuggauagacauugaaggucgcccagaagacccuguggaaauagcucuuuaccaaccuaugucaggcuguuacauacacuucuucagagaaccaacagacuuaaaacaguucaagcaggaugccaaauauucucauggaauugauguggcagaucuuuucccugcucaaccugguuugaccagcgcagucauugaagcccucccucgcaauaugguacugaccugucaagguucagaugauauuaagagacucuuggauucccaaggaagaagggacauaaagcuuauugacauugcacugagcaaggcugauucuaggagauuugaaaaugcuguuugggaucagugcaaagaccuaugccauaugcauacuggagugguugucgaaaagaagaaaagaggaggcaaagaagaaauaaccccgcacugugcuuuaauggacugcauaauguaugaugcagcugugucaggaggacucaauauaccaguuuuaagagcaguucuccccagggacaugguguuuagaaccgcaagccccaaggucguccuguaa

SEQ ID NO: 7813 - RNA, 1710 nt, Artificial Sequence
  derived and/or modified CDS sequence (wt) from LASV(ISTH1038-NIG-2011;Clade II)__AIT17439__NP
augagugcuucuaaggaagugaagucuuuucucuggacacagucauugaggagggagcuuucagguuauugcuccagcauaaaacuucaaguuguuaaagaugcucaggcucuccuucauggucuugacuuuucugaagucagcaaugugcagcgcuuaaugcgcaaacagaagagggaugauagugaucugaaacgucucagagauuugaaucaggccgucaacaaucuuguagaacucaaaucgacacaacaaaagagcaucuugagaguugggaccuugacuucagaugaccugcugacauuggcagcugacuuagagaaacuaaagucgaaggucauuagaacagaaaggccacuaagcucagguguuuauaugggaaauuugaguacacagcagcuugagcaaagaagagcacugcugaacaugauaggcaugguugguggggcucagggcacccaaccuggaagagacggaguuguuagggugugggauguuaagaauccggaucuuuugaacaaucaguucggcaccaugccuagucugacauuagcaugucucaccaaacaaggucaaguugauuugaaugaugcugucuuagcacuaacagaccugggucuaauauacacagcuaaguauccaaauagcucugaccuagauagacuuucucaaagccauccuauucugaauaugguggauacuaagaagagcuccuugaauauuucugguuucaacuucaguuuaggagcugcagugaaagcuggagcuuguaugcuugauggggggaacauguuggagaccauuaagguuacaccucagacaauggauggcaucuuaaagucuauuuuaaaggugaagagaucuuugggaauguuuguuucagacacaccuggugagaggaacccuuacgagaacauacuuuacaagaucugucuuuccggugacggcuggcccuacauagcuucaaggacuuccauuguagguagagcuugggagaauacuacuguggaucucgagucagaugggaaaccacaaaaaauggguacugcuggguccaauaagucuuuacagucagcaggguuuccaacagggcugaccuauucucaguugaugacacuuaaagacucaaugaugcagcuugacccaagugccaaaaccuggauagacauugaaggucgaccagaagacccuguagaaauagcucuuuaccaaccugugucgggcuguuacauacacuucuucagagagccaacagauuuaaaacaguucaaacaagaugccaaauauucucaugggauugauguggcagaucuuuucucugcucaaccugguuugaccagugcagucauugaagcucucccucgcaauaugguacugaccugucaagguucagaugauauuaagagacucuuggacucccaaggaagaagggauauaaagcuuauugacauugcacugagcaaggcugacucuaggagauuugaaaaugcuguuugggaucagugcaaagauuuaugccauaugcauacuggagugguugucgaaaagaagaaaagaggaggcaaagaagaaauuacuccgcacugugccuuaauggacugcauaauguaugaugcagcugugucaggaggacucaauauaccaguuuuuagagcaguucuccccagagacaugguguuuagaaccucaagccccaaggucgucuuguaa

SEQ ID NO: 7814 - RNA, 1710 nt, Artificial Sequence
  derived and/or modified CDS sequence (wt) from LASV(ISTH1048-NIG-2011;Clade II)__AIT17443__NP
augagugcuuccaaggaaguaaagucauuccuuuggacacagucauugaggagggagcucucagguuacugcuccagcauaaagcuucagguuguuaaggaugcucaggcucuccuucauggucuugacuuuucugaagucagcaauguucagcgcuugaugcgcaaacaaaaaagggacgacagugaucugaaacgucucagagaucugaaccaggcugucaacaaucuuguagaacucaaaucaacacaacaaaagaguauccugagaguugggaccuugacuucagaugaccugcugacauuggcagcugacuuagagaaacuaaagucaaaggucaucagaacagaaaggccacuaagcucagguguuuacaugggaaauuugaguacacagcaacuugagcaaagaagagcauuacugaacaugauaggcaugguugguggggcucaggguacccaaccuggaagggacggaguuguuagggugugggaugucaagaauccggaucuuuugaacaaccaauucggcaccaugccuagucugacauuagcaugucucaccaaacaaggucaaguugauuuaaaugaugccgucuuagcacuaacagaccugggucuaauauacacagcuaaguacccaaacaguuccgaccuggacagacuuucccaaagccauccuauacugaauaugguggacacuaagaagagcuccuugaauauuucugguuacaacuucaguuuaggagcugcagugaaagcuggagccuguaugcuugauggggggaacauguuggagaccaucaagguuacaccucagacaauggauggcaucuugaaaucuaucuuaaagguaaaaagaucuuugggaauguuuguuucagaugcaccuggugagaggaacccuuaugagaacauacuuuacaagaucugucuuucuggggacgguuggcccuacauagcuucaagaacuuccauuguagguagagcuugggagaacaccacuguggaucucgagucagauggaaagccacaaaaggugggcacugcuggguccaacaagucuuuacagucagcaggguuuccaacaggguugaccuauucucaguugaugacacuuaaagacucaaugaugcaacuugacccaagugcuaaaaccuggauagacauugaaggucguccagaagacccuguggaaauagcucuuuaccaaccuaugucgggcuguuacauacacuucuucagagaaccaacagauuugaaacaguucaagcaagaugccaaauauucucaugggauugauguagcagaucuuuucccugcucaaccuggcuugaccagugcagucauugaagcccuuccucgcaauaugguacugaccugucaggguucagaugauauuaagaaacucuuagacucccaaggaagaagggacauaaagcuuauugacauugcacugagcaaggcugacucuaggagguuugagaaugcuguuugggaucaaugcaaggaucuaugccauaugcauacuggggugguuguugaaaagaagaaaagaggagguaaagaagaaauuaccccacacugugcucuaauggauugcauaauguaugaugcggcugugucaggaggacucaauauaccaguuuugagagcaguucuccccagagacaugguguucagaacaucaagccccaaggucguccuguaa

SEQ ID NO: 7815 - RNA, 1710 nt, Artificial Sequence
  derived and/or modified CDS sequence (wt) from LASV(ISTH1058-NIG-2011;Clade II)__AIT17447__NP
augagugcuuccaaggaagugaagucauuucucuggacacagucauugaggagggagcuuucagguuauugcuccaacauaaagcuucaaguugucaaggaugcucaagcucuccuucauggucuugacuuuucugaaguuagcaauguacagcgcuugaugcgcaaacaaaaaagagaugauagugaucugaaacgccucagagaucugaaucaggcugucaacaaucuuguagaacucaaaucaacacaacaaaagaguaucuugagaguugggaccuugaccucagaugaccugcugacacuggcagcugaccuagagaaacuaaaaucgaaggucauuagaacagaaaggccacuaagcucagguguuuauauggggaacuugaguacacagcaacuugagcaaagaagagcauugcugaacaugauaggcaugguugguggagcucagggcacccaaccuggaagagacggaguuguuagggugugggaugucaagaauccagaucuuuugaacaaccaguucggcaccaugcccagucugacauuagcaugucucacuaaacaaggucagguugauuugaaugaugccgucuuagcacuaacagaucugggucugauauacacagcuaaguaccccaauagcuccgaccuggacagacuuucccaaagccauccuauauugaauaugguggacaccaagaagagcuccuugaacauuucugguuacaacuuuagcuuaggagcugcggugaaagcuggagcuuguaugcuugauggggggaacauguuggagaccaucaagguuacaccucagacaauggauggcaucuugaaguccauuuuaaagguaaaaaaauccuugggaauguuuguuucagauacaccuggugaaaggaacccuuaugagaacauacuuuacaagaucugucuuuccggugacggcuggcccuacauagcuucaaggacuucuauuguggguagagcuugggagaauacuacuguagaucucgagucagauggaaaaccacaaaaagugggaacuacuggguccaacaagucuuuacagucagcgggguuuccaacagggcugacuuauucucaguugaugacacuuaaagacucaaugaugcagcuugacccaagugccaagaccuggauagacauugaaggucguccagaagacccuguggaaauagcucuuuaccagccuaugucgggcugcuauauacacuucuucagagaaccaacagauuuaaagcaguucaagcaagaugccaaauauucucaugggauugauguaacagaucuuuucccugcucagccuggauugaccagugcaguuauugaggcccucccucgcaauaugguacugaccugucaggguucagaugacauuaagcgacucuuggauucccaaggaagaagggacauaaagcuuauugacaucgcacugagcaaggcugauucuaggagauuugaaaaugcuguuugggaucagugcaaagaucuaugccacaugcacacuggagugguugucgaaaagaagaaaagaggagguaaagaagaaauuaccccacacugugcucuaauggacugcauaauguaugaugcagcugugucaggaggacucaauauaccgguuuuaagggcaguccuccccagagacaugguguuuagaaccucaagucccaaggucguccuguaa

SEQ ID NO: 7816 - RNA, 1710 nt, Artificial Sequence
  derived and/or modified CDS sequence (wt) from LASV(ISTH1064-NIG-2011;Clade II)__AIT17451__NP
augagugcuucuaaggaagugaagucauuccucuggacacagucauugaggagggagcuuucagguuacugcuccaacauaaaacuucaaguuguuaaggaugcucaggcucuccuucauggucuugacuuuucugaagucagcaaugugcagcgcuuaaugcgcaaacaaaaaagggaugacagugaucugaaacgucucagagauuugaaucaggcugucaacaaucuuguagaacucaaaucgacacaacaaaagaguaucuugagaguugggaccuugaccucagaugaccugcugacauuggcagcugacuuagagaaacuaaagucgaaggucauuagaacagaaaggccacuaagcucagguguuuauauggggaauuugagcacacagcagcuugagcagagaagagcauugcugaacaugauaggcaugguugguggggcucagggcacccaaccugggagagacggaguugugagggugugggauguuaagaauccagaccuuuugaacaaccaguucggcaccaugccuagucugacauuagcaugucucaccaaacaaggucaaguugauuugaaugaugccgucuuggcacuaacagaccugggucuaauauauacagcuaaguucccaaauagcucugaccuggauagacuuucccaaagccauccuauacugaauaugguggacacuaagaaaagcuccuuaaacauuucugguuacaacuucagcuuaggagcugcaguaaaagcuggagcuuguaugcuugauggggggaacauguuggagaccaucaagguuacaccucagacaauggauggcaucuugaagucuauuuuaaagguaaaaaaaucuuuggggauguuuguuucagauacaccuggugagaggaacccuuaugagaacauacuuuacaagaucugucuuuccggugacggcuggcccuacauagcuucaagaacuucuauuguggguagagcuugggagaauacuacuguggaucucgagucagauggaaaaccgcaaaaagugggcacuacuggguccaacaagucuuuacagucagcgggguucccaacagggcugaccuacucucaguugaugacacuuaaagacucaaugaugcagcuugacccaagugccaaaacuuggauagacauugaaggucguccagaagacccuguggaaauagcucuuuaccaaccuaugucaggcuguuauauacacuuuuucagagagccaacagacuuaaaacaguucaagcaagaugccaaauauucucaugggauugauguggcagaucuuuucccugcucaaccugguuugaccagcgcagucauugaagcccucccucgcaauauggugcugaccugccaagguucagaugauauuaagagacucuuggacucccaaggaaggagggauauaaaacuuauugacauugcacugagcaaggcugacucuaggagauuugaaaaugcuguuugggaucaaugcaaagaucuaugccauaugcacacuggagugguggucgaaaagaagaaaagagggggcaaagaggagaucaccccgcacugugcuuuaauggacugcauaauguaugaugcagcugugucaggaggacucaauauaccaguuuuaagagcaguucuccccagggacaugguguuuagaacuucaagccccaaggucguccuguaa

SEQ ID NO: 7817 - RNA, 1710 nt, Artificial Sequence
  derived and/or modified CDS sequence (wt) from LASV(ISTH1069-NIG-2011;Clade II)__AIT17455__NP
augagugcuucuaaggaagugaagucauuucucuggacacagucauugaggagggagcuuucagguuauugcuccagcauaaagcuucaaguuguuaaggaugcucaggcucuucuucauggucuugacuuuucugaagucagcaaugugcagcgcuuaaugcgcaagcaaaaaagagaugacagugaucuaaaacgucucagagaucugaaucaggcugucaacaaucuuguagaacucaaaucaacacaacagaagagugucuugagaguugggaccuugaccucagaugaucugcugacauuggcagccgacuuagagaaacuaaagucgaaggucauuagaacagaaaggccacuuagcucagguguuuauauggggaaccugagcacacagcagcuugagcaaagaagagcauugcugagcaugauaggcaugguugguggggcucagggcacccaaccuggaagagauggaguuguuagggugugggaugucaagaauccggaucuuuugaacaaccaauucggcaccaugccuagucugacauuagcaugccucaccaaacaaggucaaguugauuugaaugaugccgucuuagcacuaacagaccugggucuaauauauacagcuaaguacccaaauagcucugaucuggacagacuuucccaaagccauccuauacugaauaugguggacacuaagaagagcuccuugaacauuucugguuacaacuucagcuuaggggcugcagugaaagcuggagcuuguaugcuugaugggggaaacauguuggagaccaucaaggucacaccccagacuauggauggcauccugaagucaauuuugaaggugaaaagauccuugggaauguuuguuucagauacaccuggugaaaggaacccuuaugagaauauacuuuauaagaucugucucucuggugacgguuggcccuauauagcuucaaggacuucuauuguggguagagcuugggagaauacuacuguggaucucgagucagacgggaaaccacaaaaagugggcacugcugggucuaacaagucuuuacagucagcgggguuuccaacagggcugaccuauucucaguugaugacacuuaaagacucaaugaugcagcuugacccaagugccaaaaccuggauagacauugaaggucguccagaagacccuguggaaauagcucuuuaccaaccuaugucagguuguuacauacacuucuucagagaaccaacagacuuaaaacaguucaagcaggaugcuaaauacucucaugggauugauguagcagaucuuuucccugcucaaccugguuugaccagugcagucauugaagcccucccucgcaauauggugcugaccugucaagguucagaugauauuaagagacuccuggacucccaaggaaggagggacauaaaacucauugacauugcacugagcaaggcugacuccaggagauuugaaaaugcuguuugggaucagugcaaagaucuaugccauaugcauacuggagugguuguugaaaagaagaaaagaggaggcaaagaagaaauuaccccgcacugugcucugauggacugcauaauguaugaugcagcugugucaggaggacucaauauaccaguucugagagcaguucuccccagagacaugguguuuagaaccucaagccccaaggucguccuguaa

SEQ ID NO: 7818 - RNA, 1710 nt, Artificial Sequence
  derived and/or modified CDS sequence (wt) from LASV(ISTH1096-NIG-2012;Clade II)__AIT17459__NP
augagugcuucuaaggaagugaagucauuucucuggacacagucauugaggagggagcuuucagguuauugcuccagcauaaaacuucaaguuguuaaggaugcucaggcucuccuucauggucuugacuuuucugaggucagcaaugugcagcgcuuaaugcgcaaacaaaagagggaugauagugaucugaaacgucucagagauuugaaucaggcugucaacaaucuuguagaacucaaaucgacacaacaaaagagcaucuugagaguugggaccuugaccucggaugaccugcugacauuggcagccgaccuggaaaaacuaaagucgaaggucauuagaacagaaaggccacuaagcucagguguuuauauggggaauuugaguacacagcaacuugagcaaagaagagcauugcugaacaugauaggcaugguuggcggggcccaggguacccaaccuggaagggacggaguuguuagagugugggauguuaagaauccggaucuuuugaacaaucaguucggcaccaugccuagucugacauuagcaugucucaccaaacaaggccaaguugauuugaaugaugcugucuuagcacuaacagaucugggucuaauauacacagcuaaguauccaaauagcuccgaccuggacagacuuucccaaagccacccuauacugaauaugguggacacuaagaagagcucccugaacauuucuggcuacaacuucagcuuaggagcugcagugaaagcuggagcuuguaugcuugaugggggaaacauguuggagaccauuaagguuacaccucagacaauggauggcaucuugaagucuaucuuaaagguaaaaagaucuuugggaauguuuguuucagauacaccuggugagaggaacccuuacgaaaacauacuuuacaagaucugucuuucuggcgacggcuggcccuacauagcuucaaggacuucuauuguggguagagcuugggagaauacuacuguggaucucgagucagauggaaaaccacagaaaaugggcacugcuggguccaacaagucuuuacagucagcaggguuuccaacagggcugaccuauucucaguugaugacacuuaaagacucgaugaugcagcuugacccaagugccaaaaccuggauagacauugaaggucguccagaagacccuguggaaauagcucuuuaccaaccugugucuggcuguuacauacacuucuucagagaaccaacagauuuaaaacaguucaagcaagaugccaaguauucucaugggauugauguggcagaucuuuucccugcucaaccugguuugaccagugcagucauugaagcucucccucgcaauaugguacugaccugucaagguucagaugauauuaagagacucuuggauucccaaggaagaagggacauaaagcuuauugacauugcacugagcaaggcugauucuaggagauuugaaaaugcuguuugggaucagugcaaagaucuaugccauaugcauacuggggugguugucgaaaagaagaaaagaggaggcaaagaagaaauuaccccgcacugugcuuuaauggacugcauaauguaugaugcagcugugucaggaggacucaauauaccaguucuaagagcaguucuccccagagacaugguguuuagaaccucaagccccaaagucguccuguaa

SEQ ID NO: 7819 - RNA, 1710 nt, Artificial Sequence
  derived and/or modified CDS sequence (wt) from LASV(ISTH1107-NIG-2012;Clade II)__AIT17463__NP
augagugcuuccaaggaagugaagucauuccuuuggacacagucauugaggagggaacucucagguuacugcuccagcauaaagcuccaaguuguuaaggaugcucaggcucuccuucauggucuugacuuuucugaagucagcaaugugcaacgcuuaaugcgcaagcauaaaagggacgauagugaucugaaacgucucagagaccugaaucaggcugucaacaaucuuguagaacucaaaucaacacaacaaaagaguaucuugagaguugggaccuugaccucagaugaccuacugacauuggcagcugaccuagagaaacuaaaaucaaagguuaucagaacagaaaggccacuaagcucagguguauauauggggaaucugaguacacagcaacuugagcaaagaagagcauugcugaacaugauaggcaugguugguggggcucagagcacccaaccuggaagagacggaguugucagggugugggaugucaagaauccggaucuucugaacaaccaauucggcaccaugccuagucugacauuggcaugucucaccaaacaaggucaaguugauuuaaaugaugccguuuuagcacuaacagaccugggucuaauauacacagcuaaguauccaaacaguuccgaccuggacagacuuucucaaagccauccuauacugacuaugguggacacuaagaagagcuccuugaacauuucugguuuuaacuucagcuuaggagcugcagugaaagcuggggcuuguaugcuugauggggggaacauguuggagaccaucaaaguuacaccucagacaauggauggcaucuugaagucuauuuuaaaggugaagaaaucuuugggaauguuuguuucagauacaccuggugagaggaacccuuaugagaacauacucuacaagaucugccuuucuggugacggcuggcccuacauagccucaagaacuucuauuguggguagggcuugggagaauacuauuguggaccuugagacagacgggaagccacaaaaaguggguacugcuggguccagcagguccuuacagucagcaggguuuccaacaggauugaccuauucucaguugaugacacuuaaagacucaaugaugcagcuugacccaagugccaaaacuuggauagacauugagggucguccagaagacccuguggaaauagcucuuuaccaacccaugucgggcuguuacauacacuucuucagagaaccaacagacuuaaaacaguucaagcaggaugccaaauauucucaugggauugauguagcagaucuuuucccugcucaaccuggcuuaaccagugcugucauugaagcccuuccucgcaauauggugcugacuugucaaggcucagaugauauuaagaaacucuuagauucccaaggaagaagggacauaaagcuuauugacauugcacugagcaaggcugacucuaggagauuugaaaaugcuguuugggaucagugcaaagaucuaugccacaugcauacuggggugguugucgaaaagaagaagagagggggcaaagaagaaauuaccccacacugugcucuaauggacugcauaauguaugaugcagcugugucaggaggacuuaauauaccaguuuuaagagcaguucuccccagagacaugguguuuagaaccucaagccccaaggucguccuguaa

SEQ ID NO: 7820 - RNA, 1710 nt, Artificial Sequence
  derived and/or modified CDS sequence (wt) from LASV(ISTH1111-NIG-2011;Clade II)__AIT17467__NP
augagugcuucuaaggaagugaagucauuucucuggacacagucauuaaggagggagcuuucagguuauugcuccagcauaaagcuucaaguuguuaaagaugcucaggcucuccuucauggucuugacuuuucugaagucagcaaugugcagcguuugaugcgcaaacaaaaaagggaugauagugaucugaaacgucucagagaucugaaucaggcugucaacaaucuuguugaacucaaaucaacacaacaaaaaaguauccugagaguugggaccuugacuucagaugaccugcugacauuggcagccgacuuagagaaacuaaagucgaaggucauuaggacagaaaggccacugagcucagguguuuauauggggaauuugagcacacagcagcuugaacaaagaagagcauuguugaacaugauaggcaugguuggugggacucagggcacccaaccuggaagagacggaguuguuagggugugggauguuaagaauccagaucuuuugaacaaccaguucggcaccaugccuaguuugacauuagcaugucucaccaaacaaggucaaguugaucugaaugaugccguucuggcacuaacagauuugggucugauauacacagcuaaguauccaaauaguucugaccuagacagacuuucucaaagccauccuauacugaauaugguggacacuaagaagagcuccuugaacauuucugguuacaacuucagcuugggagcugcagugaaagcuggagcuuguaugcuugauggggggaacauguuggagaccaucaagguuacaccucagacaauggauggcaucuugaagucuauuuuaaaggugaaaaaauccuuaggaauguuugucucagacacaccuggugagaggaauccuuaugagaacauacuuuacaagaucugucuuuccggugacggcuggcccuacauagcuucaaggaccuccauuguggguagagcuugggagaauaccaccguggaucucgagucagauggaaagccacaaaaaguggguacagcuggguccaacaagucuuuacagucagcaggauucccaacagggcugaccuauucucaguugaugacacuuaaagacucaaugaugcagcuugacccaagugccaaaaccuggauagacauugaaggucguccagaagacccuguggaaauagcucuuuaccaaccuaugucgggcuguuacauacacuucuucagagaaccaacagacuuaaaacaguucaagcaagaugccaaauauucucaugggauugauguagcagaucuuuucccugcucaaccugguuugacuagugcagucaucgaagcccucccucgcaauaugguacugaccugucaagguucagaugauaucaagagacucuuagacucccaaggaagaagagacauaaagcuuauugacaucucacugagcaaggcugacucuaggagauuugaaaaugcuguuugggaucaaugcaaagaucuaugccauaugcauacuggagugguuguugaaaagaagaaaagaggaggcaaagaagaaauuaccccacacugugcuuuaauggacugcauaauguaugaugcagcugugucaggaggacucaauauaccagucuuaagagcaguucucccuagagacaugguguuuagaacaucaagccccaaggucguccuguaa

SEQ ID NO: 7821 - RNA, 1710 nt, Artificial Sequence
  derived and/or modified CDS sequence (wt) from LASV(ISTH1121-NIG-2012;Clade II)__AIT17471__NP
augagugcuuccaaggaagugaagucauuccuuuggacacagucauugaggagggagcucucaggcuacugcuccagcauaaagcuucaaguugucaaggacgcucaggcucuccuucauggucuugacuuuucugaagucagcaaugugcagcgcuuaaugcgcaaacaaaaaagagacgauagcgaucugaaacgucucagagaucugaaucaggcugucaacaaucuuguugaacuuaaaucaacacagcaaaagagcaucuugagaguugggacuuugacuucagaugaccugcugacacuggcagcugaccuagagaaacuaaagucgaaggucaucagaacagaaaggccacuaaguucagguguuuauauggggaauuugaguacacagcaacuugagcaaagaagagcacugcugaacaugauaggcaugguugguggggcccagggcacccaaccuggaagagacggaguuguuagggugugggaugucaagaauccagaucuuuugaacaaccaguuuggcaccaugcccagccuuacauuggcaugucuuaccaaacaaggucaaguugauuugaaugaugccgucuuggcacuaacagacuuaggucuaauauacacagccaaguauccaaacagcucugaccuggacagacucucccaaagucauccuauacugaacaugguggauacuaagaagagcucccugaacauuucugguuacaacuucaguuugggggcugcagugaaggcuggagcuuguaugcuugauggggggaacauguuggagaccauuaagguuacaccucagacaauggauggcaucuugaagucuauuuuaaaggugaaaagaucuuugggaauguuuguuucagauacaccuggugagaggaacccuuaugagaacauacuuuauaagaucugucuuucuggugacggcuggcccuacauagcuucaaggaccucuauuguagguagagcuugggaaaauacuacuguggaucucgagucagauggcaaaccacaaaaaauggguacuacuggauccaacaaaucccuacagucagcaggguuuccaacaggauugaccuauucucaguugaugacacuuaaggacucaaugaugcagcuugacccaagcgcuaaaaccuggauagacauugaaggucguccagaggacccuguagaaauagcucuuuaccaaccuaugucgggcuguuacauacacuucuucagagaaccaacagaccugaaacaauucaagcaagaugcuaaauauucucaugggauugauguagcagaucuuuucccugcucaaccuggcuugaccagugcaguuauugaagcccucccucgcaauauggugcugaccugucaagggucagaugacauuaagaaacucuuggauucucaagggagaagagacauaaagcuuaucgacauugcacuaagcaaagcugacuccaggaaauuugaaaauguuguuugggaucaaugcaaagaucuaugccacaugcauacuggaguaguugucgaaaagaagaaaagaggaggcaaagaagaaaucacaccacauugcgcucuaauggacugcauuauguaugaugcagcugugucaggaggacucaauauaccaguuuuaagagcaguucucccuagagacaugguguucagaaccucaagccccaaggucguccuguaa

SEQ ID NO: 7822 - RNA, 1710 nt, Artificial Sequence
  derived and/or modified CDS sequence (wt) from LASV(ISTH1129-NIG-2012;Clade II)__AIT17475__NP
augagugcuucuaaggaaguaaagucauuucucuggacacagucauugaggagggagcuuucagguuauugcuccaguauaaagcuucaaguugucaaggaugcucaggcucuccuucauggucuugacuuuucugaagucagcaaugugcagcgcuuaaugcgcaaacaaaagagagacgauagugaucugaaacgucucagggaucugaaucaggcugucaacaaucuuguagaacucaaaucaacacaacaaaagaguguuuugagaguugggaccuugaccucagaugaccugcugacauuggcagccgacuuagagaaacuaaagucgaaggucauaaggacagaaaggccacuuagcucagguguuuauauggggaauuugagugcacagcagcuugagcaaagaagagcauuacugagcaugauaggcaugguugguggggcucagggcacccaaccuggaagagauggaguuguuagggugugggauguuaaaaauccggaucuuuugaacaaccaguucggcaccaugccuagucugacauuagcaugucucaccaaacaaggucaaguugauuugaaugauacuguccuagcacugacagaucugggucuaauauacacagcuaaguacccaaauagcuccgaucuagacagacuuucccaaagccacccuauacugaauaugguggacaccaagaagagcuccuugaacauuucugguuacaacuucagcuuaggagcugcagugaaagcuggagcuuguaugcuugauggggggaauauguuggagaccauuaagguaacaccucagacaauggauggcaucuugaagucaauuuuaaagguuaaaagauccuuaggaauguuuguuucagauacacccggugaaaggaacccuuaugagaauauacuuuacaagaucugccuuucuggugacggcuggcccuauauagcuucaaggacuucuauuguggguagagcuugggagaauacuacuguggaucucgagucagaugggaaaccacaaaaagugggcacugcuggguccaacaagucuuugcagucagcgggauuuccaacagggcugaccuauucucaguugaugacacuuaaagacucaaugaugcagcuugacccaagugccaaaaccuggauagacauugaaggucguccagaagacccuguggaaauagcucuuuaccaaccuauaucgggcuguuacauacacuucuucagagaaccaacagacuuaaaacaguucaagcaggaugccaaauacucucacgggauugauguaacagaucuuuucccugcucaaccugguuugaccagugcagucauugaagcucucccucgcaauaugguacugaccugucaagguucagaugauauuaagagacucuuggacucccaaggaaggagggacauaaagaucauugacauugcacugagcaaggcugacuccaggagauuugaaaaugcuguuugggaucagugcaaagaucuaugccauaugcauacuggagugguugucgaaaagaagaaaagaggaggcaaagaagaaaucaccccgcacugugcuuuaauggacugcauaauguaugaugcagcugugucaggaggacucaauauaccaguuuuaagagcaguucuccccagagacaugguauuuagaaccucaagccccaaagucguccuguaa

SEQ ID NO: 7823 - RNA, 1710 nt, Artificial Sequence
  derived and/or modified CDS sequence (wt) from LASV(ISTH1137-NIG-2011;Clade II)__AIT17479__NP
augagugcuucuaaggaagugaagucauuucucuggacacagucauugaggagggagcuuucagguuauugcuccaauauaaaacuacaaguuguuaaggaugcucaggcucuccuucauggucuugauuuuucugaagucagcaaugugcagcgcuuaaugcgcaaacaaaaaagggaugauagugacuugaaacgucucagagauuugaaucaggcugucaacaaucuuguagaacucaaaucgacacaacaaaagagugucuugagaguugggacccugaccucagaugaccugcugacauuggcagcugacuuagagaaacuaaagucgaaggucauuagaacagaaaggccacuaagcucagguguuuauauggggaauuugaguacacagcagcuugagcagagaagggcauugcugaacaugauagguaugguugguggggcucagggcacccaaccuggaagagacggagucguuagggugugggauguuaagaauccggaccuuuugaacaaccaguucggcaccaugccuagucugacauuagcaugucucacuaaacaaggucaaguugauuugaaugaugccgucuuagcacugacagaccugggccugauauacacagcuaaguacccgaauagcuccgaccuggacagacuuucccaaagccacccuauacugaauaugguggacacuaagaagagcuccuugaacauuucugguuacaacuucagcuuaggggcugcagugaaagccggagcuuguaugcuugauggggggaacauguuggagaccaucaagguuacaccucagacaauggauggcaucuugaagucuauuuuaaaaguaaaaagaucuuugggaauguuuguuucagauacaccuggugagaggaacccuuaugagaauauacuuuacaagaucugucucuccggugacggcuggcccuacauagcuucaaggacuucuauugugggaagagcuugggagaauaccacuguggaucucgagucagauggaaaaccgcaaaaagugggcacugcuggguccaacaagucuuuacagucagcaggguuuccaacagggcugaccuauucucaauuaaugacacucaaagacucaaugaugcagcuugacccaagcgccaaaaccuggauagacaucgaaggucguccagaagacccuguggaaauagcucuuuaccaaccuaugucaggcuguuacauacacuucuucagagaaccaacagacuuaaaacaguucaagcaggaugccaaauauucucaugggauugauguggcagaucucuucccugcucagccugguuugaccagcgcagucauugaagcccucccucgcaauaugguacugaccugucaagguucagaugauaucaagaaacucuuggacucccaaggaagaaaggacauaaagcuuauugacauugcacugagcaagguugacucuaggagauuugaaaaugcuguuugggaucagugcaaagaucuaugccauaugcauacuggagugguugucgaaaagaagaaaagaggaggcaaagaggaaaucaccccgcacugugcucuaauggauugcauaauguaugaugcagcugugucaggaggacucaauauaccaguuuugagagcaguucuccccagggacaugguguuuagaaccucaagccccaaggucguccuguaa

SEQ ID NO: 7824 - RNA, 1710 nt, Artificial Sequence
  derived and/or modified CDS sequence (wt) from LASV(ISTH2010-NIG-2012;Clade II)__AIT17483__NP
augagugcuucuaaggaagugaagucauuucucuggacacagucuuugaggagggagcuuucagguuauugcuccaauauaaaacuucaaguuguuaaggaugcucaggcucuccuucauggucuugacuuuucugaagucagcaaugugcagcgcuuaaugcgcaaacaaaagagggaugauagugaucugaaacgucucagagauuugaaucaagcugucaacaaucuuguagaacuuaaaucgacacaacaaaagaguaucuugagaguuggaaccuugaccucagaugacuugcugacacuggcagcugacuuagagaaacugaagucgaaggucauuagaacagaaaggccacuaagcucagguguuuauauggggaauuugaguacacagcagcuugagcagagaagagcauugcugaacuugauaggcaugguugguggggcucagggcacccaaccuggaagagacggaguuguuaggguuugggauguuaaaaauccggaccuuuugaacaaccaguucggcaccaugccuagucugacauuggcaugucucaccaaacaaggucaaguugauuugaaugaugccgucuuagcacugacagaccugggccuaauauacacagccaaguacccaaauagcuccgaccuggacagacuuucucaaagccauccuauauugaauaugguggauacuaagaagagcuccuugaacauuucugguuucaacuucagcuuaggagcugcagugaaagcuggagccuguaugcuugauggggggaacauguuggagaccaucaagguuacaccucagacaauggaugguaucuugaagucuauuuuaaagguaaaaaaaucuuugggaauguuuguuucggacacaccuggugagaggaacccuuaugagaauauacuuuacaagaucugucuuuccggugacggauggccuuacauagcuucaaggacuucuauugugggaagggcuugggagaauaccacuguggaucucgagucagauggaaaaccgcauaaagugggcacugcuggguccaacaagucucugcagucagcgggguucccaacagggcugacuuauucucaguugaugacacuuaaagacucaaugaugcagcuugacccaagugccaaaaccuggauagacauugaaggucguccagaagacccuguggagauagcucuuuaccaaccuaugucagguuguuacauacacuucuucagagaaccaacagacuugaaacaguucaagcaagaugccaaauauucucaugggauugauguggcagaucuuuucccugcucaaccugguuugaccagcgcagucauugaagcccucccccgcaauauggugcuaaccugucaagguucagaugauauuaagagacuccuagacucccaaggaagaagggauauaaagcuuauugacauugcacugagcaaggcugacucuaggagauuugaaaaugcuguuugggaucagugcaaagaucuaugccauaugcacacuggagugguugucgaaaagaagaaaagaggaggcaaagaagaaaucaccccgcacugugcuuuaauggacugcauaauguaugaugcagcugugucaggaggacucaacauaccaguguugagggcaguucuccccagggacaugguguuuagaaccucaagucccaaggucguccuguaa

SEQ ID NO: 7825 - RNA, 1710 nt, Artificial Sequence
  derived and/or modified CDS sequence (wt) from LASV(ISTH2020-NIG-2012;Clade II)__AIT17491__NP
augagugcuucuaaggaagugaagucauuucucuggacacagucauugaggagggagcuuucagguuauugcuccaacauaaagcuucaaguuguuaaggaugcucaggcucuccuucauggucuugacuuuucugaaguuagcaaugugcagcgcuugaugcgcaaacaaaagagggaugauggugaucugaaacgucucagagaucugaaucaggcugucaacaaucuuguugaacucaaaucaacacaacaaaagagcgucuugagaguugggaccuugaccucagaugaccugcugacauuggcagcugacuuagagaaacuaaagucgaaggucaucagaacagaaaggccacuaagcucagguguuuauauggggaauuugaguacacagcaacuugagcaaagaagagcauugcuaagcaugauaggcaugguugguggggcucggggcacccagccuggaagagacggaguuguuaggguaugggauguuaagaauccagaucuuuugaacaaccaguucggcaccaugcccagucugacauuagcaugucucacuaaacagggucagguugauuugaaugaugucgucuuagcacuaacagaccugggucuaauauacacagcuaaguauccuaauagcuccgaccuggacagacuuucccaaagccauccuauauugaauaugguggacacuaagaagagcuccuugaauaucucugguuacaacuuuagcuuaggagcugcagugaaagcuggagcuuguaugcuugauggggggaacauguuggagaccaucaagguuacaccucagacaauggauggcaucuugaagucuauuuuaaagguaaaaaaauccuugggaauguuuguuucagauacaccuggugagaggaacccuuaugagaacauacuuuacaagaucugucuuucuggugacggcuggcccuacaucgcuucaaggacuucuauuguggguagagcuugggaaaauacuacuguagaucucgagucagauggaaaaccacagaaagugggagcugcuggguccaacaagucuuuacagucagcgggguuuccaacagggcugacuuauucucaguugaugacacuuaaagacucaaugaugcagcuugacccaagugccaaaaccuggauagacauugaaggucguccagaagacccuguggagauagcucuuuaccagccuaugucgggcugcuauauacacuucuucagagaaccaacagacuuaaaacaguucaagcaagaugccaaauacucucaugggauugauguaacagaucuuuucucugcucaaccuggauuaaccagugcagucauugaagcucucccucgcaauauggugcugaccugucaagguucagaugauauuaagcgacucuuggauucccaaggaagaagggacauaaagcuuauugauauugcacugagcaaggcugacucuaggagauuugaaaaugcuguuugggaucagugcaaagaucuaugccauaugcacacuggaguggucguugaaaagaagaaaagaggaggcaaagaagaaauuaccccacacugugcucuaauggacugcauaauguaugaugcagcugugucaggaggucucaauauaccagucuuaagagcaguccuccccagggacaugguguuuagaaccucaagccccaaggucguccuguaa

SEQ ID NO: 7826 - RNA, 1710 nt, Artificial Sequence
  derived and/or modified CDS sequence (wt) from LASV(ISTH2025-NIG-2012;Clade II)__AIT17495__NP
augagugcuuccaaggaaguaaagucguuccucuggacacagucauugaggagggagcucucagguuacugcuccaacauaaagcuucaaguuguuaaggaugcucaggcucuccuucauggucuugacuuuucugaagucaguaauguucagcgcuugaugcgcaaacaaaaaagggacgacagugaucuaaaacgucucagagaucugaaccaggcugucaacaaucuuguagaacucaaaucaacacaacagaagaguauccugagaguugggaccuugaccucagaugaccugcugacauuggcagcugacuuagagaaacuuaagucgaaggucaucagaacagaaaggccauuaagcucagguguuuacaugggaaaccugaguacacagcaacuugagcaaagaagagcauuacugaacaugauaggcaugguugguggggcucagagugcccaaccuggaagggacggaguuguuagggugugggaugucaagaauccggaucuuuugaacaaucaauucggcaccaugccuagucugacauuagcaugucucaccaaacaaggucaaguugauuuaaaugaugccgucuuagcacuaacagaccugggucuaauauacacagcuaaguacccaaacagcuccgaccuggacagacuuucccaaagccauccuauacugaauaugguggacacuaagaagagcuccuugaauauuucugguuucaacuucaguuuaggagcugcagugaaagcuggagccuguaugcuugauggggggaacauguuggagaccaucaagguuacaccucagacaauggauggcaucuugaaaucuaucuuaaagguaaaaagaucuuuggggauguuuguuucagaugcaccuggugagaggaacccuuaugagaacauacuuuacaagaucugucuuucuggggaugguuggcccuacauagcuucaagaacuuccauuguggguagagcuugggagaacaccacuguggaucucgagucagacggaaaaccacagaaggugggcacugcuggguccaacaaguccuuacagucagcaggguuuccaacagggcugaccuauucccaguugaugacacuuaaagacucaaugaugcaacuugacccaagugcuaaaaccuggauagacauugaaggucguccagaagacccuguggaaauagcucuuuaccaaccuaugucgggcuguuacauacacuucuucagagaaccaacagacuugaagcaguucaagcaagaugccaaauauucucaugggauugauguagcagaucuuuucccugcucaaccuggcuugaccagugcagucauugaagcccuuccucgcaauaugguacugaccugucaggguucagacgauauuaagaaacucuuagauucccaaggaagaagagacauaaagcuuauugacauugcacugagcaaggcugacucuaggagguuugagaaugcuguuugggaucagugcaaggaucuaugccauaugcacacuggggugguuguugaaaagaagaaaagaggaggcaaagaagaaauuaccccacacugugcucuaauggauugcauaauguaugaugcagcugugucaggaggacucaauauaccaguuuugagagcaguucuccccagagacaugguguuuagaacaucaagccccaaggucguccuguaa

SEQ ID NO: 7827 - RNA, 1710 nt, Artificial Sequence
  derived and/or modified CDS sequence (wt) from LASV(ISTH2031-NIG-2012;Clade II)__AIT17499__NP
augagugcuuccaaggaagugaagucauuccucuggacacagucauugaggagggagcuuucagguuauugcuccagcauaaaacuucaaguuguuaaggaugcucaggcucuccuucauggucuugacuuuucugaagucagcaaugugcaacgcuuaaugcgcaaacaaaaaagggaugauagugaucugaaacgucuuagagauuugaaucaggcugucaacaaucuuguagaacucaaaucgacacaacaaaagagcaucuugagaguugggaccuugaccucagaugaccuguugacguuggcagcugacuuagagaaacuaaagucgaaggucauuagaacagaaaggccacuaagcucagguguuuauauggggaauuugaguacacagcagcuugagcaaagaagagcauugcugaacauaauaggcaugguugguggggcucagggcacccaaccuggaagagacggaguuguaagggugugggauguuaagaacccggaucuucugaacaaccaguucggcaccaugccuagucugacauuagcaugucucacuaaacaaggucaaguugauuugaaugaugccgucuuagcacugacagacuugggucuaauauacacagcuaaguauccaaauagcuccgaccuggacagacuuucccaaagccauccuauacugaauaugguggacaccaagaagagcuccuugaacauuucugguuauaacuucaguuuaggagcugcagugaaagcuggagcuugcaugcuugauggggggaacauguuggagaccaucaagguuacaccucagacaauggauggcaucuugaagucuauuuuaaagguaaaaagaucuuuggggauguuuguuucagauacaccuggugagaggaacccuuacgagaacauacuuuauaagaucugucuuuccggugacggcuggccuuacauagcuucaaggacuucuauuguggguagagcuugggagaauaccacuguggaucucgagucagauggaaaaccacaaaaagugggugcugcuggguccaacaagucuuuacagucagcgggguuuccgacagggcugaccuauucucaguugaugacacuaaaagacucaaugaugcaacuugacccaagugcuaaaacauggauagacauugaaggucguccagaagacccuguggaaauagcucuuuaccaaccuaugucgggcuguuacauacacuucuucagagaaccaacagauuuaaaacaguucaagcaagaugccaaauauucucacgggauugauguggcagaucuuuucccugcucaaccugguuugaccagugcagucauugaagcccuuccccgcaauaugguacugaccugucaagguucagaugauguuaagagacucuuggacucucagggaaggagggacauaaagcuuauugacauugcacugagcaaggcugacucuaggagauuugaaaaugcuguuugggaucagugcaaggaucugugccauaugcauacuggagugguugucgaaaagaagaaaagaggagguaaagaagaaauuaccccgcacugugcuuuaauggacugcauaauguaugaugcagcugugucagggggacucaauauaccaguuuuaagagcaguucuccccagagacaugguguuuagaaccucaagccccaaggucguccuguaa

SEQ ID NO: 7828 - RNA, 1710 nt, Artificial Sequence
  derived and/or modified CDS sequence (wt) from LASV(ISTH2037-NIG-2012;Clade II)__AIT17503__NP
augagcucuucuaaggaagugaagucauuucucuggacacaaucauugaggagggagcuuucagguuauugcuccagcauaaagcuucagguugucaaagaugcucaggcucuccuucauggucuugacuuuucugaagucagcaaugugcagcgcuugaugcguaaacagaaaagggaugauagugaucugaaacgucucagagaucugaaucaggcugucaacaaucuuguagaacucaaaucaacacaacaaaagagcauccugagaguugggaccuugaccucagaugaccugcugacauuggcagccgacuuggagaaacuaaagucgaagguuauuagaacagagaggccacuaagcucagguguuuauauggggaacuugagugcgcagcagcuugagcaaagaagagcauuacugaacaugauaggcaugguuggcggugcucagggcacccaaccuggaagagacggaguuguuagagugugggauguuaagaauccggaucuuuugaacaaccaguucggcaccaugccuagucugacauuagcaugucucaccaaacaaggucaaguugauuugaaugaugccgucuuagcacuaacagaccuggguuuaauauacacagcuaaguacccaaauagcucugaccuggauagacuuucccaaagccauccuauacugaauaugguggacacuaagaagagcucuuugaacauuucugguuacaacuucagcuugggagcugcaguuaaggcuggagcuuguaugcuugauggggggaacauguuggagaccaucaagguuacaccucagacaauggauggcaucuugaagucuauuuuaaagguaaaaaaauccuugggaauguuuguuucagauacaccuggugagaggaacccuuaugagaauauacuuuacaagaucugucuuuccggugacggcuggcccuacauagcuucaagaaccucuauuguggguagagcuugggaaaauacuaccguagaucucgagucagaugggaaaccacaaaaagugggcacugcuggguccaacaagucuuuacagucagcgggguuuccaacagggcugaccuauucucaguugaugacacuuaaagacucgaugaugcagcuugauccaagugccaaaaccuggauagacaucgaaggucguccagaagacccuguagaaauagcucuuuaccaaccuaugucgggcuguuacauacacuucuucagagagccaacagacuuaaaacaguucaagcaagaugccaaauauucucaugggauugauguagcagaucuuuucccugcucaaccugguuuaaccagugcaguuauugaagcccucccucgcaacaugguacuaaccugucaagguucagaugauauuaagagacuccuggacucccaagggagaagggacauaaagcucauugacauugcacugagcaaggcugacucuaggagauucgaaaaugcuguuugggaucagugcaaagaucuaugccauaugcauacuggaguuguugucgaaaagaagaaaagaggaggcaaagaagagauuaccccgcacugugcuuuaauggacugcauaauguaugaugcagcugugucaggaggacucaauauaccaguuuuaagggcaguucuccccagagacaugguguuuagaaccucaagccccaaagucguccuguaa

SEQ ID NO: 7829 - RNA, 1710 nt, Artificial Sequence
  derived and/or modified CDS sequence (wt) from LASV(ISTH2042-NIG-2012;Clade II)__AIT17507__NP
augagugcuucuaaggaagugaagucauuucucuggacacagucuuugaggagggagcuuucagguuauugcuccaauauaaaacuucaaguuguuaaggaugcucaggcccuccuucauggucuugacuuuuccgaagucagcaaugugcagcgcuuaaugcgcaaacaaaagagggaugauagugaucuaaaacgucucagagauuugaaucaggcugucaacaaucuuguagaacuuaaaucgacacaacaaaagaguaucuugagaguugggaccuugaccucagaugaccugcugacauuggcagcugacuuagagaaacuaaagucgaaggucauuagaacagaaaggccacuaagcucagguguuuauauggggaauuugaguacacagcagcuugagcagagaagagcauugcugaacuugauaggcaugguugguggggcucagggcacccaaccuggaagagacggaguuguuaggguuugggauguuaagaauccagaccuuuugaacaaccaguucggcaccaugccuagucugacauuggcaugucucaccaaacaaggucaaguugauuugaaugaugcugucuuagcacugacagaccugggccuaauauacacagccaaguacccaaauagcuccgaccuggacagacuuucccaaagccauccuauauugaauaugguggacacuaagaagagcuccuugaacauuucugguuucaacuucagcuuaggagcugcagugaaagcuggagcuuguaugcuugauggggggaacauguuggagaccaucaagguuacaccucagacaauagauggcaucuugaagucuauuuuaaagguaaaaaaaucuuugggaauguuuguuucggacacaccuggugagaggaacccuuaugagaauauacuuuacaagaucugucuuuccggugacggauggcccuacauagcuucaaggacuuccauuguggguagagcuugggagaauaccacuguggaucucgagucagauggaaaaccgcauaaaguggguacugcuggguccaacaagucuuuacagucagcgggguucccaacagggcugacuuauucucaauugaugacacuuaaagacucaaugaugcagcuugacccaagugccaaaaccuggauagacauugaaggucguccagaagacccuguggagauagcccuuuaccaaccuaugucaggcuguuacauacacuucuucagagaaccaacagacuugaaacaguucaagcaagaugccaaguauucucaugggauugauguggcagaucuuuucccugcucaaccugguuugaccagcgcagucauugaagcccucccucgcaauauggugcuaaccugucaagguucagaugauauuaagagacucuuagacucccaaggaagaagggauauaaagcuuauugacauugcacugagcaagguugacucuaggagauuugaaaaugcuguuugggaucagugcaaagaucuaugccauaugcacacuggaguaguugucgagaagaagaaaagaggaggcaaagaagagaucaccccgcacugugcuuugauggacugcauaauguaugaugcagcugugucaggaggacucaauauaccaguuuuaagggcaguucuccccagggacaugguguuuagaaccucaagucccaaggucguccuguaa

SEQ ID NO: 7830 - RNA, 1710 nt, Artificial Sequence
  derived and/or modified CDS sequence (wt) from LASV(ISTH2046-NIG-2012;Clade II)__AIT17511__NP
augagugcuucuaaggaagugaagucauuucucuggacacagucauugaggagggagcuuucagguuauugcuccaacauaaagcuucaaguuguuaaggaugcucaggcucuccuucauggucuugacuuuucugaaguuagcaaugugcagcgcuugaugcgcaaacaaaagagggaugauggugaucugaaacgucucagagaucugaaucaggcugucaacaaucuuguagaacucaaaucaacacaacaaaagaguaucuugagaguugggacuuugaccucagaugaccugcugacauuggcagcugacuuagagaaacuaaagucgaaggucaucagaacagaaaggccacuaagcucagguguuuauauggggaaucugaguacacagcaacuugagcaaagaagggcauugcugaacaugauaggcaugguugguggggcucagggcacccaaccuggaagagacggaguuguuagggugugggauguuaagaauccagaucuuuugaacaaccaauucggcaccaugcccaguuugacauuagcaugucucacuaaacagggucagguugauuugaaugaugcugucuuagcacuaacagaccugggucuaauauacacagcuaaguauccuaauagcucugaccuggacagacuuucccaaagccauccuauauugaauaugguggacacuaagaagagcucuuugaacaucucugguuacaacuuuaguuuaggagcugcagugaaagcuggagcuuguaugcuugauggggggaacauguuggaaaccaucaagguuacaccucagacaauagauggcaucuuaaagucuauuuugaagguaaaaaaauccuugggaauguuuguuucagauacaccuggugaaaggaacccuuaugagaacauacuuuacaagaucugucuuuccggugacggcuggccuuacaucgcuucaaggacuucuauuguggguagagcuugggagaauacuacuguagaucuugagucagauggaaaaccacaaaaagugggaacugcuggauccaacaagucuuuacagucagcgggguuuccaacagggcugacuuauucucaguugaugacacuuaaagacucaaugaugcaacuugacccaagugccaaaaccuggauagacauugaaggucguccagaagacccuguggagauagcucuuuaccagccuaugucgggcugcuauauacacuucuucagagaaccaacagacuuaaaacaguucaagcaagaugccaaauauucucaugggauugauguaacagaucuuuucucugcucaaccuggauuaaccagugcagucauugaagcucucccucgcaauaugguacugaccugucaagggucagaugauauuaagcgacucuuggauucccaaggaagaagggacauaaagcuuauugacauugcacugagcaaggcugacucuaggagauuugaaaaugcuguuugggaucagugcaaagaucuaugccauaugcacacuggaguggucgucgaaaagaagaaaagaggaggcaaagaagaaauuaccccacacugugcucuaauggacugcauaauguaugaugcagcugugucaggaggucucaauauaccaguucugagggcaguccuccccagggacaugguguuuagaaccucaagccccaaggucguccuguaa

SEQ ID NO: 7831 - RNA, 1710 nt, Artificial Sequence
  derived and/or modified CDS sequence (wt) from LASV(ISTH2050-NIG-2012;Clade II)__AIT17515__NP
augagugcuuccaaggaagugaagucauuucucuggacacagucauugaggagggagcuuucagguuauugcucuagcauaaaacuucaaguuguuaaggaugcucaggcucuccuucauggucuugacuuuucugaagucagcaaugugcagcgcuuaaugcgcaaacaaaagagggaugauagugaucugaaacgucuuagagauuugaaucaggcugucaacaaucuuguagaacucaaaucgacacaacagaagagcaucuuaagaguugggacuuugaccucagaugaccugcuaacauuagcagcugacuuagagaaacuaaagucgaaggucauuagaacagaaaggccacuaagcucaggugucuauauggggaauuugaguacacagcagcuugagcagagaagagcauugcugaacaugauaggcaugguugguggggcucagggcacccaaccuggaagagacggaguuguuagggugugggauguuaagaauccggaucuuuugaacaaccaguucggcacuaugccuagucugacauuggcaugucucaccaaacaaggucaaguugauuuaaaugaugccgucuuagcacuaacagaccugggucuaauauacacagcuaaguauccaaauagcuccgaccuggauagacuuucccaaagccauccuauacugaauaugguggauacuaagaagagcuccuugaauauuucugguuacaacuucaguuugggagcugcggugaaagccggagcuuguaugcuugauggggggaacauguuggagaccaucaagguuacaccucagacaauggauggcaucuugaagucuauucuaaaggugaaaagauccuugggaauguuuguuucagauacaccuggugagaggaaccccuaugagaacauacuuuacaagaucugucuuuccggugacggcuggcccuacauagcuucaaggacuucuauuguggguagagcuugggagaauacuacuguggaucucgagucagauggaaaaccacaaaaagugggugcugcuggguccagcaaaucuuuacagucagcgggguuuccaacaggguugaccuauucucaguugaugacacuuaaagacucaaugaugcagcuugacccaagugccaaaaccuggauagacauugaaggucguccagaagauccuguggaaauagcucuuuaccaaccugugucgggcuguuauauacacuucuucagagagccaacagauuuaaaacaguucaagcaagaugccaaguauucucacgggauugauguggcagaucuuuucccugcucaaccugguuuaaccagugcaguuauugaggcccucccucgcaauauggugcugaccugucaagguucagaugauauuaagagacucuuagacucccaaggaagaagggacauaaagcuuauugacauugcacugagcaaggcugacuccaggagauuugagaaugcuguuugggaucagugcaaagaucuaugccauaugcauacuggagugguugucgaaaagaagaagagagggggcaaagaagaaauuaccccgcacugugcuuuaauggacugcauaauguaugaugcagcugugucaggaggacucaauauaccaguuuuaagagcaguucucccuagagauaugguguuuagaaccucaagccccaaggucguccuguaa

SEQ ID NO: 7832 - RNA, 1710 nt, Artificial Sequence
  derived and/or modified CDS sequence (wt) from LASV(ISTH2057-NIG-2012;Clade II)__AIT17519__NP
augagugcuucuaaggaagugaagucauuucucuggacacagucauugaggagggagcucucagguuauugcuccaacauaaaacuucaaguugucaaagaugcucaagcucuccuucauggucuugacuuuucugaagucagcaaugugcagcgcuuaaugcgcaaacagaagagggaugauagugaucugaaacgucucagagauuugaaucaggccgucaacaaucuuguagaacucaaaucgacacaacaaaagagcaucuugagaguugggaccuugaccucagaugaccuacugacacuggcagcugacuuagagaaacuaaagucgaaggugauuaggacagaaaggccacuaagcucagguguuuacauggggaauuugagugcacagcagcuugagcaaagaagagcacugcugaacaugauaggcauggucgguggggcucagggcacccaaccuggaagagauggaguuguuagggugugggauguuaagaauccggaucuuuugaacaaucaguucggcaccaugcccagucugacauuagcaugccuuacuaaacaaggucaaguugauuugaaugaugcuguccuagcacuaacagaccugggucuaauauacacagccaaguauccaaacagcuccgaccuagacaggcuuucccaaagccauccuauacugaauaugguggacacuaagaagagcuccuugaauauuucugguuucaacuucagcuuaggagcugcagugaaagcuggagcuugcaugcuugauggggggaacauguuggagaccauuaagguuacaccucagacaauggauggcaucuuaaagucuauuuuaaaggugaaaagaucuuugggaauguuuguuucagauacaccuggugagaggaacccuuacgagaacauacuuuacaagaucugucuuuccggugacggcuggcccuacauagcuucaaggacuuccauuguggguagagcuugggagaauacuacuguggaucucgagucagauggaaaaccacagaaaguggguacugcuggguccaauaagucuuuacagucagcaggguuuccaacagggcugaccuauucucaguugaugacacuuaaagacucaaugaugcagcuugacccaagugccaaaaccuggauagacauugaaggucgaccagaagacccuguggaaauagcucuuuaccaaccuaugucggguuguuacauacacuucuucagagagccaacagauuuaaaacaguucaagcaagaugccaaauauucucacgggauugauguggcagaucuuuucccugcucaaccugguuugacuagugcagucauugaagcccucccucgcaauaugguacugaccugccaagguucagaugacaucaaaagacuccuggacucccaaggaagaagggacauaaagcuuauugacauugcacugagcaaggcugacucuaggagauuugaaaacgcuguuugggaucagugcaaagauuuaugccauaugcauacuggugugguugucgaaaagaagaaaaggggaggcaaagaagaaauuaccccgcacugugcuuuaauggacugcauaauguaugaugcagcugugucaggaggacucaauauaccaguuuuaagagcaguucuccccagagacaugguguuuagaaccucaagccccaaggucguccuguaa

SEQ ID NO: 7833 - RNA, 1710 nt, Artificial Sequence
  derived and/or modified CDS sequence (wt) from LASV(ISTH2064-NIG-2012;Clade II)__AIT17525__NP
augagugcuucuaaggaaguaaagucauuucucuggacacagucauugaggagggagcuuucagguuauugcuccagcauaaaacuucagguuguuaaggaugcucaggcucuccuucauggucuugacuuuucugaagucagcaaugugcagcgcuuaaugcgcaaacaaaggagggaugauagugaucugaaacgucucagagauuugaaucaggcugucaacaaucuuguagaacucaaaucgacacaacaaaagagcaucuugagaguugggaccuugaccucggaugaccugcugacauuggcagccgaucuagaaaaacuaaagucgaaggucauuagaacagaaaggccacuaaguucagguguuuauauggggaauuugagcacgcagcagcuugagcaaagaagagcacugcugaacaugauaggcaugguugguggggcccagggcacccaaccuggaagggacggaguuguuagagugugggauguuaagaauccggaucuuuugaacaaucaguucggcaccaugccuagucugacauuagcaugucucaccaaacaaggccaaguugauuugaaugaugcugucuuagcacuaacagaucugggucuaauauacacagcuaaguauccaaauagcuccgaccuggacagacuuucccaaagccauccuauacugaacaugguggacaccaagaagagcuccuugaacauuucuggcuacaacuucagcuuaggagcugcagugaaagcuggagcuuguaugcuugaugggggaaacauguuggagaccauuaaggucacaccucagacaguggauggcaucuugaagucuauuuuaaagguaaaaagaucuuugggaauguuuguuucagauacaccuggugagaggaacccuuacgagaacauacuuuacaagaucugucuuucuggcgacggcuggcccuacauagcuucaaggaccucuauuguggguagagcuugggagaauacuacuguggaucucgagucagauggaaaaccacagaaaguggguacugcuggguccaacaagucuuuacagucagcgggguuuccaacagggcugaccuauucucaguugaugacacuuaaagacucgaugaugcagcuugacccaagugccaaaaccuggauagacauugagggucguccagaagacccuguggaaauugcucuuuaccaaccuaugucuggcuguuacauacacuucuucagagaaccaacagauuuaaaacaguucaagcaagaugccaaauauucucaugggauugauguggcagaucuuuucccuacucaaccugguuugaccagugcagucauugaagcucucccucgcaacaugguacugaccugucaagguucagaugauauuaagagacucuuggacucccaaggaagaagggacauaaagcuuauugacauugcacugagcaaggcugauuccaggaaauuugaaaaugcuguuugggaucagugcaaagaucuaugccauaugcauacuggagugguugucgaaaagaagaaaagaggagguaaagaagaaaucaccccgcacugugcuuuaauggacugcauaauguaugaugcagcugugucaggaggacucaacauaccaguucuaagagcaguucuccccagagacaugguguuuagaaccucaagccccaaagucguccuguaa

SEQ ID NO: 7834 - RNA, 1710 nt, Artificial Sequence
  derived and/or modified CDS sequence (wt) from LASV(ISTH2065-NIG-2012;Clade II)__AIT17529__NP
augagugcuuccaaagaagugaaaucauuccuuuggacacaaucacugaggagagagcuuucagguuacugcuccaacauaaagcuucaaguugucaaggaugcccaagcccuccuucacggccuugacuucucugaagucaacaauguccaacgccuaaugcgcaaacaaaagagagaugacagcgauuuaaaacgccuuagagaccugaaucaggcagucaacaaccuuguugaacucaaaucaacacaacaaaagagcauccugagaguuggaacacugaccucagaugacuugcugacauuggcagcugacuuagaaaaacugaagucaaaagucaucagaacagagagaccacugaguucggguguauacauggggaacuuaaguacacagcagcucgagcagagaagggcauugcuuaacaugauuggcauggcugguggaacucagggcacccaaccugggagagaugggguuguuagggugugggaugucaaaaauccagaucucuuaaacaaucaauucggcaccaugcccagucugacauuggcaugucucacuaaacaaggucaaguugaccuaaaugaugcuguccuagcacugacggauuugggacugauauacacagcuaaguacccaaacagcucugaccuagacagacuuucccaaagucauccaauacuaaacaugguggacacuaagaagagcucccugaauauuucugguuacaauuuuagcuugggggcugcaguaaaagcuggggccuguaugcuugaugggggcaacauguuggaaaccauuaaaguuacgccucagacaauggauggcaucuugaagucuauuuuaaaggugaaaagaucccugggaauguuugucucagauacaccuggugagaggaacccuuaugagaacauacuuuauaagaucugucuuucuggugauggcuggcccuacauagccucaagaaccucuauugugggcagggcuugggagaacacuacuguggaucuagagucagauggaaaaccacaaaaagugggaacugcuggguccaauaagucuuugcagucugcaggauuuccaacaggguugacuuauucacagcugaugacucuaaaagacucaaugaugcagcuugacccaagugcuaaaaccuggauagacauugaaggucguccagaagacccuguggagauagcucuuuaucaaccuaugucaggcuguuacauacauuucuuuagagaaccaacagauuuaaaacaguucaagcaagacgccaaguauucucaugggauugauguggcagaucuuuucccugcucaaccugguuuaaccagugcagucauugaggcccuuccucgcaacaugguguugacuugccaagguucagaugauaucaagaaacuccuggacucucaaggaagaagggacauaaaacucauugauauuucauuaaguaagauugacucuagaaaguuugaaaaugcuguuugggaccagugcaaagacuugugccauaugcacacuggaguaguuguugagaagaagaaaagaggaggcaaagaagaaaucaccccacauugugcuuugauggauugcauaauguuugaugcagcagugucaggagggcucaacauaccaguucugagagcuguccuucccagagacaugguuuuuagaaccucaagccccaaggucguccuguaa

SEQ ID NO: 7835 - RNA, 1710 nt, Artificial Sequence
  derived and/or modified CDS sequence (wt) from LASV(ISTH2094-NIG-2012;Clade II)__AIT17539__NP
augagugcuuccaaggaagugaaaucauuccuuuggacacagucacuaaggagagagcuuucaggcuauugcucuaauauaaaacuccaggugguuaaggaugcacaggcccuucugcauggccucgauuucucugaggucagcaauguccagcgcuugaugcgcaaacagaaaagagaugacggugaccuaaaacgucuuagagaccuaaaucaggcaguuaacaaucuuguugagcucaagucaacacaacaaaagaguguucuaagaguuggaacacugaccucagacgacuugcugauuuuagcagcugaucuagagaaauugaagucaaaggucauuaggacagagaggccauugaguucugguguguauaugggaaacuugagcacacaacaacuugagcagaggaaggcguuauugaguaugauaggcauggucgguggugcucagggaacccaaccuggaagggacggaguugucagggugugggauguaaaaaacccggaccuccucaacaaccaauuuggcaccaugccuaguuuaacacuagcaugucucacuaaacagggucagguugacuuaaaugacgccguucuggcgcuaacagacuugggguuaauauacacagcuaaauaccccaauaguucugaccuagauagacuuucccagagccaucccauauuaaacaugguagacaccaagaagagcucccuaaauauuucuggcuauaauuuuaguuugggagcugcagugaaggcuggagcuugcaugcucgauggggguaacauguuggaaacuauuaaggugacgccucagacaauggauggcauucugaaguccauucuaaaggugaaaaggucccugggaauguuuguuucagacacaccuggugaaagaaacccuuaugaaaacauacuuuacaaaauuugucucucuggggacggcuggcccuacauagcuucaagaaccuccauuguggguagagcuugggagaauaccacuguggaccuugagucagaugggaaaccacagaaaguggguucugcuggauccaacaaaucucugcaaucugcaggguucccaacagggcuaacuuauucucaacugaugacacucaaagauucaaugaugcaacuugacccaagcgccaaaaccuggauagacaucgagggucguccagaagacccuguugagauagcucuuuaccaaccuaugucaggcuguuauauacauuucuucagagaaccaacagauuuaaaacaguucaaacaagaugccaaauauucucaugggauugaugugacagaucucuuuucugcucagccuggucuaaccagugcagucauugaggcucucccccgcaacaugguguuaacgugucaagguucagacgacauuaaaaaacucuuagauucucaggggagaagggacaucaagcucaucgauaucucauuagguaaggcugauucuaggagauuugaaaaugcugucugggaccagugcaaagauuugugucacaugcacaccggaguggucguugagaaaaagaagagaggaggcaaagaggagaucacuccacacugugcuuuaauggauugcauaauguuugacgcagcugugucaggaggacuuaauauaccaaucuugagggcuguucucccaagagacaugguguucagaacuucaagucccaaagucguccuguaa

SEQ ID NO: 7836 - RNA, 1710 nt, Artificial Sequence
  derived and/or modified CDS sequence (wt) from LASV(ISTH2129-NIG-2012;Clade II)__AIT17545__NP
augagugcuucuaaggaagugaagucauuucucuggacacagucauugaggagggagcuuucagguuacuguuccaacauaaaacuucaaguuguuaaggaugcucaggcucuccuucauggucuugacuuuucugaagucaguaaugugcagcgcuuaaugcgcaaacaaaaaagggaugauagugaucugaaacgucucagagaucuaaaucaagcugucaacaaucuuguagaacucaaaucgacacaacaaaagagugucuugagaguugggacucugaccucagaugaccugcugacauuggcagcugacuuagagaaacuaaagucgaaggucauuagaacagagagaccacuaagcucagguguuuauauggggaauuugaguacacagcagcuugagcaaagaagagcauugcugaacaugauaggcaugguugguggggcucagggcacccaaccuggaagagacggaguuguuagggugugggauguuaagaauccggaucucuugaacaaccaguucggcaccaugccuagucugacauuagcaugucucaccaaacaaggucaagucgauuugaacgaugcugucuuagcacuaacagaccugggcuuaauauacacagcuaaguacccaaauagcucugaccuggacagacuuucucaaagccaucccauacugaauaugguggacacuaagaaaaguucccugaacauuucugguuacaacuucagcuuaggagcugcagugaaagcuggggcuugcaugcuugauggggggaacauguuggaaaccaucaagguuacaccucaaacaauggauggcaucuugaagucuauuuuaaagguaaaaaaaucuuugggaauguuugucucagacacaccuggugagaggaauccuuaugaaaacauacuuuacaagaucugucuuuccggugauggcuggccuuacauagcuucaaggacuucuauuguggguagggcuugggaaaauacuacuguggaucuugagucagaugggaaaccacaaaaagugggcauugcuggguccaacaagucuuuacagucagcaggguuuccaacagggcuaaccuacucucaguugaugacacucaaagauucaaugaugcagcuugacccaagugccaaaaccuggauagacauugagggucguccagaagacccuguggaaauagcucuuuaucaacccaugucgggcuguuacauacacuucuuuagagaaccaacagacuuaaaacaguucaagcaagaugcuaaauauucucaugggauugauguggcagaucuuuucucugcucaaccugguuugaccagugcagucaucgaagcccuuccucgcaauaugguacugaccugucaagguucagaugauauuaagagacucuuggacucccaaggaagaagggacauaaaacuuauugacauugcacugagcaaggcugacucuagaaaauuugaaaaugcuguuugggaucagugcaaagaucuaugccacaugcauacuggagugguugucgaaaagaagaaaagaggaggcaaagaagaaauuaccccgcacugugcuuuaauggauugcauaauguaugaugcagcuguguccggaggacucgauauaccaguuuuaagagcaguucuccccagggacaugguguuuagaaccucaagccccaaggucguccuguaa

SEQ ID NO: 7837 - RNA, 1710 nt, Artificial Sequence
  derived and/or modified CDS sequence (wt) from LASV(ISTH2217-NIG-2012;Clade II)__AIT17549__NP
augagugcuucuaaggaggugaagucauuucucuggacacagucauugaggagggagcucucagguuauugcuccaacauaaaacuucaaguuguuaaggaugcucaggcucuccuucauggucuugauuuuucugaagucagcaaugugcagcguuuaaugcgcaaacaaaaaagggacgauagugaucugaaacgucucagagauuugaaucaggcugucaacaaucuuguagaacucaaaucgacacaacaaaagagcauccugagaguugggaccuugaccucagaugaccugcugacauuggcagcugacuuagagaaacuaaaaucgaagguuauuagaacagaaaggccacuaagcucagguguuuauauggggaauuugaguacacagcagcuugagcagagaagagcauugcugaacaugauaggcaugguugguggggcccagggcacccaaccugggagagacggaguuguuagggugugggauguuaagaauccggaucucuugaacaaccaguucggcaccaugcccagucugacauuagcaugucucaccaaacaaggucaaguugauuugaaugaugucgucuuagcacuaacagaccugggucuaauauacacagcuaaguacccaaauagcucugaccuggauagacuuucccaaagucauccuauacugaauaugguggacacuaagaaaagcuccuugaacauuucugguuacaacuucagcuugggagcugcagugaaagcuggagcuuguaugcuugauggggggaacauguuggagaccaucaagguuacaccucagacaauggauggcaucuugaagucuauuuuaaagguaaagaaaucuuugggaauguuuguuucagacacaccuggugagaggaacccuuaugagaacauacuuuauaagaucugucuuuccggugacggcuggcccuacauagcuucaaggacuuccauuguggguagagcuugggagaauacuacuguggaucucgagucagauggaaaaccgcaaaaagugggcacuguuggguccaacaagucuuuacagucagcgggguucccaacagggcugaccuauucucaguugaugacacuuaaagacucaaugaugcagcuugacccaagugccaaaaccuggauagacauugaaggucguccagaagacccuguggaaauagcucuuuaccaaccuaugucgggcuguuacauacacuucuucagagaaccaacagacuuaaaacaguucaagcaagaugccaaauauucccaugggauugauguggcggaucuuuucccugcucagccuggcuuaaccagcgcagucauugaagcccucccucgcaauaugguacugaccugucaagguucagaugauauuaagaaacucuuggacucccaaggaagaagggacauaaagcuuauugacauugcacugagcaaagcugacucuaggaaauuugaaaaugcuguuugggaccagugcaaagaccuaugccauaugcauacuggagugguugucgaaaagaagaagagaggaggcaaagaagaaauaaccccgcacugugcuuugauggacugcauaauguaugaugcagcugugucaggaggacucaacauaccaguuuuaagagcaguucuccccagggacaugguguuuagaaccucaagccccaaggucguccuguaa

SEQ ID NO: 7838 - RNA, 1710 nt, Artificial Sequence
  derived and/or modified CDS sequence (wt) from LASV(ISTH2271-NIG-2012;Clade II)__AIT17553__NP
augagugcuuccaaagaagugaagucauuccuuuggacacagucauugaggagggagcucucaggauacugcuccagcauaaagcuucaaguugucaaggacgcucaggcucuccuucauggucuugacuuuucugaagucagcaaugugcagcgcuuaaugcgcaaacaaaaaagagacgauagugaucugaaacgucucagagaucugaaucaggcugucaacaaucuuguugaacuuaaaucaacacaacaaaagagcaucuugagaguugggacuuugacuucagaugacuugcuaacacuagcagcugaccuagagaaacuaaagucgaagguuaucagaacagaaaggccacuaagcucagguguuuauauggggaauuugaguacacagcaacuugagcaaagaagagcacugcugaacaugauaggcaugguugguggggcccagggcacccaaccuggaagagacggaguugucagggugugggaugucaagaauccggaucuuuugaacaaccaguucggcaccaugcccagccuuacauuggcaugucuuaccaaacaaggucaaguugauuuaaaugaugccgucuuggcacuaacagaccugggucuaauauacacagccaaguauccaaacagcucugaccuggacagacuuucccaaagucauccuauacugaacaugguggacacuaagaagagcucccugaacauuucugguuacaacuucagcuugggagcugcagugaaggcuggagcuuguaugcuugauggggggaacauguuggagaccauuaaggucacaccucagacaauggauggcaucuugaagucuauuuuaaaggugaaaagaucuuugggaauguuuguuucagauacaccuggugagaggaacccuuaugagaacauacuuuacaagaucugucuuucuggugacggcuggcccuacauagcuucaaggaccucuauuguagguagagcuugggaaaauacuacuguggaucucgagucagauggcaagccacaaaaaauggguacugcuggauccaacaagucucuacagucagcaggguuuccaacaggguugaccuauucucaguugaugacacucaaagacucaaugaugcagcuugacccaagugccaaaaccuggauagacauugaaggucguccagaagacccuguagagauagcucuuuaccaaccuaugucaggcuguuacauacacuucuucagagaaccaacagaccugaaacaguucaagcaagaugcuaaauauucucaugggauugauguagcagaucuuuuccccgcucaaccuggcuugacuagugcgguuaucgaagcccucccucgcaauauggugcugaccugucaaggcucagaugacauuaagaaacuuuuggauucucaagggagaagagacauaaagcuuaucgauauugcacuaagcaaggcugacuccaggagauuugaaaaugcuguuugggaucaaugcaaagaucuaugccacaugcauacugggguaguugucgaaaagaagaaaagaggggguaaagaagaaaucacaccacauugcgcuuuaauggacugcauuauguaugaugcagcugugucaggaggacucaacauaccaguuuuaagagcgguucucccuagagacaugguguucaggaccucaagccccaaggucguccuguaa

SEQ ID NO: 7839 - RNA, 1710 nt, Artificial Sequence
  derived and/or modified CDS sequence (wt) from LASV(ISTH2312-NIG-2012;Clade II)__AIT17561__NP
augagugcuucuaaggaagugaagucauuucucuggacacagucauugaggagggagcuuucagguuauugcuccaacauaaaacuucaaguuguuaaggaugcucaagcucuccuucauggucuugacuuuucugaagucagcaaugugcaacgcuuaaugcgcaaacaaaaaagggaugacagugaucuaaaacgucucagagauuugaaucaggcugucaacaaucuuguggaacucaaaucgacacaacaaaagaguaucuugagaguuggaaccuugaccucagaugaccugcugacauuggcagcugacuuagagaaacuaaagucgaaggucauuagaacagaaaggccacuaagcucagguguuuauauggggaauuugaguacacagcagcuugagcagagaagagcauugcugaacaugauaggcaugguugguggggcucaaggcacucaaccuggaagagauggaguuguuaggguaugggauguuaagaauccagaucuuuugaacaaucaguucggcaccaugcccagucugacauuagcaugucucaccaaacagggucaaguugauuugaaugaugcugucuuagcacuaacagaccugggucugauauacacagcuaaguauccaaauagcuccgaccuggauagacuuucccaaagccauccuauauugaauaugguggacacuaagaaaagcuccuugaacauuucugguuacaacuucagcuuaggagcugcagugaaagcuggagcuuguaugcuugauggggggaacauguuggagaccaucaagguuacaccucagacaauagauggcaucuugaagucuauuuuaaagguaaaaaaaucuuugggaauguuuguuucagauacaccuggugagaggaacccuuaugagaacauacuuuacaagaucugucucuccggugauggcuggcccuauauagcaucaaggaccucuauuguggguagagcuugggagaacacuacuguggaucucgagucagauggaaaaccgcaaaaggugggcacuguuggguccaacaagucuuuacagucagcgggauucccaacagggcugaccuauucucaguugaugacacuuaaagacucaaugaugcaacuugacccaagugccaaaaccuggauagacauugaaggucguccagaagacccuguggaaauagcucuuuaccagccuaugucggguuguuacauacacuucuucagagaaccaacagacuuaaaacaguucaaacaagaugccaaauauucucaugggauugauguggcagaucuuuucccugcucaaccugguuugaccagcgcagucauugaagcccucccucgcaauaugguacugaccugucaagguucagaugauauuaagagacucuuggacucccaaggaagaagggacauaaagcuuauugacauugcacugagcaaggcugacucuaggagauuugagaaugcuguuugggaucaaugcaaagaucuaugccauaugcauacuggagugguugucgaaaagaagagaagaggaggcaaagaagaaauuaccccgcacugugcuuuaauggacuguauaauguaugaugcagcugugucaggaggacucaauauaccaguuuuaagagcaguucuccccagggacaugguauuuagaaccucaagccccaaggucguccuguaa

SEQ ID NO: 7840 - RNA, 1710 nt, Artificial Sequence
  derived and/or modified CDS sequence (wt) from LASV(ISTH2316-NIG-2012;Clade II)__AIT17565__NP
augagugcuuccaaggaaauaaagucauuccuuuggacacagucuuugaggagggagcucucagguuacugcuccagcauaaaacuucaaguuguuaaggaugcucaggcucuccuucauggucuugacuuuucugaagucagcaauguucagcgcuuaaugcgcaaacaaaaaagggacgacagugaucugaaacgucucagagaucugaaccaggcugucaacaaucuuguagaacucaaaucaacacaacaaaagaguauccugagaguugggaccuugaccucagaugaccugcugacauuggcagcugacuuagagaaacuuaagucgaaggucaucagaacagaaaggccacuaagcucagguguuuauaugggaaauuugaguacacagcaacuugagcaaagaagagcauugcugaacaugauaggcaugguugguggggcucaggguacccaaccuggaagggacggaguuguuagggugugggaugucaagaauccggaucuuuugaacaaccaauuuggcaccaugcccagucugacauuggcgugucucaccaaacaaggucaaguugauuuaaaugaugcuguuuuagcacuaacagaccugggucuaauauacacagcuaaguacccaaacagcuccgaccuggacagacuuucccaaagccauccuauacugaauaugguggacacuaagaaaagcuccuugaauaucucugguuacaacuucaguuuaggagcugcagugaaagcuggagccuguaugcuugauggggggaacauguuggagaccauuaagguuacaccucagacaauggauggcaucuugaaaucuaucuuaaagguaaaaagaucuuugggaauguuuguuucagaugcaccuggugagaggaacccuuaugagaacauacuuuacaagaucugucuuucuggggacgguuggcccuacauagcuucaagaacuuccauuguggguagggcuugggagaacaccacuguggaucucgagucagauggaaaaccacaaaaggugggcacugcuggguccaacaagucuuuacagucagcgggguuuccaacaggguugaccuauucucaguugaugacacuuaaagacucaaugaugcaacuugacccaagugcuaaaaccuggauagacauugaaggucguccagaagacccuguagaaauagcucuuuaccaaccuaugucgggcuguuacauacacuucuucagagaaccaacagacuugaaacaguucaagcaagaugccaaauauucucaugggauugauguagcagaucuuuucccugcucaaccuggcuugaccagugcagucauugaagcccuuccucgcaauaugguacugaccugucaggguucagacgauauuaagagacucuuagauucacaaggaagaagggacauaaagcuuauugacauugcacugagcaaggcugacucuaggaaguuugagaaugcuguuugggaucaaugcaaggaucuaugccauaugcauacuggggugguuguugaaaagaagaaaagaggaggcaaagaagaaauuaccccacacugugcucuaauggauugcauaauguaugaugcagcuguaucaggagggcucaauauaccaguuuugagagcaguucuccccagagacaugguguuuagaacaucaagccccaaagucguccuguaa

SEQ ID NO: 7841 - RNA, 1710 nt, Artificial Sequence
  derived and/or modified CDS sequence (wt) from LASV(ISTH2334-NIG-2012;Clade II)__AIT17569__NP
augagugcuucuaaggaagugaagucauuccucuggacacagucauuaaggagggagcuuucagguuacugcuccaacauaaaacuucaaguuguuaaggaugcucaggcucuccuucauggucuugacuuuucugaagucagcaaugugcagcgcuuaaugcgcaaacaaaaaagggaugacagugaucugaaacgucucagagauuugaaucaggcugucaacaaucuuguagaacucaaaucgacacaacaaaagaguaucuugagaguugggaccuugaccucagaugaccugcugacauuggcagcugacuuagagaaacuaaagucgaaggucauuagaacagaaaggccacuaagcucagguguuuauauggggaauuugagcacacagcagcuugagcagagaagagcauugcugaacaugauaggcaugguugguggggcucagggcacccaaccugggagagacggaguugugagggugugggauguuaagaauccagaccuuuugaacaaccaguucggcaccaugccuagucugacauuagcaugucucaccaaacaaggucaaguugauuugaaugaugccgucuuggcacuaacagaccugggucuaauauauacagcuaaguucccaaauagcucugaccuggauagacuuucccaaagccauccuauacugaauaugguggacacuaagaaaagcuccuuaaacauuucugguuacaacuucagcuuaggagcugcaguaaaagcuggagcuuguaugcuugauggggggaacauguuggagaccaucaagguuacaccucagacaauggauggcaucuugaagucuauuuuaaagguaaaaaaaucuuuggggauguuuguuucagauacaccuggugagaggaacccuuaugagaacauacuuuacaagaucugucuuuccggugacggcuggcccuacauagcuucaagaacuucuauuguggguagagcuugggagaauacuacuguggaucucgagucagaugggaaaccgcaaaaagugggcacuacuggguccaacaagucuuuacagucagcgggguucccaacagggcugaccuacucucaguugaugacacuuaaagacucaaugaugcagcuugacccaagugccaaaacuuggauagacauugaaggucguccagaagacccuguggaaauagcucuuuaccaaccuaugucaggcuguuauauacacuuuuucagagagccaacagacuuaaaacaguucaagcaagaugccaaauauucucaugggauugauguggcagaucuuuucccugcucaaccugguuugaccagcgcagucauugaagcccucccucgcaauauggugcugaccugccaagguucagaugauauuaagagacucuuggacucucaaggaagaagggauauaaagcuuauugacauugcacugagcaaggcugacucuaggagauuugaaaaugcuguuugggaucaaugcaaagaucuaugccauaugcacacuggagugguggucgaaaagaagaaaagagggggcaaagaggagaucaccccgcacugugcuuuaauggacugcauaauguaugaugcagcugugucaggaggacucaaucuaccaguuuuaagagcaguucuccccagggacaugguguuuagaacuucaagccccaaggucguccuguaa

SEQ ID NO: 7842 - RNA, 1710 nt, Artificial Sequence
  derived and/or modified CDS sequence (wt) from LASV(ISTH2358-NIG-2012;Clade II)__AIT17573__NP
augagugcuucuaaggaaguuaagucauuucucuggacacagucauugagaagggaacuuucagguuauugcuccaacauaaagcuucaaguugucaaagaugcucaggcucuccuucauggucuugacuuuucugaagucagcaaugugcagcgcuuaaugcgcaaacagaaaagggaugauagugaucugaaacgucuuagagaucugaaucaggcugucaacaaucuuguggaacuuaaaucaacacaacaaaagaguaucuugagaguugggaccuuaaccucagaugaccugcuaacauuggcagcugacuuagagaaacugaagucaaaggucauuagaacagaaagaccacuaagcucaggugucuacauggggaauuugaguacacagcagcuugagcagagaagagcauuguugaacaugauaggcaugguugguggggcucagggcacccaaccuggaagagauggaguugucagggugugggauguuaaaaacccggaucuuuugaacaaccaguuuggcaccaugccuagucugacauuagcaugucucaccaaacaaggucaaguugauuugaaugaugcugucuuagcacuaacagaccugggucuaauauacacagcuaaguacccaaauagcuccgaccuggacagacuuucccaaagucauccuauacugaacaugguggacacuaagaaaagcuccuugaacauuucugguuacaacuucagcuuaggagcugcagugaaagcuggagcuuguaugcuugauggggggaacauguuggagaccaucaagguuacaccccagacaauggaugguauccugaagucuauuuuaaagguaaaaaaauccuugggaauguuuguuucagauacaccuggugagaggaacccuuaugagaacauacuuuacaagaucugccuuuccggugacgguuggcccuacauagcuucuagaaccucuauuguagguagagcuugggagaauacuaccguggaucucgagucagauggaaaaccacaaaaagugggcacugcugggucuaacaagucuuuacaaucagcgggguuuccaacagggcugaccuauucucaguugaugacacuuaaagacucaaugaugcagcuugacccaagugccaaaaccuggauagacauugaaggucguccagaggacccuguggaaauagcucuuuaccaaccuaugucgggcuguuacauacacuucuucagagaaccaacagacuuaaaacaguucaaacaagaugccaaauauucucaugggauugauauagcagaucuuuucccugcucagccuggcuugaccagugcagucauugaagcccucccccgcaauauggugcugaccugucaagguucagaugauauuaagagacuuuuggauucucaagggagaagggacauaaagcucauugacauugcauugagcaaggcugacuccaggagauuugaaaaugcuguuugggaucagugcaaagaucuaugccauaugcacacuggaguggucgucgaaaagaagaaaagagggggcaaagaagaaauuaccccgcauugugcuuuaauggacugcauaauguaugaugcagcugugucaggaggacucaauauaccaguuuuaagagcaguucucccuagagauaugguguuuagaaccucaagccccaaagucguccuguaa

SEQ ID NO: 7843 - RNA, 1710 nt, Artificial Sequence
  derived and/or modified CDS sequence (wt) from LASV(ISTH2376-NIG-2012;Clade II)__AIT17577__NP
augagugcuuccaaggaagugaagucauuucucuggacacagucauugaggagggagcuuucagguuauugcuccagcauaaaacuucaaguuguuaaggaugcucaggcucuccuucauggucuugacuuuucugaagucagcaaugugcaacgcuuaaugcgcaaacaaaaaagggaugauagugaucugaaacgucuuagagauuugaaucaggcugucaacaaucuuguagaacucaaaucgacgcaacaaaagagcaucuugagaguugggacccugaccucagaugaccuguugacguuggcagcugacuuagagaaacuaaagucgaaggucauuagaacagaaaggccacuaagcucagguguuuauauggggaauuuaaguacacagcagcuugagcaaagaagagcauugcugaacaugauaggcaugguugguggggcucagggcacccaaccuggaagagacggaguuguuagggugugggauguuaagaacccggaucuucugaacaaccaguucggcaccaugccuagucugacauuagcaugucucaccaaacaaggucaaguugauuugaaugaugccgucuuagcacugacagaccugggucuaauauacacagcuaaguauccaaauagcuccgaccuggacagacucucccaaagccauccuauacugaauaugguggacaccaagaagagcuccuugaacauuucugguuauaacuucaguuuaggagcugcagugaaagcuggagcuuguaugcuugauggggggaacauguuggagaccaucaagguuacaccucagacaauggauggcaucuugaagucuauuuuaaagguaaaaagauccuugggaauguuuguuucagacacaccuggugagaggaacccuuacgagaacauacuuuauaagaucugucuuuccggugacggcuggccuuacauagcuucaaggacuucuauugcggguagagcuugggagaauacuacuguggaucucgagucagauggaaaaccacaaaaagugggugcugcuggguccaacaagucuuuacagucagcgggguuuccaacggggcugaccuauucucaguugaugacacuuaaggacucaaugaugcaacuugacccaagugccaaaacauggauagacauugaaggucguccagaagauccuguggaaauagcucuuuaccaacccaugucgggcuguuacauacacuucuucagagaaccaacagauuuaaaacaguucaagcaagaugccaaguauucucacgggauugauguggcagaucuuuucccugcucaaccuggccugaccagugcaguuauugaagcccuuccucgcaacaugguacugaccugucaagguucagaugauauuaagagacucuuggacucucagggaaggagggacauaaagcuuauugacauugcacugaguaaggcugacucuaggagauuugaaaaugcuguuugggaucagugcagggaucugugccauaugcauacuggagugguugucgaaaagaagaaaagaggagguaaagaagaaauuaccccgcacugugcuuugauggacugcauaauguaugaugcagcugugucagggggacucaauauaccaguuuuaagagcaguucuccccagagacaugguguuuagaaccucaagccccaaggucguccuguaa

SEQ ID NO: 7844 - RNA, 1710 nt, Artificial Sequence
  derived and/or modified CDS sequence (wt) from LASV(Lassa virus/H.sapiens-wt/NGA/2015/ISTH_0543;Clade II)__AVO03640__NP
augagugcuucuaaggaagugaagucauuucucuggacacagucauugaggagggagcuuucaggcuauugcuccaacauaaaacuucaaguuguuaaggaugcucaggcucuccuucauggucuugacuuuucugaagucagcaaugugcagcgcuuaaugcgcaagcaaaaaagggaugauagugaucugaaacgucucagagauuugaaucaggcugucaacaaccuuguagaacucaaaucgacacaacagaagaguaucuugagaguugggaccuugaccucagacgaccugcugacauuggcagcugacuuagagaaacuaaagucgaaggucauuagaacagaaaggccucuaagcucagguguuuauauggggaauuugaguacacagcagcuugagcagagaagagcauugcugaacaugauaggcaugguugguggggcucaaggcacccaaccuggaagagauggaguuguuagggugugggauguuaagaauccggaucuuuugaacaaccaguucggcaccaugccuagucugacauuagcaugucucaccaaacaaggucaaguugauuugaaugaugccgucuuagcacuaacagaccugggucuaauauacacagcuaaguacccaaauaguuccgaccuagauagacuuucccaaagccauccuauacugaauaugguggacacuaagaaaagcucccugaacauuucuggcuauaacuucagcuuaggagcugcagugaaggcuggggccuguaugcucgauggggggaacauguuggagaccaucaagguuacaccucagacaauggauggcaucuugaagucuauuuuaaaaguaaaaaaaucuuugggaauguuuguuucagauacaccuggugagagaaacccuuaugagaacauacuuuacaagaucugucuuuccggugacggcuggcccuacauagcuucaaggacuucuauuguggguagggcuugggagaacacuacuguggaucucgagucagauggaaaaccgcaaaaagugggcucugcugggucuaacaaguccuuacagucagcgggauucccaacagggcugaccuauucucaguugaugacacuuaaagacucaaugaugcagcuugacccaagugccaaaaccuggauagacauugaaggucguccagaagacccuguggaaauagcucuuuaccaaccuaugucgggcuguuacauacacuucuucagagaaccaacagacuuaaaacaguucaagcaagaugccaaauauucucaugggauugauguggcagaucuuuucccugcucaaccugguuugaccagcgcaguuauugaagcccucccucgcaauauggugcugaccugucaagguucagaugauauuaagagacucuuagauucccaaggaagaaaggacauaaagcuuaucgacauugcacugagcaaggcugacucuaggagauuugaaaaugcuguuugggaucaguguaaagaccuaugccauaugcauacuggagugguugucgaaaagaagaaaagaggaggcaaagaagaaauaacuccgcauugugcuuuaauggauugcauaauguaugaugcagcugugucaggaggacucaauauaccgguuuuaagggcaguucuucccagagacaugguguuuagaaccucaagccccaaggucguccuguaa

SEQ ID NO: 7845 - RNA, 1710 nt, Artificial Sequence
  derived and/or modified CDS sequence (wt) from LASV(Lassa virus/H.sapiens-wt/NGA/2015/ISTH_0547;Clade II)__AVO03584__NP
augagugcuucuaaggaaguaaagucauuucucuggacacagucauugaggagggagcuuucagguuauugcuccagcauuaaacuucaaguuguuaaggaugcucaggcucuccuccauggucuugacuuuucugaagucaguaaugugcaacgcuuaaugcgcaaacaaaagagggaugauagugaucugaaacgucucagagauuuaaaucaggcugucaacaaucuuguagaacuuaaaucgacacaacaaaaaagcaucuugagaguugggacuuuaaccucagaugauuugcugacauuggcagcugacuuggagaaacuaaagucgaaggucauuagaacagaaaggccacuaagcucagguguuuauauggggaacuugaguacacagcaacuugagcaaagaagagcauugcugaacaugauaggcaugguugguggggcucagggcacccaaccuggaagagacggaguuguuaggguaugggacguuaagaacccggaucuuuugaacaaucaguuuggcaccaugccuagucugacauuagcaugucucaccaaacaaggucaaguugauuugaaugaugcugucuuagcacuaacagaccugggucuaauauacacagccaaguacccaaacagcuccgaccuggacagacuuucccaaagccaucccauacugaacaugguggacacuaagaagagcucuuugaacauuucugguuauaauuuuaguuuaggugcugcagugaaagcuggagccuguaugcuugauggggggaacauguuggagaccauaaagguuacaccccagacaauggaugguaucuugaagucuauuuuaaagguaaagagaucuuugggaauguuuguuucagacacaccuggugagaggaacccuuacgagaacauacuuuacaagaucugccuuuccggugacgguuggccuuacauagcuucaaggacuucuauuguggguagagcuugggagaacacuacuguggaucucgagucagaugggaaaccacaaaaaguggguguugccggguccaacaagucuuuacagucagcaggguuuccaacagggcugaccuauucucaguugaugacacucaaagacucaaugaugcagcuugacccuagugccaagaccuggauagacauugaaggucguccagaagacccuguggaaauagcucuuuaccaaccuaugucgggcuguuacauacauuucuucagagaaccaacagaucugaaacaguucaagcaagaugccaaauauucucaugggauugauguggcagaucucuucccugcucaaccugguuugaccagugcagucaucgaagcccucccucgcaauauggugcugaccugucaagguucagaugauaucaagagacucuuggacucccaaggaagaagggacauaaagcuuauugacauugcauugaguaaggcugacucuaggagauuugaaaaugcuguuugggaucagugcaaagaucuaugccauaugcacacuggagugguuguugaaaagaagaaaagaggaggcaaagaggaaauuaccccgcacugugcuuuaauggacugcauaauguaugaugcagcugugucaggagggcucaauauaccaguuuuaagagcaguucuccccagagacaugguguuuagaaccucaagccccaaggucguccuguaa

SEQ ID NO: 7846 - RNA, 1710 nt, Artificial Sequence
  derived and/or modified CDS sequence (wt) from LASV(Lassa virus/H.sapiens-wt/NGA/2015/ISTH_0574;Clade II)__AVO03658__NP
augagugcuuccaaggaagugaagucauuucucuggacacagucauuaaggagggaacuuucagguuauugcuccaauauaaagcuucaaguuguuaaggaugcucaggcucuccuucauggccuugacuuuucugaagucagcaaugugcagcguuuaaugcgcaaacaaaaaagagaugacagugaccugaaacgucucagagaucugaaucaggcugucaacaaucuuguugaacucaaaucaacacaacaaaagaguauccugagaguugggaccuugacuucagaugaucugcugacauuggcagcugacuuagagaaacuaaagucgaaggucauuaggacagaaaggccauugagcucagguguuuauauggggaauuugaguacacaacagcuugagcaaagaagagcauugcugaacaugauaggcaugguuggugggacucagggcacccaaccuggaagagacggaguuguuagggugugggauguuaagaauccggaucuuuugaacaaccaguucggcaccaugccuaguuugacauuagcaugucucaccaaacaaggucagguugaucugaaugaugccguccuggcacuaacagaccuaggucugauauacacagcuaaguacccaaacagcucugaccuagacagacuuucccaaagccauccuauacugaauaugguggacacuaagaagagcuccuugaacauuucugguuacaacuucagcuuaggagcugcagugaaagcuggagcuuguaugcuugauggggggaacauguuggagaccaucaagguuacaccucagacaauggauggcauccugaagucuauuuuaaaaguaaaaaaguccuuaggaauguuuguuucagauacaccuggugagaggaacccuuaugagaacauacuuuacaagaucugucuuucuggugacggcuggcccuacauagcuucaaggacuuccauuguagguagagcuugggagaauacuacuguagaucucgagucagaaggaaaaccacaaaaagugggcacagcuggguccaacaagucuuuacagucagcaggguuuccaacagggcugaccuauucucaguugaugacacuuaaagacucaaugaugcagcuugacccaagugccaaaaccuggauagacauugaaggucguccagaagacccuguggaaauagcucuuuaccaaccuaugucgggcuguuacauacacuucuucagagaaccaacagacuuaaaacaauucaagcaggaugccaaauacucucaugggauugauguagcagaucuuuucccugcucaaccugguuugacuagugcagucaucgaagcccucccucgcaauaugguacugaccugucaagguucagaugauauuaagagacucuuagacucccaaggaagaagagacauaaagcuuauugacauuucacugagcaaggcugacucuagaagauuugaaaaugcuguuugggaucagugcaaagaucuaugccauaugcauacuggagugguugucgaaaagaagaaaagaggagguaaagaagaaauuaccccgcacugugcuuuaauggauugcauaauguaugaugcagcugugucaggaggacucaauauaccaguuuuaagagcaguucuccccagagacaugguguucagaaccucaagucccaaggucguccuguaa

SEQ ID NO: 7847 - RNA, 1710 nt, Artificial Sequence
  derived and/or modified CDS sequence (wt) from LASV(Lassa virus/H.sapiens-wt/NGA/2015/ISTH_0682;Clade II)__AVO03626__NP
augagugcuucuaaggaagugaagucauuucucuggacacagucauuaaggagggaacucucagguuacugcuccagcauaaagcuucaaguuguuaaggaugcucaggcucuccuucauggucuugacuuuucugaagucagcaaugugcagcguuuaaugcgcaaacagaaaagggaugauagugaucugaaacgucucagagaucugaaucaggcugucaacaaucuuguugaacucaaaucaacacaacaaaagagugucuugagaguugggaccuugacuucagaugacuugcugacauuagcagccgacuuagagaaacuaaagucgaaggucauuaggacagaaaggccauugagcucagguguuuauauggggaauuugaguacacaacagcuugagcagagaagagcauugcuaagcaugauaggcaugguuggugggacucagggcacccaaccuggaagagacggaguuguuagggugugggaugucaagaauccggaucuuuugaacaaccaguucggcaccaugccuaguuugacauuagcaugucucaccaaacaaggucaaguugaucugaaugaugcuguccuggcacuaacagaccugggucugauauacacagcuaaguacccaaauagcucugaccuagacagacuuucccagagccauccuauacugaauaugguggacacuaagaagagcuccuugaacauuucugguuacaacuucagcuuaggagcugcagugaaagcuggagccuguaugcuugauggggggaacauguuggagaccaucaagguuacaccucagacaauggauggcaucuugaaaucuauucuaaagguaaaaaaauccuuaggaauguuuguuucagauacaccuggugagaggaacccuuaugagaacauacuuuauaagaucugucuuuccggugaugguuggcccuacauagccucaaggacuuccauuguggguagagcuugggagaauaccacuguggaucucgagucaaauggaaaaccacaaaaagugggcacugcuggguccaacaagucuuuacagucagcaggguucccaacagggcugaccuauucucaguugaugacacuuaaagacucaaugaugcagcuugacccaagugccaaaaccuggauagacauugaaggucguccagaagacccuguggaaauagcucucuaccaaccuaugucgggcuguuacauacacuucuucagagaaccaacagacuuaaaacaguucaagcaagaugccaaauauucccaugggauugauguagcagaccuuuucccugcucaaccuggcuugaccagugcagucaucgaagcccuuccucgcaauaugguacugacuugucaaggcucagaugauauuaagaggcucuuagacucccaaggaagaagagacauaaagcuuauugacauuucacugagcaaggcugacucuaggaaauuugaaaaugcuguuugggaucagugcaaagaucuaugccauaugcacacuggagugguugucgaaaagaagaaaagaggaggcaaagaagaaauuaccccgcacugugcuuuaauggauugcauaauguaugaugcagcugugucaggaggacucaauauaccaguuuuaagagcaguucuccccagagacaugguguuuagaaccucaagccccaaggucguccuguaa

SEQ ID NO: 7848 - RNA, 1710 nt, Artificial Sequence
  derived and/or modified CDS sequence (wt) from LASV(Lassa virus/H.sapiens-wt/NGA/2015/ISTH_0687;Clade II)__AVO03582__NP
augagcgcuucuaaggaagugaagucauuucucuggacacaaucauugaggagggagcuuucagguuauugcuccagcauaaaacuucaaguuguuaaggaugcucaggcucuccuucauggucuugacuuuucugaagucagcaaugugcagcgcuuaaugcgcaaacaaaagagggaugauagugaucugaaacgucucagagauuugaaucaggcugucaacaaucuuguagagcucaaaucgacacaacaaaagagcaucuugagaguugggaccuugaccucagaugaccugcugacauuggcagcugacuuggagaaacuaaagucaaaggucauuagaacagaaaggccacuaagcucagguguuuauauggggaauuugaguacacagcagcuugagcaaagaagagcauugcugaacaugauaggcaugguugguggggcucagagcacccaaccugggagggacggaguugucagggugugggauguuaagaauccggaucuuuugaacaaucaguucggcaccaugccuagucugacauuagcaugucuuaccaaacaaggucaaguugauuugaaugaugcugucuuagcauuaacagaccugggucuaauauacacagcuaaguauccaaauagcuccgaccuggacagacuuucucaaagccauccuauacugaauaugguggacacuaagaagagcucuuuaaacauuucugguuacaacuucagcuuaggagcugcagugaaagcuggagcuuguaugcuugauggggggaacauguuggagacuauuaagguuacaccucagacaauggauggcaucuugaagucuauuuuaaaggugaaaagaucuuugggaauguuuguuucagauacaccuggugagaggaacccuuacgagaacauacuuuacaagaucugucuuuccggugacggcuggcccuacauagcuucaaggacuucuauuguggguagagcuugggagaauaccacuguagaucucgagucagauggaaaaccacaaaaagugggugcuacuggguccaacaagucuuuacagucagcgggguuuccaacagggcugaccuauucucaguugaugacacuuaaagacucaaugaugcagcuugacccaagugccaaaacuuggauagauauugaaggucguccagaggacccuguggaaauagcucuuuaccaacccauaucaggcuguuacauacacuucuucagagaaccaacagauuuaaaacaguucaagcaagaugccaaauauucucaugggauugauguggcagaucuuuucccugcucaaccugguuugaccagugcagucauugaagcccuuccucgcaauaugguacugacuugucaagguucagaugauaucaagagacucuuggacucccaaggaagaagagacauaaaacuuauugacauugcacugagcaaggcugacucuaggagauuugaaaaugcuguuugggaucagugcaaagaucuaugccauaugcacacuggaguaguugucgaaaagaagaaaagaggagguaaagaagaaauuaccccgcacugugcuuugauggacugcauaauguaugaugcagcugugucaggaggacucaauauaccaguuuuaagagcaguucuccccagagacaugguguuuagaaccucaagccccaaggucguccuguaa

SEQ ID NO: 7849 - RNA, 1710 nt, Artificial Sequence
  derived and/or modified CDS sequence (wt) from LASV(Lassa virus/H.sapiens-wt/NGA/2015/ISTH_0736;Clade II)__AVO03574__NP
augagugcuucuaaggaagugaagucauuucucuggacacagucauugaggagggagcuuucagguuauugcuccaacauaaaacuucaaguugucaaggaugcucaggcucuccuucauggucuugacuuuucugaagucagcaauguucagcgcuuaaugcgcaaacaaaaaagggaugauagugauuuaaaacgucuuagagauuugaaucaggcugucaacaaucuuguggaacucaaaucgacacaacaaaagagugucuugagaguugggaccuuaaccucagaugaccugcugacacuggcagcugacuuagagaaacuaaagucgaaggucauuagaacagaaaggccacugagcucagguguuuauauggggaacuugagcacacagcagcuugagcauagaagagcauugcugaacaugauaggcaugguugguggggcucagggcacccaaccuggaagagacggaguuguuagggugugggauguuaagaauccggaucuucugaacaaccaauucggcaccaugccuagucugacacuagcaugucucaccaaacagggucaaguagauuuaaaugaugccgucuuagcacugacagaccuggggcuaauauacacagcuaaguacccaaauagcuccgaccuggauagacuuucccaaagccacccuauacuaaauaugguggacacuaagaaaagcuccuugaacauuuccgguuacaacuucagcuuaggagcugcagugaaggcuggagcuuguaugcuugauggggggaacauguuggagaccaucaagguuacaccucagacaauggauggcaucuugaagucuauuuugaagguaaaaagauccuugggaauguuuguuucagacacaccuggugagaggaacccuuaugaaaacauacuuuacaagaucugucucuccggugacggcuggcccuauauagcuucaaggacuucuauuguggguagggcuugggagaauacuacuguggaucucgagucagauggaaaaccgcagaaagugggcacugcuggguccaacaagucuuuacagucagcgggguucccaacagggcugaccuacucucaguugaugacacuuaaagacucaaugaugcagcuugacccaagugccaaaaccuggauagacauugaaggucguccagaagacccuguggaaauagcucuuuaccaaccuauaucgggcuguuacauacacuucuucagagaaccgacagacuuaaaacaguucaaacaagaugccaaauacucucaugggauugauguggcagaucuuuucccugcucaaccugguuugacuagcgcagucauugaagcccucccucgcaauaugguacugaccugucaagguucagaugauauuaagagacucuuagacucccaaggaagaagggacauaaagcuuauugacauugcacugagcaaggccgacucuaggagauuugaaaaugcuguuugggaucaaugcaaagaucuaugccauaugcauacuggagugguugucgaaaagaagaaaagaggaggcaaagaagaaauuaccccgcauugugcuuuaauggacugcauaauguaugaugcagcugugucgggaggacucaacauaccaguuuugagggcaguucucccuagagacaugguguuuagaaccucaagccccaaggucguccuguaa

SEQ ID NO: 7850 - RNA, 1710 nt, Artificial Sequence
  derived and/or modified CDS sequence (wt) from LASV(Lassa virus/H.sapiens-wt/NGA/2015/ISTH_0789;Clade II)__AVO03552__NP
augagcgcuucgaaagaagugaagucauuccuguggacucaguccuugagaagagagcugucuggcuauugcuccaacauaaaguugcaagugguuaaagaugcucaagcucuccuacacggucuugacuucucugaagucagcaauguacaacgauuaaugcgcaagcagaagagagacgacggugauuugaaacgccucagagacuugaaucaagcaguuaacaaccuuguugagcuuaaauccacacaacagaaaaguguucucagaguugggacucucagcucugaugaucuauugaucuuagcugccgacuuagaaaaguugaaaucuaaggugauucgcacugagaggccauugagcucaggagucuacauggggaauuuaagcucucagcaacuugaucagagaagagcccuauuaaacaugauugguaugacuggugguggucagggggcaaaugccgggagagauggcauagugagaguuugggauguuaaaaaugcagaguuacuaaacaaccaauucgggacgaugccaagucugacuuuagccuguuugacuaaacaggggcagguggaucuaaaugaugcuguccaagcucugacggauuuaggacugaucuacaccgccaaguaucccaacucauccgauuuggauagacucucucagagucacccuaucuugaauaugauugauaccaaaaagaguucccuuaauauuucugguuacaacuucagucugggugcugcagugaaggcaggagcuugcaugcuugaugguggcaauauguuagagacaauuaaaguuucaccccaaacuauggacgggauuuuaaaaucaauccuaaaaguuaagagaagcuuagggauguucguaucagaugcuccaggugaaaggaauccauacgaaaacauacuguacaagaucugccuuucaggagauggauggccuuacauugcaucaagaaccucaaucauugguagggcuugggaaaauacuguaguagauuuggagucggacaacaagccucaaaaacuugggaacagcggaucuaauagaucccugcaguccgcugguuacccugcaggacuaacuuauucccaacuuaugacucuuaaggauucuaugcugcaacuggacccgaacgccaagacuuggauggauguugaagggaggccagaugauccaguugaaauagccuuguaucagccaagcucagguugcuacauccauuucuucagagagccaacugaccucaaacaauucaagcaagaugcaaaguacucacauggaauugaugugggugauuuauuugcugcacaaccugguuugacaagugcagucauagaagcacuuccacgaaauauggucaucaccugucaagggucagaggacaucaagaaacuccuggagucacagggaaggaaagauauaaaauugguggacaucucuaugagcaaauuagacuccagaaaguuugagaaugcugucugggaucaguacaaagacuuaugucacaugcauacagguauuguggucgagaaaaagaaaagaggugguaaagaggagaucacaccacauugugcacugauggacugcaucauguuugaugcagcuguggugggugggcuugaugccaagaucuuaagagcugugcuacccagagauauggucuucaggacuucaacacccaaagucguccuguaa

SEQ ID NO: 7851 - RNA, 1710 nt, Artificial Sequence
  derived and/or modified CDS sequence (wt) from LASV(Lassa virus/H.sapiens-wt/NGA/2015/ISTH_0821;Clade II)__AVO03642__NP
augagugcuucuaaggaagugaagucauuucucuggacacagucauugaggagggagcuuucagguuauugcuccaauauaaaacuacaaguuguuaaggaugcucaggcucuccuucauggucuugauuuuucugaagucagcaaugugcagcgcuuaaugcgcaaacaaaaaagggaugauagugacuuaaaacgucuuagagauuugaaucaggcugucaacaaucuuguagaacucaaaucgacacaacaaaagaguaucuugagaguugggaccuugaccucagaugaccugcugacauuggcagcugacuuagaaaaacuaaagucgaaggucauuagaacagaaaggccacuaagcucagguguuuauauggggaauuugaguacacagcagcuugagcagagaagggcauuguugaacaugauagguaugguugguggggcucagggcacccaaccuggaagagacggagucguuagggugugggauguuaagaauccggaccuuuugaacaaccaguucggcaccaugccuagucugacauuagcaugucucaccaaacaaggucaaguugaccugaaugaugccgucuuagcacuaacagaccugggccugauauacacagcuaaguacccgaauagcuccgaucuggacagacuuucccaaagccacccuauacugaauaugguggacacuaagaagagcuccuugaacauuucugguuacaacuuuagcuuaggagcugcagugaaagccggagcuuguaugcuugauggggggaacauguuggagaccaucaagguuacaccucagacaauggauggcaucuugaagucuauuuuaaaaguaaaaagaucuuugggaauguuuguuucagauacaccuggugagaggaacccuuaugagaauauacuuuacaagaucugucucuccggugacggcuggcccuacauagcuucaaggacuucuauuguggguagagcuugggagaauacuacuguggaucucgagucagauggaaaaccgcaaaaagugggcauugcugggucuaacaagucuuuacagucagcaggguuuccaacagggcugaccuauucucaauuaaugacacucaaagacucaaugaugcagcuugacccaagcgccaaaaccuggauagacaucgaaggucguccagaagacccuguggaaauagcucuuuaccaaccuaugucaggcuguuacauacacuucuucagagaaccaacagacuuaaaacaguucaagcaggaugccaaauauucucaugggauugauguggcagaucucuucccugcucagccugguuugaccagcgcagucauugaagcccucccucgcaauaugguacugaccugucaagguucagaugauaucaagaaacuuuuggacucccaaggaagaaaggacauaaagcuuauugacauugcacugagcaagguugacucuaggagauuugaaaaugcuguuugggaucagugcaaagaucuaugccauaugcauacuggagugguugucgaaaagaagaaaagaggaggcaaagaggaaaucaccccgcacugugcucuaauggauugcauaauguaugaugcagcugugucaggaggacucaauauaccaguuuugagggcaguucuccccagggacaugguguuuagaaccucaagccccaaggucgucuuguaa

SEQ ID NO: 7852 - RNA, 1710 nt, Artificial Sequence
  derived and/or modified CDS sequence (wt) from LASV(Lassa virus/H.sapiens-wt/NGA/2015/ISTH_0831;Clade II)__AVO03546__NP
augagcgcuucgaaagaagugaaaucauuccuauggacucagucucugagaagagagcuagccggcuacugcuccaacauaaaacuacaagugguuaaggaugcucaagcccucuuacauggccuugacuuuucugaagucagcaaugugcaacgacugaugcgcaagcaaaagagggaugauagugaccugaaacgccucagagacuuaaaucaggcagucaacaaccuugucgaacuaaaauccacacaacagaagagcauucuaagaguugggacccucaguucugaugaucugcugaccuuggcugcugacuuagagaaguuaaaaucaaagguaauucgcacugaaagaccacugagcucgggaguuuacauggggaaccugagcacccagcagcuugaccagaggagagccuugcugaacaugaucggcaugguugguggcagucaaggaacaagugccggaagggauggcauuguaagggucugggauguaagaaauccagaacuauuaaauaaucaguuugggacaaugccaaguuugacucuagcuuguuuaacuaaacaaggacagguagacuugaaugaugcuguucaggcccugacagauuugggacuaauuuacaccgcgaaguacccaaauucaucugacuuagauaggcuuucccagagucaucccauacuaaacaugauugacaccaaaaagagcucuaucaacaucucugguuacaauuuuagucugggugcugcaguaaaagcaggggcuugcaugcuagaugguggcaacauguuggagacaaucaagguuucaccccaaucuauggaugggaucuugaaaucaauccuaaagguuaaaaggagccuagggauguuugugucagacacuccaggugagagaaacccuuaugagaauauacuguacaaaaucugccuaucaggagauggauggccuuacauugcgucaaggaccucaaucacugguagggcuugggaaaacacuguaguggauuuagagucggacaacaagccuaaaaaacccgggaacaaugaauccaacaggucucuacagucagcuggcuucccagcaggacugaccuacucccagcucaugacccucaaagauucuauguugcaacuggacccaaaugccaagaccuggauggacauugaagggaggccagaugauccggucgagauagcucuauaccagccaaacucagguuguuacauccacuucuuuagagaaccaacugaucuaaagcaauucaaacaagaugcuaaauacucacauggaaucgacauaagugauuuguuugcugcacaaccuggucugacaagugcaguaauagaagcacuuccacgaaauaugguuaucacaugccaggggucggaggauaucaagaaacuccuagagucgcaagggagaaaggacauaagguugguagacauuucccucagcaaagcagauucuagaaaguuugaaaaugcugucugggaucaguacaaagaccuaugucauaugcacacaggcaucguaguugagaagaagaagaaagguggcaaagaggagauaacaccacauugugcacuaauggacugcaucauguuugaugcagcugugaugaauggacucgacgcgagagucuugagggcugugcugcccagagacauggucuuuagaacuucaacacccagagucguccuguaa

SEQ ID NO: 7853 - RNA, 1710 nt, Artificial Sequence
  derived and/or modified CDS sequence (wt) from LASV(Lassa virus/H.sapiens-wt/NGA/2016/ISTH_0009;Clade II)__AVO03572__NP
augagugcuucuaaggaaguaaagucauuucucuggacacagucauugaggagggagcuuucaggcuauugcuccaauauaaaacuucaaguuguuaaggaugcucaggcucuccuucauggucuugacuuuucugaagucagcaaugugcagcgcuuaaugcgcaagcaaaaaagggaugauagugaucugaaacgucucagagauuugaaucaggcugucaacaaucuuguagaacucaaaucgacacaacaaaagagcaucuugagaguugggaccuugaccucagaugaccugcugacauuggcagcugacuuagagaaacuaaagucgaaagucauuagaacagaaaggccucuaagcucggguguuuauauggggaauuugaguacacagcagcuugagcagagaagagcauugcugaacaugauaggcaugguugguggggcucagggcacccaaccuggaagagacggaguuguuagggugugggauguuaagaauccggaucucuugaacaaccaguucggcaccaugccuagucugacauuagcaugucucaccaaacaaggucaaguugauuugaaugaugcugucuuagcacuaacagaccugggucuaauauacacagcuaaguacccaaauagcuccgaccuagauagacuuucccaaagccauccuauacugaauaugguggauacuaagaaaagcucccugaacauuucugguuacaacuucagcuuaggagcugcagugaaggcuggggccugcaugcucgauggggggaacauguuggagaccaucaagguuacaccucagacaauggauggcaucuugaagucuauuuugaaagugaaaaaaucucugggaauguuuguuucagacacaccuggugagagaaacccuuaugagaacauacuuuacaagaucugucuuuccggugacggcuggcccuacauagcuucaaggacuucuauuguggguagggcuugggagaauacuacuguggaucucgagucagaugggaaaccgcaaaaagugggcucugcuggguccaacaaguccuuacagucagcgggauucccaacagggcugaccuauucucaguugaugacacuuaaagacucaaugaugcagcuugacccaagugccaaaaccuggauagacauugaaggucguccagaggacccuguggaaauagcucuuuaccaacccaugucgggcuguuacauacacuucuucagagaaccaacagacuuaaaacaguucaagcaagaugccaaauauucucaugggauugauguggcagaccuuuucccugcucaaccugguuugaccagcgcgguuauugaagcccucccucgcaauauggugcuaaccugucaagguucagaugauauuaagagacucuuagacucccaaggaagaagggacauaaagcuuauugacauugcacugagcaaggcugacucuaggagauuugagaaugcuguuugggaucaguguaaagaccuaugccauaugcauacuggagugguugucgaaaagaagaaaagaggaggcaaagaagaaauaacuccgcauugugcuuuaauggacugcauaauguaugaugcagcugugucaggaggacuuaauauaccaguuuuaagagcaguucuucccagagacaugguguuuagaaccucaagccccaaggucguccuguaa

SEQ ID NO: 7854 - RNA, 1710 nt, Artificial Sequence
  derived and/or modified CDS sequence (wt) from LASV(Lassa virus/H.sapiens-wt/NGA/2016/ISTH_0017;Clade II)__AVO03568__NP
augagugcuucuaaggaagugaagucauuccucuggacacagucauugaggagggagcuuucagguuauugcuccagcauaaaacuucaaguugucaaggaugcucaagcucuccuucauggucuugacuuuucugaagucagcaaugugcagcgcuuaaugcgcaaacaaaagagggaugauagcgaucugaaacgucucagagauuugaaucaggcugucaacaaucuuguagaacucaaaucgacacaacaaaagagcaucuugagaguugggacccugaccucagaugaccugcugacauuggcagcugacuuagagaaacugaagucaaaggucauuagaacagaaaggccacuaagcucagguguuuauauggggaauuugaguacacagcaacuugagcaaagaagagcauugcugaacaugauaggcauggcugguggggcucagggcacccaaccuggaagagacggaguuguuagggugugggauguuaagaauccggaucuuuugaacaaucaguucggcaccaugccuagucugacauuagcaugucucaccaaacagggucaaguugauuuaaaugaugcugucuuagcauuaacagaccugggucugauauacacagcuaaguauccaaauagcuccgaccuggacagacuuucucaaagccauccuauacugaauaugguggacacuaagaagagcuccuugaacauuucugguuacaacuucagcuugggagcugcagugaaagcuggagcuuguaugcuugauggggggaacauguuggagaccaucaagguuacaccucagacaauggauggcaucuugaagucuauuuuaaagguaaaaagaucuuugggaauguuuguuucagaugcaccuggugagaggaacccuuacgagaacauacuuuacaagaucugucuuucaggugacggcuggcccuacauagcuucaaggacuucuauuguggguagagcuugggagaauacuacuguggaucucgagucagaugggaaaccacaaaaagugggugcuacuggguccaacaaaucuuuacagucagcaggguuuccaacagggcugacuuauucucaguugaugacacuuaaagacucaaugaugcagcuugacccaagugccaaaaccuggauagacauugaaggucguccagaagacccuguggaaguggcucuuuaccaaccugugucgggcuguuacauacacuuuuuuagagaaccaacagauuuaaaacaguucaagcaagaugccaaauauucucaugggauugauguggcggaucuuuucccugcucaaccugguuugaccagcgcagucauugaggcccucccucgcaacaugguacugaccugucaagguucagaugauauuaagaaacucuuggacucccaaggaagaaaggacauaaagcuuauugacauugcgcugagcaaggccgauucuaggagauuugaaaaugcuguuugggaucagugcaaagaucuaugccauaugcauacuggagugguuguugaaaagaagaaaagaggaggcaaagaagaaauuaccccgcacugugcuuuaauggacugcauaauguaugaugcagcugugucuggaggacucaauaucccagucuuaagagcaguucuccccagagacaugguguuuagaaccucaagccccaaggucguccuguaa

SEQ ID NO: 7855 - RNA, 1710 nt, Artificial Sequence
  derived and/or modified CDS sequence (wt) from LASV(Lassa virus/H.sapiens-wt/NGA/2016/ISTH_0035;Clade II)__AVO03620__NP
augagugcuucuaaggaagugaagucauuucucuggacacagucauugaggagggagcuuucaggauauugcuccagcauaaaacuucaaguuguuaaggaugcucaagcucuccuucauggucuugacuuuucugaagucagcaaugugcagcgcuuaaugcgcaaacaaaagagggaugauagugaucugaaacgucucagagauuugaaucaagcugucaacaaucuuguagaacucaaaucgacacaacaaaagagcaucuugagaguugggacccugaccucagaugaccugcugacauuggcagcugacuuagagaaacuaaagucgaaggucaucagaacagaaaggccacuaaguucagguguuuauauggggaauuuaaguucacagcagcuugagcaaagaagagcauugcugaacaugauaggcaugguugguggggcucagggcacccaaccuggaagagauggaguuguuagggugugggauguuaagaauccggaucuuuugaacaaucaguuuggcaccaugccuagucugacauuagcaugucucaccaaacaaggucaaguugauuugaaugaugcugucuuagcacuaacagacuugggucugauauacacagcuaaauauccaaauagcucugaccuggacagacuuucccaaagccauccuauacugaacaugguggacacuaagaagagcuccuugaacauuucugguuacaacuucagcuuaggagcugcagugaaagcuggagcuugcaugcuugauggggggaauauguuggagaccaucaagguuacaccucagacaauggauggcaucuugaagucuauuuuaaaggugaaaagaucuuugggaauguuuguuucagacacaccuggugagaggaacccuuacgaaaacauacuuuacaaaaucugucuuuccggugacggcuggccuuauauagcuucaaggacuucuauuguggguagagcuugggagaauaccaccguggaucucgagucagauggaaaaccacaaaaaguggggucugcuggguccaacaagucuuuacagucagcgggguucccaacagggcugaccuauucucaguugaugacacuuaaagacucaaugaugcaacuugacccaagugccaaaaccuggauagauauugaaggucguccagaagacccuguggaaauagcucuuuaccaaccuauuucgggcuguuacauacacuucuucagagaaccaacagauuuaaaacaguucaagcaagaugccaaguauucucaugggauugauguggcagaucucuucccugcucaaccugguuugaccagugcagucauugaagcccucccucgcaauauggugcugaccugucaagguucagacgacauuaagagacucuuggacucccaaggaagaagggacauaaagcuuauugacauugcacugagcaaggcugacucuaggagauuugaaaaugcuguuugggaucagugcaaagaucuaugccauaugcauacuggagugguuguugaaaagaagaaaagaggaggcaaagaagaaauuaccccgcacugugcuuuaauggacugcauaauguaugaugcagcuguaucaggaggacucaauauaccaguuuugagagcaguucuccccagagacaugguguuuagaaccucaagccccaaggucguccuguaa

SEQ ID NO: 7856 - RNA, 1710 nt, Artificial Sequence
  derived and/or modified CDS sequence (wt) from LASV(Lassa virus/H.sapiens-wt/NGA/2016/ISTH_0104;Clade II)__AVO03632__NP
augagugccuccaaagaagugaaaucauuccuuuggacacaaucauugaggagagagcuuucagguuauugcucuaauauaaaacuucaaguugucaaggaugcccaagcccuccuucacggccuugacuucucugaagucagcaaugugcaacgucuaaugcgcaaacaaaagagagaugauagugaucuaaaacgucucagagaccugaaucaagcagucaacaaccuuguugaacucaaaucaacacaacaaaagagcaucuugaggguugguacacugaccucagaugacuugcugacauuggcagcugacuuagagaaacugaagucaaaagucaucagaacagaaagaccacuaagcucagguguguacauggggaauuuaagcacacagcaacuugagcaaagaagggcacugcugaacaugauugguaugguugguggaacucagagcacccaaccugggagggauggaguuguuagggugugggaugucaaaaauccagaucucuugaacaaccaguucggcacuaugccuaguuugacauuagcaugucuuaccaagcaaggucaaguugaccuaaaugaugcuguccuagcacugacagaucuaggacugauauacacagcuaaguacccaaacagcuccgacuuagacagacuuucccaaagucauccaauucugaauaugguggauaccaagaagagcuccuugaacauuucugguuacaauuuuaguuugggagcugcagugaaggcuggggccuguaugcuugaugggggcaacauguuggaaaccauuaaggugacgccucagacaauggauggcauccugaagucuauuuuaaaagugaaaagauccuuggggauguuugucucagauacaccuggugagaggaacccuuaugagaacauacuuuacaagaucugccucucuggugauggcuggcccuacauagccucaagaaccucuauuguggguagggcgugggagaauaccacuguagaccuugagucagaugggaaaccacaaaaaguaggaacuacuggguccaauaagucuuugcaguccgcaggguucccaacaggguuaacuuauucacagcucaugacucucaaagacucaaugaugcagcuugacccaagugcuaaaacuuggauagacauugaaggccguccagaagacccuguagaaauagcccuuuaucaaccuaugucaggcuguuacauacauuucuuuagagaaccaacagaucuaaaacaguucaagcaagaugcuaaauauucucaugggauugauguggcggaucuuuucccugcucaaccugguuugaccagcgcagucauugaagcccuuccucguaauaugguguuaaccugccaagguucagaugacaucaagaagcucuuggacucucaaggaagaagggacauaaagcuuauugauauuucauugagcaaggccgacucuaggaaguuugaaaaugccguuugggaccagugcaaagacuugugccacaugcacacuggaguggucguugaaaagaagaaaagaggggguaaagaagaaaucaccccacauugugccuugauggauugcauaauguuugaugcagcugugucaggaggacucaacauaccagucuuaagagcuguccuucccagagacaugguguuuagaaccucaagccccaaggucgucuuguaa

SEQ ID NO: 7857 - RNA, 1710 nt, Artificial Sequence
  derived and/or modified CDS sequence (wt) from LASV(Lassa virus/H.sapiens-wt/NGA/2016/ISTH_0133;Clade II)__AVO03636__NP
augagugcuuccaaagaagugaaaucauuccuuuggacgcagucauugagaagagagcuuucgggcuauuguuccaauauaaaacuccaaguuguuaaggaugcucaagcccuucuacauggccuugacuuuucugaaguuagcaauguacagcgccuaaugcguaaacagaaaagagaugacagugaucugaagcgccucagagaucugaaucaggcaguuaauaaccuuguugaacuuaagucaacacagcaaaagagcauuuuaagaguugggacauugacuucagaugauuugcugacuuuagcggcugaccuagagaaacuaaaaucaaagguuauuaggacagagaggccacugaguucggguguguauauggggaauuugagcgcacagcagcuugagcagagaagggcauugcugaauaugauaggcaugguuggugggacucaagguacccaaccugggagagaugggguuguuagagugugggaugucaaaaacccagaccuuuugaauaaccaguuuggcaccaugccuagucuaacguuggcaugccucaccaaacagggucaaguugaccuaaaugaugcugucuuggcacuaacagacuuggggcugauauacacagccaaauacccuaaugcgucugauuuagacaggcuuucucaaagucauccuauacugaacaugguggacacuaagaagaguucccuaaauauuucugguuauaauuucagcuuaggagcugcagugaaagccggggcuuguaugcuugacggaggcaacauguuggagacuaucaaagucacgccccagacaauggauggcaucuuaaaguccguuuuaaaggugaagaaaucucugggaauguuuguuucagacacaccuggugaaagaaacccuuaugagaacauacuuuauaaaaucugucucucuggagaugguuggccuuacauagcaucaagaaccuccauuguggguagagcuugggaaaacacuacuguggaucuugaaucagaugggaaaccacagaaaauaggcccugcuggauccaacaagucccuccaaucugcagguuuuccagcuggguugacuuauucccaguugaugacacuuaaggacucaaugaugcagcuugaucccagugccaaaacuuggauagacauugaaggccguccagaagauccuguggagauagcucucuaccagccuaugucaggcuguuacauucauuucuuuagagagccaacagauuugaaacaauucaaacaggaugccaaauacucucaugggauugaugugacagaccuuuucucugcucagcccgguuugaccagugcaguuauugaagcccucccucgcaauaugguguugaccugucagggcucagaugacauuaagagacuuuuagauucucaagggaggagagauauaaagcuuauugauauaucauugagcaagguugacuccaggagguuugagaaugcugucugggaccaaugcaaagaucugugccauaugcacacuggagugguuguugagaaaaagaaaagagggggcaaagaagagaucacuccacauugugcccuaauggacugcauaauguaugaugcagcuguaucuggaggacucaauauaccaguuuugagagcuguccucccgagggacaugguguucagaacuucaagucccaaggucguccuguaa

SEQ ID NO: 7858 - RNA, 1710 nt, Artificial Sequence
  derived and/or modified CDS sequence (wt) from LASV(Lassa virus/H.sapiens-wt/NGA/2016/ISTH_0146;Clade II)__AVO03634__NP
augagugcuucuaaggaagugaagucauuucucuggacacagucauugaggagggagcuuucagguuauugcuccaacauaaaacuucaaguuguuaaggaugcucaggcucuccuucauggucuugacuuuucugaagucagcaaugugcagcguuuaaugcgcaaacaaaagagggaugauagugaucuaaaacgucucagagacuugaaucaggcugucaacaaucuuguagaacucaagucgacacaacaaaagagcaucuugagaguugggaccuugaccucagaugaccugcugacauuggcagcugacuuagagaaacuaaagucgaaggucauuagaacagaaaggccacuaagcucagguguuuauauggggaauuugagugcacagcagcuugagcaaagaagagcacugcugaacaugauagguauggcugguggggcucaaagcacccaaccuggaagagacggaguuguuagggugugggauguuaagaauccggaucuuuugaacaaucaguucggcaccaugccuagucugacacuagcaugucucaccaaacagggucaaguugacuugaaugaugccgucuuagcacuaacagaucuggguuugauauauacagccaaguauccaaauagcuccgaccuggacagacuuucccaaagccauccuauacugaauaugguggacacuaaaaagagcuccuugaauauuucugguuacaauuucagcuuaggagcugcagugaaagcuggagcuuguaugcuugauggggggaauauguuggagaccaucaagauuacaccccagacaauggauggcaucuugaaguccauuuuaaaggugaaaagaucuuugggaauguuuguuucagauacaccuggagaaaggaacccuuacgagaacauacuuuacaaaaucugucuuuccggugacggcuggccauacauagcuucaaggacuucuauuguggguagagcuugggagaauacuacuguagaucucgaaucagauggaaagccacaaaagguggguacuauuggauccaacaagucuuuacaaucagcgggguuuccaacaggguugaccuauucucagcugaugacacuuaaagacucaaugaugcaacuugacccaagugccaaaaccuggauagacauugaaggucguccagaagacccuguggaaauagcucuuuaccaaccuaugucgggcuguuacauacacuucuucagagaaccaacagauuuaaaacaguucaagcaagaugccaaauauucucaugggauugauguggcagaucuuuucccugcucaaccuggucuaaccagugcaguuauugaagcccucccucgcaauaugguacugaccugucaaggcucagaugacauuaagagacuuuuggacucucaaggaagaagggacauaaagcuuauugacauugcacugagcaaggcugacucuaggagauuugaaaaugcuguuugggaucagugcaaagaucuaugccacaugcauacuggagugguuguugaaaagaagaaaagaggaggcaaggaagaaauuaccccgcacugugcucuaauggacugcauaauguaugaugcagcugugucaggaggacucaauauaccaguuuuaagagcaguucucccuagagacaugguguuuagaaccucaagccccaaggucguccuguaa

SEQ ID NO: 7859 - RNA, 1710 nt, Artificial Sequence
  derived and/or modified CDS sequence (wt) from LASV(Lassa virus/H.sapiens-wt/NGA/2016/ISTH_0187;Clade II)__AVO03550__NP
augagcgucuccaaggaggugaaaucauuccuguggacucagucucugagaagagaacugucaggcuauugcuccaacauaaagcuacagguagugaaggaugcccaggcucuucuucauggcuuggacuucucugaagucagcaauguucaacguuugaugcguaaacagaggagagaugauggugaucuaaaacggcugagagaccucaaucaggcagucaacaaucuuguugagcuaaagucaacucagcaaaaaaguguguugaggguugggacucuuagcucggaugaccugcuggucuuggcugcugauuuggaaaaacuaaagucaaagguuauuagaacagagaggccuuugagcucaggagucuacaugggaaaucugaguucacaacaacuugaucagagaagggcucuucuaaacaugauuggcaugacugguggaaacagaggggggagugcuuccagugauggcauugugagagucugggacgucaaaaaugcagagcuacuuaauaaccaguuugggacaaugccaagucugacccuggcaugcuugaccaaacaaggacaaguagaucugaaugacgcuguucaggccuuaacggacuugggacuaaucuacacagcaaaguaucccaauucaucugaucuagauagacuggcccaaagucauccgauauugaacaugauugauaccaagaaaagcucacucaauaucucugguuacaacuuuagcuugggagcugcugucaaggcaggggcuugcaugcuugauggugguaauauguuggagaccauaaagguuucaccucagaccauagauggcaucuugaaaacaauuuuaaaagucaagaagagcuuaggaauguuuaucucagaugugccaggugagaggaacccuuaugagaauauacuguacaaaauuugucucucaggggauggauggccuuacauugcaucaaggacuucgauugugggaagagcaugggaaaacacugugguugaucuggaaucagacaacaaaccacaaaaaaccggaaauggagguucaaacaagucauugcagucugcagguuuugcugcaggauuaacuuauucccaauuaaugacccucaaagauucaaugcuucaacuugacccaaauucaaaaaccuggauggauauugaggggagaccagaggauccagucgagauagcucuguaucaaccaagcucaggcuguuauauacacuuuuuuagggaaccaacagacuuaaaacaguucaaacaggaugcaaaguauucacauggcauugaugugacagauuuguuugcugcacagccaggguuaacaagugcagugauagaggcucuccccagaaacauggucaucacuugucagggaucagaggacaucagaaaacuucuagagucacaaggaagaagggauauaaagcugauugacauuucccucaauaaagcggacucaaggaaauuugaaaaugcugugugggaucaguucaaggacuugugccacaugcauacugggguuguuguggagaaaaagaagaggggagguaaggaggagauaacuccacauugugcauugauggacugcaucauguuugaugcagcagucucgggagggcucgauacaaagguccuaagggcugugcucccuagggauaugguauucagaaccuccacaccuaaagucguccuguaa

SEQ ID NO: 7860 - RNA, 1710 nt, Artificial Sequence
  derived and/or modified CDS sequence (wt) from LASV(Lassa virus/H.sapiens-wt/NGA/2016/ISTH_0419;Clade II)__AVO03540__NP
augagugcuucaaaagaagugaagucauucuuguggacucagucccugaggagagaguuguccggcuauugcuccaacauaaaguugcagguggucaaagaugcucaagcucuccugcacggucuugacuucucugaagucagcaauguacagcgauugaugcgcaagcagaagagagaugacggugaccuaaaacgccuuagagacuugaaucaggcaguuaauaaccuuguugagcuuaaaucuacacaacaaaagaguguucucagaguugggacucucagcucugaugauuuauugacuuuggcugcugacuuagagaaguugaaguccaaagucauccguacugagaggccauuaagcucaggagucuacauggggaaucugagcucucagcagcuugaucagagaagggcucuguuaaauaugauuggcaugacuggagguggacaaggggcaagcgcuggaagagauggcauagugagaguuugggaugucaaaaaugcagaauuguuaaauaaucaauucgggacgaugccaaguuugacccuagccugcuugacuaaacaggggcagguggauuuaaaugaugcuguccaagcucugacggauuuaggauugauuuacaccgcaaaguaucccaauucaucugauuuggauagacucucucagagucacccuauucuaaacaugauugacaccaaaaagaguucucucaacaucucuggcuacaacuucagucuaggugcugcagugaaggcaggagccuguaugcuugauggcggcaauauguuagagacaaucagaguuucaccccaaacuauggaugggauuuuaaaaucaauccugaaagucaagaggagcuuggggauguuuguaucagacauuccaggugagaggaauccauaugaaaacauauuauacaagaucugccuuucaggagacggauggccuuacauugcaucaagaaccucaaucacugguagggcuugggaaaacacuauuguggauuuggagucagacagcaggccucagaagcccggaaauaguggguccaacagaucccugcaguccgcugguuuuccugcaggacuaacuuauucccagcucaugacucucaaggauucuaugcugcaauuggacccaaacgccaagacuuggauggacauugaaggaaggccagacgauccaguugagauagcccuauaucagccaaguucaggcuguuauauccauuucuuuagggagccaacugaccucaaacaauucaaacaagaugcaaaauauucacacggaauugauguaggugauuuauuuacugcacaacccggccugacaagugcaguuuuggaggcacuuccucgaaacauggucaucaccugucaagggucggaagacauuaagaaacucuuagaaucacaagggaggaaagauauaaaauuaguggacauuuccaugagcaaaccggacuccagaaaguuugagaaugcuguuugggaucaguauaaagacuuaugucacaugcauacgggcauugugguugagaaaaagaaaaggggugguaaggaagaaaucacaccgcacugugcacugauggauugcaucauguuugaugcagcuguagugggugggcuugaugccaagaucuuaagagcugugcuacccagagauauggucuuuaggacuucaacacccaaagucguccuguaa

SEQ ID NO: 7861 - RNA, 1710 nt, Artificial Sequence
  derived and/or modified CDS sequence (wt) from LASV(Lassa virus/H.sapiens-wt/NGA/2016/ISTH_0447;Clade II)__AVO03560__NP
augagugcuucuaaggaagugaggucauuucucuggacacagucauugaggagggagcuuucagguuauugcuccagcauaaaacuucaaguugucaaggaugcucaagcucuccuucauggucuugacuuuucugaaguuagcaaugugcagcgcuuaaugcgcaagcaaaagagggaugauagugaucugaaacgucucagagauuugaaucaggcugucaacaaucuuguagaacucaagucgacacaacaaaagagcaucuugagaguugggaccuugaccucagaugaccugcugacacuggcagcugacuuagagaaacuaaagucgaaggucauuagaacagaaaggccacuaagcucagguguuuacauggggaauuugaguucacagcagcuugagcaaagaagagcauugcugaacaugauaggcaugguugguggggcucagggcacccagccuggaagagacggaguuguuagggucugggauguuaagaauccggaucuuuugaauaaucaguucggcaccaugccuagucugacauuagcaugucucacuaagcaaggucaaguugauuugaaugaugcugucuuagcacugacagaccugggucuaauauacacagcuaaguauccaaauagcuccgaccuagacagacuuucccaaagccauccuauacugaauaugguggauacgaagaagagcuccuugaacauuucugguuacaacuuuagcuuaggagcugcagugaaagcuggagcuuguaugcuugauggggggaacauguuggaaaccauuaagguuacaccucagacaauggauggcaucuugaagucuauuuuaaaggugaaaagaucuuuaggaauguuuguuucagauacaccuggugagaggaacccuuacgagaacauacuuuacaagaucugucuuuccggugacggcuggcccuacauagcuucaagaacuucuauuguggguagagcuugggagaauacaacuguggaucucgagucggauggaaagccacaaaaagugggugcugcuggguccaccaagucuuuacagucagcgggguuuccaacagggcuaaccuauucucaguuaaugacacuuaaagacucaaugaugcagcuugacccaagugccaaaaccuggauagacauugaaggucgcccagaagacccuguggaaauagcucuuuaccaaccuaugucgggcuguuacauacacuucuucagagaaccaacagauuuaaaacaguucaagcaagaugccaaauauucucauggaauugauguggcagaucuuuucccugcucaaccugguuugaccagugcagucauugaagcccucccucgcaauauggugcugaccugucaagguucagaugauauuaaaagacucuuggacucccaaggaagaagggacauaaagcuuauugacauugcacuaagcaagguugacucuaggagauuugaaaaugcuguuugggaucaaugcaaagaucuaugccauaugcauacuggaguuguugucgaaaagaagaaaagagggggcaaagaagaaauuacuccgcacugugcuuugauggacugcauaauguaugaugcagcugugucaggaggacucaauauaccaguucuaagagcaguucuccccagagacaugguguuuagaaccucgagccccaaggucguccuguaa

SEQ ID NO: 7862 - RNA, 1710 nt, Artificial Sequence
  derived and/or modified CDS sequence (wt) from LASV(Lassa virus/H.sapiens-wt/NGA/2016/ISTH_0543;Clade II)__AVO03596__NP
augagugcuuccaaggaagugaaaucauuccuuuggacacagucacuaaggagagagcuuucaggcuacugcucuaacauaaaacuccaggugguuaaggaugcucaggcccuccugcauggccucgacuucucugaggucagcaauguccagcgcuuaaugcgcaaacagaaaagagaugacggugaccuaaaacgucuuagagaccuaaaucaggcaguuaacaaucuuguugagcucaagucaacacaacaaaagaguguucugagaguuggaacacugaccucagacgacuugcuaauuuuagcagcugaucuagagaaauugaagucaaaggucauuaggacagagaggccacuaaguucaggcguguauaugggaaacuugagcacacaacaacuugagcagaggaaagcguuguugaguaugauaggcauggucgguggugcucagggaacccaaccugggagggacggaguugucagggugugggaugucaaaaauccggaccuccucaacaaccaauuuggcaccaugccuaguuuaacacuagcaugucucacuaaacagggucagguugacuuaaaugacgccguucuggcgcuaacagacuugggguuaauauacacagccaaauaccccaauaguucugaccuggacagacuuucccagagccauccuauauugaacaugguagacaccaagaagagcucccuaaauauuucuggcuauaauuuuaguuugggagcugcagugaaggcuggagcuugcaugcucgauggggguaacauguuggaaacuaucaaggugacgccucagacaauggauggcauucugaaguccauucuaaagguaaaaaggucccugggaauguuuguuucagacacaccuggugaaagaaaccccuaugaaaacauacuuuacaaaauuugucucucuggggauggcuggcccuacauagccucaagaaccuccauuguggguagagcuugggagaauaccacuguagaccuugagucagaugggaaaccacagaaagugggcacugcuggauccaacaaaucucugcaaucugcaggguucccaacagggcuaacuuauucucaacugaugacacucaaagauucaaugaugcaacuugacccaagugccaaaaccuggauagacauugagggucguccagaagacccuguugagauagcucuuuaccaaccuaugucaggcuguuauauacauuucuucagagaaccaacggauuuaaaacaguucaaacaagaugccaaauauucucaugggauugaugugacagaucucuuuucugcucagccuggucuaaccagugcagucauugaggcucucccccguaacaugguguuaacgugucaagguucagacgacauuaaaaaacucuuagauucucaggggagaagggacaucaagcucaucgauaucucauuaaguaaggcugauucuaggagauuugaaaaugcugucugggaucagugcaaagauuugugucacaugcacaccggaguggucguugagaagaagaagagaggaggcaaagaggagaucacuccacauugugcuuuaauggauugcauaauguuugacgcagcugugucaggaggacucaauauaccaaucuugagggcuguucucccaagagacaugguguucagaacuucaagucccaaagucguccuguaa

SEQ ID NO: 7863 - RNA, 1710 nt, Artificial Sequence
  derived and/or modified CDS sequence (wt) from LASV(Lassa virus/H.sapiens-wt/NGA/2016/ISTH_0565;Clade II)__AVO03638__NP
augagugcuuccaaggaagugaaaucauuccuuuggacacagucgcugaggagagagcuuucaggcuauugcuccaauauaaaacuccagguggucaaggaugcucaggcccuccugcacggucucgacuucucugaggucagcaauguccagcgcuugaugcgcaaacagaaaagagaugacggugaccuaaaacgucuuagggaccuaaaucaggcaguuaacaaucuuguugagcucaagucaacacaacaaaagaguguucugagaguuggaacacugaccucagacgacuugcugacuuuagcagcugaucuagagaaauugaagucaaaggucauuaggacagagaggccauuaagcucagguguauauaugggaaacuugagcacacaacaacuugagcagaggaaggcguuguugaguaugauaggcauggucgguggugcucagggaacccaaccuggaagagauggaguuguuagggugugggaugucaaaaacccggaccuccucaacaaccaauuuggcaccaugccuaguuuaacgcuagcaugucucacuaaacagggucagguugacuuaaaugacgccguucuggcgcuaacagacuugggguuaauauacacagcuaaauaccccaacaguuccgaccuagacagacuuucccagagccauccuauauugaauaugguagauaccaagaagagcuccuuaaauauuucugguuauaauuucaguuuaggagcagcagugaaggcuggagcuugcaugcucgaugggggcaacauguuggaaacuaucaaggugacgccucagacaauggauggcauucugaaguccauucuaaaggugaaaaggucccugggaauguuuguuucagacacaccuggugaaagaaacccuuaugaaaacauacuuuacaaaauuugucucucuggggacggcuggcccuacauagcuucaagaaccucuauuguggguagagcuugggagaacaccacuguggaccuugagucagauggaaaaccacagaaaguggguacugcuggauccaacaaaucucugcaaucugcgggguucccaacagggcuaacuuauucucaacugaugacacucaaagauucaaugaugcaacuugacccaagcgccaaaaccuggauagacauugaaggucguccagaagaccccguugagauagcucuuuaccaaccuaugucaggcuguuauauacauuucuucagagaaccaacggauuuaaaacaguuuaaacaagaugccaaauauucucaugggauugaugugacagaccucuuuucugcucagccugguuuaaccagugcagucauugaggcucucccccgcaacaugguguuaacgugucaagguucagacgacauuaaaaaacucuuagauucucaggggagaagagacaucaagcucaucgacaucucauuaaguaaggcugauucuaggagauuugagaaugcugucugggaucaauguaaagauuugugucacaugcacacuggagugguuguggagaaaaagaagaggggaggcaaggaggagaucacuccacauugugcuuuaauggacugcauaauguuugacgcagcugugucaggaggacucaacauaccaaucuugagagcuguucucccaagagacaugguguucagaacuucaagucccaaagucguccuguaa

SEQ ID NO: 7864 - RNA, 1710 nt, Artificial Sequence
  derived and/or modified CDS sequence (wt) from LASV(Lassa virus/H.sapiens-wt/NGA/2016/ISTH_0610;Clade II)__AVO03586__NP
augagugccuccaaggaagugaagucauuucucuggacacagucauugaggagggaacuuucagguuauugcuccaacauaaagcuucaaguugucaaggaugcucaggcucuccuucauggucuugacuuuucugaaguuagcaaugugcagcgcuugaugcgcaaacaaaaaagagaugauagugaucugaaacgucucagagaucugaaucaggcugucaacaaucuuguggaacucaaaucaacacaacaaaagagugucuugagaguugggaccuugaccucagaugaccugcugacauuggcagcugauuuggagaaacuaaagucgaaggucaucagaacagaaaggccacuaagcucagguguuuacauggggaauuugagugcacaacaacuugagcaaagaagagcauugcugaacaugauaggcaugguugguggggcucagggcacccaaccuggaagagacggaguuguuagggugugggauguuaagaauccagaucuuuuaaacaaucaguucggcaccaugcccaguuugacauuagcaugucucaccaaacaaggccagguugauuugaaugaugucguccuagcacuaacagaccugggucuaauauacacagcuaaguacccuaauagcuccgaccuggacagacuuucccaaagucacccuauauugaauaugguggacaccaagaagagcuccuugaauauuucugguuacaacuucagcuuaggagcugcagugaaagcuggggcuuguaugcuugauggggggaacauguuggagaccaucaagguuacaccucagacaauggauggcaucuugaagucuauuuugaagguaaaaaaguccuugggaauguuuguuucagacacaccuggugagaggaacccuuaugagaacauacuuuacaagaucugucuuucuggugaugguuggcccuacauagcuucaaggacuucuauuauggguagagcuugggagaauacuacuguggaucucgagucagauggaaaaccacaaaaagugggaacugcuggguccaauaagucuuuacagucagcaggguuuccaacagggcugacuuacucucaguuaaugacacuuaaagacucaaugaugcagcuugacccaagugccaaaaccuggauagacauugaaggucguccagaagacccuguggaaauagcucuuuaccagcccaugucgggcugcuauauacacuucuucagagaaccaacagaccuaaaacaguucaagcaagaugccaaguauucucaugggauugauguaacagaucuuuucucggcucaaccuggauuaaccagugcagucaucgaagcccucccucgcaauaugguacugaccugucaagguucagaugacaucaagcgacucuuggauucccaaggaagaagagacauaaaacuuauugacauugcauugagcaaggcugacucuaggagauuugaaaaugcuguuugggaucagugcaaagaucuaugccauaugcacacuggagugguugucgaaaagaagaaaagaggaggcaaagaagaaaucaccccacauugugcucuaauggacugcauaauguaugaugcagcugugucaggaggacucaacauaccaguuuuaagagcaguccuccccagagacaugguguuuagaaccucaagccccaaggucguccuguaa

SEQ ID NO: 7865 - RNA, 1710 nt, Artificial Sequence
  derived and/or modified CDS sequence (wt) from LASV(Lassa virus/H.sapiens-wt/NGA/2016/ISTH_0621;Clade II)__AVO03544__NP
augagugcuucaaaagaagugaagucguuccuguggacucagucuuugaggagagaauuauccggcuacuguuccaacauaaaauugcagguggucaaggaugcucaggcucuccuacauggucuugauuucucugaagucaguaaugugcaacgacuaaugcgcaagcaaaaaagagaugauggugauuuaaaacgccuuagggaccugaaucaggcagucaacaaccuuguugaacucaagucuacacaacagaaaaguguucucagaguuggaacucucagcucugaugacuuguuaaucuuagcugcugauuuagaaaaguugaaauccaaggucauccguacugaaagaccacuaagcucaggaguuuauaugggaaaucuaagcucucagcaacuugaucagagaagggcucuauugaacaugaucggcaugacugguggcagucaagggacaaacaccggaagagauggcauagugaggauuugggauguuaaaaaugcagaguugcuaaauaaucaguuuggaacaaugccgagcuugaccuuagccugcuuaacuaagcaagggcagguggacuuaaaugaugcuguucaagccuugacggauuuggggcuaauuuacacugcuaaguauccuaacucaucugauuuggacagacuuucucagagucacccuauuuuaaacaugauugacaccaagaagagcucccucaauauuucuggcuauaacuucagucugggugcugcaguaaaggcaggagcuuguaugcuugacggcggcaacauguuggagacaaucaaaguuucaccccaaacuauggauggaaucuugaagucaauuuuaaaggucaaaaagagcuuggggauguuugugucagacaccccaggugagaggaacccauaugagaacauauuauacaaaauuugccucucaggagacggauggccuuauauugcaucuagaacuucaaucacuggcagggcuugggaaaauaccauaguggauuuggaaacagauaacaagucucaaaaaccugggaauagugggucuaauaggucccuacaaucugcugguuuuccugcaggacugacuuauucacagcugaugacccuuaaagauuccauguugcaacuggacccaaaugcuaagacauggauggacauugaggggaggccugaugacccagucgagauagccuuguaucagccgaguucaggcuguuacauucauuucuucagagaaccaacugaucuuaaacaauucaaacaagacgcaaaguacucacauggaauugaugugagugaccuguuugcugcacaaccuggccuaacaagugcuguaauagaggcacucccacggaacauggucauuaccugucaagggucagaagacaucaggaaacuguuggagucacaaggaaggagggauauaaaauugguagacauuuccuuaaguaaaucagacucuagaaaguucgagaacguugucugggaucaguuuaaggaccuuugccauaugcauacaggugucgugguugagaagaagaagaaggguggaaaagaagagaucacaccgcacugugcacugauggauugcaucauguuugaugcagcuguaaugggcgggcucgaugccagagucuuaagagcugugcugcccagggacauggucuucaggacuucaacacccaaagucguccuguaa

SEQ ID NO: 7866 - RNA, 1710 nt, Artificial Sequence
  derived and/or modified CDS sequence (wt) from LASV(Lassa virus/H.sapiens-wt/NGA/2016/ISTH_0701;Clade II)__AVO03630__NP
augagugcuucuaaggaagugaagucauuucucuggacacagucucugaggagggagcuuucagguuauugcuccaauauaaaacuucaaguuguuaaggaugcucaggcucuccuucauggucuugacuuuucugaagucagcaaugugcagcgcuuaaugcgcaaacaaaagagggaugauagugaucugaaacgucucagagauuugaaucaggcugucaacaaucuuguagaacuuaaaucgacacaacaaaagaguaucuugagaguugggaccuugaccucagaugaccugcugauauuggcagcugacuuagagaaacugaaaucgaaggucauuagaacagaaaggccacuaagcucagguguuuauauggggaauuugagcacacagcagcuugagcagagaagagcacugcugaacuugauaggcaugguugguggggcucagggcacccaaccugggagagacggaguugucaggguuugggauguuaagaauccggaccuuuugaacaaccaguucggcaccaugccuagucugacauuggcaugucucaccaaacaaggccaagucgauuugaaugaugccguuuuagcacugacagaccugggccuaauauacacagccaaguacccaaauagcucugaccuggacagacuuucccaaagccauccuauacugaauaugguggacacuaagaagagcuccuugaauauuucugguuucaacuucagcuuaggagcugcagugaaagcuggagcuuguaugcuugauggggggaacauguuggagaccaucaagguuacaccucagacaauggauggcaucuugaagucuauuuuaaagguaaaaagaucuuugggaauguuuguuucggacacaccuggugagaggaacccuuaugagaauauacuuuacaagaucugucuuuccggugacggauggcccuacauagcuucaaggacuucuauuguggguagggcuugggagaauaccacuguggaucucgagucagauggaaaaccgcauaaagugggcacugcuggguccaacaagucuuuacagucagcgggguucccaacagggcugacauauucucaguugaugacacuuaaagacucaaugaugcagcuugacccaagugccaaaaccuggauagacauugaaggucguccagaagacccuguggagauagcccuuuaccaaccuaugucaggcuguuacauacacuucuucagagaaccaacagacuugaaacaguucaagcaagaugccaaauauucucaugggauugauguggcagaucuuuucccugcucaaccuggauugaccagcgcagucauugaagcccucccucgcaauauggugcuaaccugucaagguucagaugauauuaagagacucuuggacucucaaggaagaagggauauaaagcuuauugacauugcacugagcaaggcugacucuaggagauuugaaaaugcuguuugggaucagugcaaagaucuaugccauaugcacacuggagugguugucgaaaagaagaaaagaggaggcaaagaagaaaucaccccgcacugugcuuuaauggacugcauaauguaugaugcagcugugucaggaggacucaauauaccaguuuuaagggcaguucuccccagggacaugguguucagaaccucaagucccaaggucguccuguaa

SEQ ID NO: 7867 - RNA, 1710 nt, Artificial Sequence
  derived and/or modified CDS sequence (wt) from LASV(Lassa virus/H.sapiens-wt/NGA/2016/ISTH_0702;Clade II)__AVO03558__NP
augagugcuuccaaggaagugaagucauuucucuggacacagucauuaaggagggaacuuucagguuauugcuccaauauaaagcuucaaguuguuaaggaugcucaggcucuccuucauggccuugacuuuucugaagucagcaaugugcagcguuuaaugcgcaaacaaaaaagggaugacagugaucugaaacgucucagagaucugaaucaggcugucaacaaucuuguugaacucaaaucaacacaacaaaagaguauccugagaguugggaccuugacuucagaugaucugcugacauuggcagcugacuuagagaaacuaaagucgaaggucauuaggacagaaaggccauugagcucagguguuuauauggggaauuugaguacacaacagcuugagcaaagaagagcauugcugagcaugauagguaugguuggugggacucagggcacccaaccuggaagagacggaguuguuagggugugggauguuaagaauccggaucuuuugaacaaccaguucggcaccaugccuaguuugacauuagcaugucucaccaaacaaggucaaguugaucugaaugaugccguccuggcacuaacagaccuaggucugauauacacagcuaaguacccaaauagcucugaccuagacagacuuucccaaagccauccuauacugaauaugguggacacuaagaagagcuccuugaacauuucugguuacaacuucagcuuaggagcugcagugaaagcuggagcuuguaugcuugauggggggaacauguuggagaccaucaagguuacaccucagacaauggauggcauccugaagucuauuuuaaaggugaaaaaauccuuaggaauguuuguuucagauacaccuggugagaggaacccuuaugagaacauacuuuacaagaucugucuuucuggugacggcuggcccuacauagcuucaaggacuuccauuguggguagagcuugggagaauaccacuguggaucucgagucagauggaaaaccacaaaaagugggcacagcuggguccaacaagucuuuacagucagcaggguuuccaacagggcugaccuauucucaguugaugacacuuaaagacucaaugaugcagcuugacccaagugccaaaaccuggauagacauugaaggucguccagaagacccuguggaaauagcucuuuaucaaccuaugucgggcuguuacauacacuucuuuagagaaccaacagacuuaaaacaauucaagcaggaugccaaauauucucaugggauugauguagcagaucuuuucccugcucaaccugguuugacuagugcagucaucgaagcccucccucgcaauaugguacuuaccugucaagguucagaugauauuaagagacucuuagacucccaaggaagaagagacauaaagcuuauugacauuucacugagcaaggcugacucuaggagauuugaaaaugcuguuugggaucagugcaaagaucuaugccauaugcauacuggagugguugucgaaaagaagaaaagaggagguaaagaagaaauuaccccgcacugugcuuuaauggauugcauaauguaugaugcagcugugucaggaggacucaauauaccaguuuuaagagcaguucuccccagagacaugguguucagaaccucaagccccaaggucguccuguaa

SEQ ID NO: 7868 - RNA, 1710 nt, Artificial Sequence
  derived and/or modified CDS sequence (wt) from LASV(Lassa virus/H.sapiens-wt/NGA/2016/ISTH_0717;Clade II)__AVO03548__NP
augagcguuuccaaagaagugaagucauucuuguggacucagucucugagaagagagcuaucaggcuacuguuccaacauaaaaguucaggugguuaaggaugcucaagcucuccuucaugguuuggacuuuucugaggucagcaacguccagcguuugaugcgcaaacaaaagagggacgauggugaccucaaacggcuaagagaucucaaucaagcagucaacaaccuuguugagcuuaagucaacucagcagaaaagugucuugagggucggaacccuaagcucggaugaccuauugguccuggcugcugaucuggaaaaacugaagucaaaaguuauuaggacagagagaccccugagcucaggaaucuacauggggaaucuaaguucacagcagcuugaucagagaaaggcccuccucaacaugauuggcaugaccggugggaaugugggaagaaauaccacuggugacgguguugugaggguuugggaugucaagaaugcggaguugcucaacaaucaguucggaacaaugccaaguuugacuuuggcaugucugaccaaacaaggacagguggauuuaaaugaugcuguucuagcauuaacagacuugggauugaucuacacagcaaaauauccuaauucaucugauuuggauagguuagcccagagucauccgauacugagcaugauugacacuaagaagagcucucucaacauuucuggcuacaauuucagcuugggggcugcugucaaggcaggggccuguaugcuugauggaggcaacauguuggaaaccauaaagguuucaccucaaaccauagauggcauccugaagucaauucuaaaaguuaagagaaguuugggaauguucaucucagauacgccaggcgaaaggaaucccuaugagaacauacuguauaaaaucugucucucaggagauggguggccuuauauugcaucaagaaccucuauugugggaagagcuugggagaacacugugguugacuuagagucagauaacaaaccacaaaagaccgggaaugggggcucaaauaagucacugcaguccgcaggcuuugcugcaggacuaacuuacucccaacugaugacccuaaaggacucaaugcuucaacuugaccccaaugcaaagaccuggauggauauugaaggaagaccagaagauccaguugaaauugcccuguaucaaccaaguucagguugcuacauacauuucuuuagggaaccaacagauuugaaacaguucaaacaggaugcaaaauauucacaugguauugauguaacagauuuguuugcugcacagccaggguugacaagugcagugauagaggcucuuccuaggaacauggucaucacuugccaagggucagaagacaucagaaaacuucuggagucacaaggaagaagggauauaaagcugauugauauuucccucagcaaaguggacucaagaaaguucgagaaugcugugugggaucaauucaaagauuuaugucacaugcacacugggauuguuguggagaagaaaaagagaggaggcaaagaagaaauaaccccucauugugcauugauggacugcaucauguuugaugcugcagucucuggaggaguugaugcaaagguccugagggcugugcuccccagagauaugguguucagaacuucgacacccaaagucguccuguaa

SEQ ID NO: 7869 - RNA, 1710 nt, Artificial Sequence
  derived and/or modified CDS sequence (wt) from LASV(Lassa virus/H.sapiens-wt/NGA/2016/ISTH_0753;Clade II)__AVO03610__NP
augagugcuuccaaggaagugaagucauuucucuggacacagucauugaggagggagcuuucagguuacugcuccagcauaaaacuucaaguuguuaaggaugcucaggcucuccuucauggucuugacuuuucugaagucagcaaugugcaacgcuuaaugcgcaaacaaaagagggaugauagugaccugaaacgucuuagagauuugaaucaggcugucaacaaucuuguagaacucaaaucgacacaacaaaagagcaucuuaagaguugggaccuuaaccucagaugaccugcugacauuggcagcugacuuagagaaauuaaagucgaaggucauuagaacagaaaggccacuaagcucagguguuuacauggggaauuugaguacacagcagcuugagcaaagaagagcauugcugaacaugauaggcaugguugguggggcucagggcacccaaccuggaagagacggaguuguuagggugugggauguuaagaauccggaucuucugaacaaccaguucggcaccaugccuaguuugacauuggcaugucucacuaagcaaggucaaguugauuuaaaugaugccgucuuagcauuaacagaccugggucuaauauauacagcuaaguauccaaauagcuccgaccuggacagacuuucccaaagccaucccauacugaacaugguggacaccaagaagagcuccuugaacauuucugguuacaacuucaguuuaggagcugcagugaaagcuggagcuuguaugcuugauggggggaacauguuggagaccaucaagguuacaccucagacaauggacggcaucuugaagucuguuuuaaagguaaagagaucuuugggaauguuuguuucagauacaccuggugagaggaacccuuaugagaacauacuuuacaagaucugucuuuccggugacggcuggccuuacauagcuucgaggacuucuauuguggguagagcuugggagaauaccacuguggaucucgagucagauggaaaaccacaaaaagugggugcugcuggguccaacaagucucuacagucagcgggguucccaacaggguugaccuauucucaguugaugacacuuaaagacucaaugaugcagcuugacccaagugccaaaacauggauagacauugaaggucguccagaagacccuguggaaauagcucuuuaccaaccuaugucgggcuguuacauacacuucuucagagaaccaacagauuuaaaacaguucaagcaagaugccaaauauucucacgggauugauguggcagaucuuuucccugcucaaccugguuugaccagugcagucauugaagcccucccucgcaauaugguacugaccugucaagguucagaugauauuaagagacucuuggacucucagggaagaagagacauaaagcuuauugacauugcacugagcaaggcugauucuaggagauuugaaaaugcuguuugggaucagugcaaagaucuaugccauaugcauacuggagugguuguugaaaagaagaaaagaggaggcaaagaagaaauuaccccgcacugugcuuuaauggacugcauaauguaugaugcagcugugucaggaggacucaauauaccaguuuuaagagcaguucucccuagagacaugguguuuagaaccucaagccccaaggucguccuguaa

SEQ ID NO: 7870 - RNA, 1710 nt, Artificial Sequence
  derived and/or modified CDS sequence (wt) from LASV(Lassa virus/H.sapiens-wt/NGA/2016/ISTH_0759;Clade II)__AVO03594__NP
augagugcuuccaaggaaguaaagucauuccuuuggacacagucauugaggagggagcucucagguuacugcuccagcauaaagcuucaaguuguuaaggaugcucaggcucuccuucauggucuugacuuuucugaagucagcaauguucagcguuugaugcgcaaacaaaaaagggacgacagugaucugaaacgucucagagauuugaaccaggcugucaacaaucuuguagaacucaaaucaacacaacaaaagaguauccugagaguugggaccuugacuucagaugaccugcugacauuggcagcugacuuagagaaacuuaagucgaaggucaccagaacagaaagaccacuaagcucagguguuuacaugggaaauuugaguacacagcaacuugagcaaagaagagcauuguugaacaugauaggcaugguugguggggcucagggaacccaaccuggaagggacggaguuguuagggugugggaugucaagaauccggaucuuuuaaacaaccaauucggcaccaugccuagucugacauuagcaugucuuaccaaacaaggucaaguugauuuaaaugaugccgucuuagcacuaacagaccugggucuaauauacacagcuaaguacccaaacagcuccgaccuggacagacuuucccaaagccauccuauacugaauaugguggacacuaagaagagcuccuugaauauuucugguuacaacuucaguuuaggagcugcagugaaagcuggagccuguaugcuugauggggggaacauguuggaaaccaucaagguuacaccucagacaauggauggcaucuugaaaucuaucuuaaagguuaaaagaucuuugggaauguuuguuucagaugcaccuggugagaggaacccuuaugagaacauacuuuacaagaucugucucucuggggacgguuggcccuacauagcuucaagaacuuccauuguagguagagcuugggagaacaccacuguggaucucgagucagauggaaaaccacaaaaggugggcacugcuggguccaacaagucuuuacagucagcaggguuuccaacaggguugaccuauucucaguugaugacacuuaaagacucaaugaugcaacuugacccaagugcuaaaaccuggauagacauugaaggucgcccagaagacccuguggaaauagcucuuuaccaaccuaugucgggcuguuacauacacuucuucagagaaccaacagacuugaaacaguucaagcaagaugccaaauauucucaugggauugauguagcagaucuuuucccugcucaaccuggcuugaccagugcagucauugaagcccuuccucgcaauaugguacugaccugucaggguucagacgauauuaagaaacucuuagauucccaaggaagaagggacauaaagcuuauugacauugcacugagcagggcugacucuaggagguuugagaaugcuguuugggaucaaugcaaggaucuaugccauaugcauacuggggugguuguugaaaagaagaaaagaggagguaaagaagaaauuaccccgcauugugcucuaauggauugcauaauguaugaugcagccgugucaggaggacucaauauaccaguuuugagagcaguucuccccagagacaugguguuuagaacaucaagccccaaggucguccuguaa

SEQ ID NO: 7871 - RNA, 1710 nt, Artificial Sequence
  derived and/or modified CDS sequence (wt) from LASV(Lassa virus/H.sapiens-wt/NGA/2016/ISTH_0777;Clade II)__AVO03616__NP
augagugcuuccaaggaagugaaaucauuccuuuggacacagucacugagaagagagcuuucaggcuacugcuccaauauaaaacuccaaguagucaaggaugcucaggcccuucuacauggucucgacuucucagaggucagcaauguccagcgcuugaugcgcaaacagaaaagggaugacggcgaucuaaaacgucuuagagauuuaaaucaggcaguuaacaaccuuguugagcucaagucaacacaacaaaagaguguucugagaguuggaacacugaccucagacgacuuguugacuuuggcagcugaucuagagaaauugaagucaaaggucauuaggacagaaaggccgcuaaguucagguguguacauggggaacuuaagcacacaacaacuugagcagaggaaggugcuguugaguaugauaggcaugguugguggcacucagagagcccaaccuggaaaagacggaguugucagagugugggacguaaaaaacccggaccuccucaacaaccaauuuggcaccaugccuaguuuaacacuagcaugucucacuaaacagggucaaguugacuuaaaugauaccguuuuggcgcuaacagacuuaggguuaauauacacagcuaaauacccuaauaguucugaccuagacaggcuuucccagagccauccuauauugaacaugguggacaccaagaagagcucccuaaacauuucugguuauaauuucaguuuaggagcugcagugaaggccggagccuguaugcuugauggggguaacauguuggagacuaucaaggugacaccucagacaauggacggcauucugaaguccauuuugaaggugaagaggucccuggggauguuuguuucagacacaccuggugaaagaaacccuuaugaaaacauacuuuauaagauuugccucuccggggacggcuggcccuacauagcuucaagaaccuccauuguggguagagcuugggagaacaccacuguggaucuugagucagaugggaaaccacagaaaguggguacugcuggauccaacaaaucucugcaaucugcaggguucccaacagggcugacuuacucucaacuaaugacacucaaagauucaaugaugcaacuugacccaagugcuaaaaccuggauagacauugaaggucguccagaagacccuguugagauagcccuuuaccaaccugugucaggcuguuacauacauuucuucagagaaccaacggauuuaaaacaguuuaagcaagaugccaaauauucucaugggauugauguaacagaucucuuuucugcucagccuggucuaaccagugcagucauugaggcccucccccguaacaugguguuaacgugucaaggcucagacgauauuaaaaaacuuuuagauucucaagggagaagggacaucaagcucaucgacaucucauuaagcaaguuugauucuaggaaauuugaaaaugcugucugggaucaguguaaagauuuaugucacaugcacacuggaguagucguugagaaaaagaagagaggaggcaaagaggagauuacuccacauugugcucuaauggauugcauaauguuugacgcagcugugucaggaggacucaauauaccaaucuugagggcuguucucccaagagacaugguguucagaacuucaagucccaaagucguccuguaa

SEQ ID NO: 7872 - RNA, 1707 nt, Artificial Sequence
  derived and/or modified CDS sequence (wt) from LASV(Lassa virus/H.sapiens-wt/NGA/2016/ISTH_0779;Clade II)__AVO03656__NP
agugucuccaaagaagugaaaucauuccuuuggacacagucguuaaggagagagcuuucagguuacugcucaaacauaaaacuucagguugucaaagacgcucaggcccuucuucacggucuugauuuuucugaaguuagcaaugugcaacgucugaugcguaaacaaaagagggaugacaaugauuuaaaacgucuuagagacuuaaaucaggcagugaacaaccuuguugaacuaaagucagugcaacaaaagagcaucuugagaguuggaacauugagcucagaugaccucuugauacuggcagcugaucuggaaaaguugaaaucuaaggugaucagaacagagaggccacugagcucagguguguauauggggaaccugaguucacaacaacuugagcagaggaaagcauuauuaaacaugauaggcaugacugguggcucccaaggugcucaaccuggaagagacgggguugucagagugugggaugugaagaacucagaccuccugaacaaccaauucggcaccaugccaaguuugacuuuggcaugccucaccaaacaaggucaaguugaccuuaaugaugcuguuuuggcauuaacagacuuaggacugauauacacagccaaguacccuaauacuucugauuuggacagguugucucaaagccauccuauacugaacaugguggacacuaagaaaagcuccuuaaacaucuccggcuauaauuucaguuugggagcugcagugaaggcuggggccugcaugcuugauggaggcaacaugcuggagacuauuaaaguuacaccucagacgauggauggcauucuuaaauccauucugaaagugaaaagagcccugggaauguuuguuucagacacaccuggugaaaggaaucccuaugaaaauauacuuuacaaaauuugccucucuggagaaggauggcccuacauagcaucaaggaccuccauuacagggagagcuugggaaaacaccauuguggaucuugaaucggacagcaaaccgcagaagaugggcaccacagggucaaacaagucccugcaaucugcaggguucccagcaggguuaaccuacucucaguugaugacacuuaaagacucaaugaugcagcuagacccaagugcaaaaacuuggauagacauugaaggucgcccagaagaccccguggagauugcccuuuaccagccuauuucaggcuguuauauacacuucuucagagagccaacagacuuaaaacaguucaagcaggaugcaaaguauucacaugggauugauguggcagaucuuuucucugcccaaccuggccugacuagcgcagucauugaggcucucccucgcaauaugguccugaccugucaaggcucagaugauaucaagaaacuuuuggacucucaaggaaggagggacauaaagcucauugacaucucauugaacaaagcugauucuagaagauuugagaaugcugucugggaccagugcaaggaucugugccacaugcacacugggguaguuguugagaaaaagaaaagaggggguaaggaggagaucacuccacauugugccuuaauggacuguauaauguucgaugcagccgugucaggagggcuuaauauaccaaucuugagggcugugcuuccaagggacaugguauucagaaccucaagccccaaagucguccuguaa

SEQ ID NO: 7873 - RNA, 1710 nt, Artificial Sequence
  derived and/or modified CDS sequence (wt) from LASV(Lassa virus/H.sapiens-wt/NGA/2016/ISTH_0917;Clade II)__AVO03536__NP
augagugcuucgaaagaggugaagucauuccuauggacucagucucugagaagagagcuaucuggcuacugcucuaauauaaaacuacaaguggucaaggaugcucaagcccucuuacauggccuugacuuuucugaggucagcaaugugcaacgacugaugcgcaagcagaagagggaugauagugaccugaaacgccucagagacuuaaaucaggcagucaauaaccuugucgagcugaaauccacacaacagaaaagcauuuuaagaguugggacucucaguucugaugaucuguugaccuuggcuacugacuuagagaaguugaaaucaaaggugauucgcacugaaagaccgcugagcucaggaguuuauauggguaaccugagcacccagcaacuugaccagaggagagccuugcugaacaugaucgguaugguugguggcagucaaggaacaagugccggaagagaugguaucguaagagucugggacguaagaaauccggaacuauuaaauaaucaguuugggacaaugccaagcuugacucuagcuuguuuaacuaaacaaggacagguagacuugaaugaugcuguucaggcccugacagauuuaggacugauuuacacugcaaaguacccaaauucaucugacuuagauagacuuucccagagccaucccauacuaaacaugauugacaccaaaaagaguucuaucaacaucucuggcuacaauuuuagucugggugcugcaguaaaggcaggggccuguaugcuggaugguggcaacauguuggagacaaucaagguuucaccucaaucuauagaugggaucuugaaaucgauccuaaagguuaaaagaacccuagggauguuugugucagacacuccaggugagagaaacccauaugagaauauacuguacaagaucugccuaucaggagauggauggccuuacauugcgucaagaaccucaaucacugguagagccugggaaaacacuguaguggauuuagagucagaugacaagccuaaaaaacccgggaacaacgaauccaacagaucucuacagucagcuggcuucccagcaggacugaccuacucccagcucaugacucucaaagauucuauguugcaacuggacccaaaugccaaaaccuggauggacauugaagggagaccagaugauccgguugagauagccuuauaccagccaaacucagguugcuauauucacuucuucagagaaccgacugaucuaaagcaauucaaacaagaugcuaaauacucacauggaaucgacaucggugauuuguuugcuucacaaccuggucugacaagugcagugauagaagcacuuccacggaauaugguuaucacaugccaggggucggaggacaucaagaaacuccuagagucacaagggagaaaggauauaagguugguagacauuucucucaguaaagcagauucuaggaaguuugaaaaugcugucugggaucaguacaaagaccuaugucacaugcacacaggcaucgugguugagaagaagaagaaagguggcaaggaggagauaacaccucauugugcacuaauggacugcaucauguuugaugcagcugugauggguggacucgaugcgaaagucuugagggcuguuuuacccagagacauggucuuuagaacuucaacacccagagucguccuguaa

SEQ ID NO: 7874 - RNA, 1710 nt, Artificial Sequence
  derived and/or modified CDS sequence (wt) from LASV(Lassa virus/H.sapiens-wt/NGA/2016/ISTH_0919;Clade II)__AVO03660__NP
augagugcuucuaaggaagugaagucauuucucuggacacagucauugaggagggagcuuucagguuauugcuccaacauaaaacuucaaguuguuaaggaugcucaggcucuccuucauggucuugacuuuucugaagucagcaaugugcagcgcuuaaugcgcaaacaaaagagggaugauagugaucugaaacgucucagagauuugaaucaggcugucaacaaccuuguagaacuuaaaucgacacaacaaaagaguaucuugagaguugggaccuugaccucagaugaccugcugacauuggcagcugacuuagagaaacuaaagucaaaggucauuagaacagaaaggccacuaagcucagguguuuauauggggaauuugaguacacagcagcuugagcagagaagagcauugcugaacuugauaggcaugguugguggggcucagggugcccaaccuggaagggacggaguuguuaggguuugggauguuaagaauccagaccuuuugaacaaccaguucggcaccaugccuagucugacauuggcaugucucaccaaacaaggucaaguugauuugaaugaugucgucuuagcacugacagaccugggccuaauauacacagccaaguacccaaauagcucugaccuagacagacuuucccaaagccauccuauacugaauaugguggacacuaagaagagcuccuugaacauuucugguuucaacuucagcuuaggagcugcagugaaagcuggagcuuguaugcuugauggggggaacauguuggagaccaucaagguuacaccucaaacaauggauggcaucuugaagucuauuuuaaagguaaaaaaaucuuugggaauguuuguuucggacacaccuggugagaggaacccuuaugaaaauauacuuuacaagaucugucuuuccggugacggauggccuuacauagcuucaaggacuuccauuguggguagggcuugggagaauaccacuguggaucucgagucagauggaaaaccgcauaaagugggcacugcuggguccaacaagucucuacagucagcgggguucccaacagggcugacuuauucucaguugaugacacuuaaagacucaaugaugcagcuugacccaagugccaaaaccuggauagauauugaaggucguccagaagacccuguggagauagcccuuuaccaaccuaugucaggcuguuacauacacuucuucagagaaccaacagacuugaaacaguucaagcaagaugcuaaauauucucaugggauugauguggcagaucuuuucccugcucaaccugguuugaccagcgcaguuaucgaagcccucccucgcaauaugguucuaaccugucaagguucagaugauauuaagagacucuuagacucccaaggaagaagggauauaaagcuuauugacauugcacugagcaaggcugacucuaggagauuugaaaaugcuguuugggaucagugcaaagaucuaugccauaugcacacuggagugguugucgaaaagaagaaaagaggaggcaaagaagaaaucaccccgcacugugcuuuaauggacugcauaauguaugaugcagcugugucaggaggacucaauauaccaguuuugagggcaguucuccccagggacaugguguuuagaaccucaagucccaaggucguccuguaa

SEQ ID NO: 7875 - RNA, 1710 nt, Artificial Sequence
  derived and/or modified CDS sequence (wt) from LASV(Lassa virus/H.sapiens-wt/NGA/2016/ISTH_1006;Clade II)__AVO03644__NP
augagugcuucuaaggaagugaagucauuucucuggacacagucauuaaggagggaacuuucagguuauugcuccaauauaaagcuucaaguuguuaaggaugcucaggcucuccuucauggccuugacuuuucugaagucagcaaugugcagcguuuaaugcgcaaacaaaaaagggaugacagugaucugaaacgucucagagaucugaaucaggcugucaacaaucuuguugaacucaaaucaacacaacaaaagaguauccugagaguugggaccuugacuucagaugaucugcugacauuggcagcugacuuagagaaacuaaagucgaaggucauuaggacagaaaggccauugagcucagguguuuauauggggaauuugaguacacaacagcuugagcaaagaagagcauugcugaacaugauaggcaugguuggugggacucagggcacccaaccuggaagagauggaguuguuagggugugggauguuaagaauccggaucuuuugaacaaccaguucggcaccaugccuaguuugacauuagcaugucucaccaaacaaggucagguugaucugaaugaugccguccuggcacuaacagaccuaggucugauauacacagcuaaguacccaaauagcucugaccuagacagacuuucccaaagccauccuauacugaauaugguggacacuaagaagagcuccuugaacauuucugguuacaacuucagcuuaggagcugcagugaaagcuggagcuuguaugcuugauggggggaacauguuggagaccaucaagguuacaccucagacaauggauggcauccugaaguccauuuuaaaggugaaaaaauccuuaggaauguuuguuucagauacaccuggugagaggaacccuuaugagaacauacuuuacaagaucugucuuucuggugacggcuggcccuacauagcuucaaggacuuccauuguagguagagcuugggagaauaccacuguggaucucgagucagauggaaaaccacaaaaggugggcacagcuggguccaacaagucuuuacagucagcaggguuuccaacagggcugaccuauucucaguugaugacacuuaaagacucaaugaugcagcuugacccaagugccaaaaccuggauagacauugaaggucguccagaggacccuguggaaauagcucuuuaccaaccuaugucgggcuguuacauacacuucuucagagaaccaacagacuuaaaacaauucaagcaggaugccaaauauucucaugggauugauguagcagaucuuuucccugcucaaccugguuugacuagugcagucaucgaagcccucccucgcaauaugguacugaccugucaagguucagaugauauuaagagacucuuagacucccaaggaagaagagacauaaagcuuauugacauuucacugagcaaggcugacucuaggagauuugaaaaugcuguuugggaucagugcaaagaucuaugccauaugcauacuggagugguugucgaaaagaagaaaagaggagguaaagaagaaaucaccccgcacugugcuuuaauggauugcauaauguaugaugcagcugugucaggaggacucaauauaccaguuuuaagagcaguucuccccagagacaugguguucagaaccucaagucccaaggucguccuguaa

SEQ ID NO: 7876 - RNA, 1710 nt, Artificial Sequence
  derived and/or modified CDS sequence (wt) from LASV(Lassa virus/H.sapiens-wt/NGA/2016/ISTH_1026;Clade II)__AVO03590__NP
augagugcuucuaaggaagugaagucauuucucuggacacagucuuugaggagggagcuuucagguuauugcuccaauauaaaacuucaaguuguuaaggaugcucaggcacuccuucauggucuugacuuuucugaagucagcaaugugcagcgcuuaaugcgcaaacaaaagagggaugacagugaucugaaacgucucagagauuuaaaucaggcugucaacaaucuuguggaacuuaaaucgacacaacagaagaguauuuugagaguugggaccuugaccucagaugaccugcugacacuggcagcugacuuagagaaauuaaagucgaaggucauuagaacagaaaggccacuaagcucagguguuuauauggggaauuugagugcacagcagcuugagcagagaagggcauugcuaaacuugauaggcaugguugguggggcucagggcacccaaccuggaagagacggaguuguuaggguuugggauguuaagaauccggaccuuuugaacaaccaguucggcaccaugccuagucugacauuggcaugucucaccaaacaaggucaaguugauuuaaaugaugccgucuuagcacugacagaccugggccuaauauacacagccaaguacccaaauagcuccgaccuggacagacuuucccaaagccauccuauacugaacaugguggacacuaagaagagcucccugaacauuucugguuucaacuucagcuuaggagcugcagugaaagcuggagccuguaugcuugauggggggaacauguuagaaaccaucaagguuacaccucagacaauagauggcaucuugaagucuauuuuaaagguaaaaaaaucuuugggaauguuuguuucggacacaccuggcgagaggaacccuuaugagaauauacuuuacaagaucugucuuuccggcgacggauggccuuacauagcuucaaggacuucuauuguggguagggcuugggagaauaccacuguggaucucgagucagauggaaaaccgcauaaagugggcacugcuggguccaacaagucuuugcagucagcgggguucccaacagggcugacuuauucucaauugaugacacuuaaagacucaaugaugcagcuugacccaagugccaaaaccuggauagacauugaaggucguccagaagacccuguggagauagcccuuuaucaaccuaugucaggcuguuacauacacuucuucagagaaccaacagacuugaaacaguucaagcaagaugccaaauauucccaugggauugauguggcagaucuuuucccugcucaaccugguuugaccagcgcagucauugaagcccucccccgcaauauggugcuaaccugucaagguucagaugauauuaagagacucuuagacucccaaggaagaagggauauaaagcuuauugacauugcacugagcaaagcugacucuaggagauuugaaaaugcuguuugggaucagugcaaagaucuaugccauaugcacacuggagugguugucgaaaagaagaaaagaggaggcaaagaagaaaucaccccgcacugugcuuuaauggacugcauaauguaugaugcagcugugucaggaggacucaacauaccaguuuuaagggcaguucucccuagggacaugguguuuagaaccucaagucccaaggucguccuguaa

SEQ ID NO: 7877 - RNA, 1710 nt, Artificial Sequence
  derived and/or modified CDS sequence (wt) from LASV(Lassa virus/H.sapiens-wt/NGA/2016/ISTH_1070;Clade II)__AVO03652__NP
augagugcuuccaaggaagugaagucauuucucuggacacagucauugaggagggagcuuucagguuacugcuccaacauaaagcuucaaguuguuaaggaugcucaggcucuccuucauggucuugacuuuucugagguuagcaaugugcagcgcuugaugcgcaaacaaaagagggaugauggugaucugaaacgucucagagaucugaaucaggcugucaacaaucuuguugaacucaaaucaacgcaacaaaagagcgucuugagaguugggaccuugaccucagaugaccugcugacauuggcagcugauuuagagaaacuaaagucgaaggucaucagaacagaaaggccacuaagcucagguguuuauauggggaauuugaguacacagcaacuugagcaaagaagggcauugcuaagcaugauaggcaugguugguggggcucagggcacccaaccuggaagagacggaguuguuagggugugggauguuaagaauccagaucuuuugaacaaccaguucggcaccaugccuagucugacauuagcaugucuaacuaaacagggucaaguugauuugaaugaugucgucuuagcacuaacagaccugggucuaauauacacagcuaaguacccuaauagcuccgaccuggacagacuuucccaaagccauccuauauugaauaugguggacacuaagaagagcuccuugaauaucucugguuacaacuuuagcuuaggagcugcagugaaagcuggagcuuguaugcuugauggggggaacauguuggagaccaucaaggucacaccucagacaauggauggcaucuugaaguccauuuuaaaggugaaaaaauccuugggaauguuuguuucagauacaccuggugagaggaacccuuaugagaacauacuuuacaagaucugucuuucuggugacggcuggcccuacaucgcuucaaggacugcuauuguggguagagcuugggaaaauacuacuguagaucucgagucagauggaaaaccacagaaagugggagcuacuggguccaacaagucuuuacagucagcaggguuuccaacaggguugacuuauucucaguugaugacacuuaaagacucaaugaugcagcuugacccaagugccaaaaccuggauagacauugaaggucguccagaagacccuguggagauagcucuuuaccagccuaugucgggcugcuauauacacuucuucagagaaccaacagacuuaaaacaguucaagcaagaugccaaauacucucaugggauugauguaacagaucuuuucucugcucaaccuggauuaaccagugcagucauugaagcucucccucgcaauauggugcugaccugucaagguucagaugauauuaagcgacucuuggauucccaaggaagaagggacauaaagcuuauugauauugcauugagcaaggcugacucuaggagauuugagaaugcuguuugggaucagugcaaagaucuaugccauaugcacacuggaguggucgucgaaaagaagaaaagaggaggcaaagaagaaauuaccccacacugugcucuaauggauugcauaauguaugaugcagcugugucaggaggucucaauauaccagucuugagagcaguccuccccagggacaugguguuuagaaccucaagccccaaggucguccuguaa

SEQ ID NO: 7878 - RNA, 1710 nt, Artificial Sequence
  derived and/or modified CDS sequence (wt) from LASV(Lassa virus/H.sapiens-wt/NGA/2016/ISTH_1150;Clade II)__AVO03628__NP
augagugcuuccaaagaaguaaagucauuccuuuggacacagucauugaggagggagcucucagguuacugcuccaguauaaagcuucaaguuguuaaggaugcucaggcucuccuucauggucuugauuuuucugaagucagcaauguucagcgcuugaugcgcaaacaaaaaagggacgacagugaucugaaacgucucagagaucugaaccaggcuguuaacaaucuuguagaacucaaaucaacacaacaaaagaguauucuaagaguugggaccuugaccucagaugaucugcugacauuggcagcugacuuagagaaacuuaagucgaaggucaucagaacagaaaggccacuaagcucggguguguacauggggaacuuaagcacacaacaacuugagcagaggagggcguuguugaguaugauaggcaugguugguggugcccaagggacccaaccuggaagagacggaguugucagagugugggauguaaaaaacccggaccuccuaaacaaccaauuuggcaccaugccuaguuuaacgcuagcaugucucacuaaacagggucaaguugacuugaaugacacuguucuagcgcuaacagacuuaggguugauauacacagccaaauacccuaauaguucugaccuagacagacuuucccagagccaucccauauugaacaugguggacaucaagaagaguucccuaaauauuucuggcuacaauuuuaguuugggagcugcagugaaggccggagcuugcaugcucgauggggguaacauguuggaaacuaucaaaguuacgccccagacaauggacggcaucuugaaguccauucuaaaggugaaaagaucccugggaauguuugucucagacacaccuggcgagagaaacccuuaugaaaacauacuuuacaaaauuugucucucuggggacgguuggccuuauauagcuucaagaacuuccauuguggguagagcuugggagaauaccacuguggaucucgagucagauggaaaaccacagaaagugggcacugcuggguccaacaagucucugcaaucugcaggguucccaacaggguuaacuuauucucaacuaaugacacucaaagauucaaugaugcaacucgacccaagugccaaaaccuggauagacauugaaggucguccagaagacccuguugaaauagcccuuuaccaaccuaugucagguuguuauauacauuucuucagagaaccaacggauuuaaaacaauucaaacaagaugccaaauauucucaugggauugaugugacagaccucuuuucugcucagccuggucuaaccagugcagucauugaggcccucccccgcggcaugguguuaacaugucaagguucagacgacauuaaaaagcucuuagauucucaagggagaagggacaucaagcucaucgauaucucauuaaguaaggcugauucuaggagauuugaaaaugcugucugggaucagugcaaagaucugugucacaugcacacuggggugguuguugagaaaaagaagagaggaggcaaagaggagaucacuccacauugugccuuaauggauugcauaauguuugaugcagcugugucagggggacucaacauaccgaucuugagggcuguucucccaagagacaugguguucagaacuucaagucccaaagucguccuguaa

SEQ ID NO: 7879 - RNA, 1710 nt, Artificial Sequence
  derived and/or modified CDS sequence (wt) from LASV(Lassa virus/H.sapiens-wt/NGA/2016/ISTH_1174;Clade II)__AVO03556__NP
augagugcuucuaaggaagugaagucauuucucuggacacagucauugaggagggagcuuucagguuauugcuccaacauaaaacuucaaguuguuaaggacgcucaggcucuccuucauggucuugacuucucugaagucaguaaugugcagcguuuaaugcgcaaacaaaagagggaugauagugaucugaaacgucucagagacuugaaucaggccgucaacaaucuuguagaacucaagucgacacaacaaaagagcaucuugagaguugggaccuugaccucagaugaccuacugacauuggcagcugacuuagagaaacuaaaaucgaaggucauuagaacagaaaggccacuaagcuccgguguuuauauggggaauuugaguacacagcagcuugagcaaagaagagcacugcugaacaugauagguaugguugguggggcucaaagcacccaaccuggaagagacggaguuguuagggugugggauguuaagaauccggaucuuuuaaacaaucaguucggcaccaugccuagucugacacuggcaugucucaccaaacaaggucaaguugauuugaaugaugccgucuuggcacuaacagaucuggguuuaauauauacagccaaguauccaaauagcuccgaccuggacaggcuuucccaaagccauccuauacugaauaugguggacacuaaaaagagcuccuugaacauuucugguuacaauuucagcuuaggagcugcagugaaagcuggagcuugcaugcuugauggggggaauauguuggagaccaucaagaucacaccccagacaauggauggcaucuugaaguccauuuuaaaggugaaaagaucuuugggaauguuuguuucagauacaccuggagagaggaacccuuaugagaacauacuuuacaaagucugucuuuccggugacggcuggccauauauagcuucaaggacuucuauuguagguagagcuugggagaacaccacuguagaucucgaaucagauggaaagccacaaaagguggguacuguuggguccaacaagucucuacaaucagcgggguuuccaacagggcugaccuauucucaguugaugacacuuaaagauucaaugaugcagcuugacccaagugccaagaccuggauagacauugaaggucguccagaagacccuguggaaauagcucuuuaccaaccuaugucgggcuguuacauacacuucuucagagaaccaacagauuuaaaacaguucaagcaagaugccaaauauucucaugggauugauguggcagaucuuuucccugcucaaccugguuuaaccagugcaguuauugaagcccucccucgcaauaugguacugaccugucaagguucagaugacauuaagagacuuuuggacucucaaggaagaagggacauaaagcuuauugacauugcgcugagcaaggcugacucuaggagauucgagaaugcuguuugggaucagugcaaagaucuaugccacaugcauacuggagugguuguugaaaagaagaaaagaggggguaaagaagaaauuacaccgcacugugcucuaauggacugcauaauguaugaugcagcugugucaggaggacucaauauaccaguuuuaagagcaguucucccuagagacaugguguuuagaaccucaagcccuaaagucguccuguaa

SEQ ID NO: 7880 - RNA, 1710 nt, Artificial Sequence
  derived and/or modified CDS sequence (wt) from LASV(Lassa virus/H.sapiens-wt/NGA/2016/ISTH_1207;Clade II)__AVO03600__NP
augagugcuucuaaggaagugaagucauuucucuggacacagucauugaggagggagcuuucagguuauugcuccaacauaaaacuucaaguuguuaaggaugcucaggcucuccuucauggucuugacuucuccgaagucagcaaugugcagcgcuuaaugcgcaaacaaaaaagggaugauagugaucugaaacgucucagagauuugaaucaagcugucaacaaucuaguagaacucaagucaacacagcaaaagaguaucuugagaguuggaaccuugaccucagaugaccugcugauauuggcagcugacuuagagaaacuaaagucgaaggucauuagaacagaaaggccacuaagcucagguguuuacauggggaauuuaaguacacagcagcuugagcagaggagagcauugcugaacaugauaggcaugguugauggggcucaaggcacccagccuggaagagacggaguuguuagggugugggauguuaaaaauccggaucuuuugaacaaccaguucggcaccaugccuagucugacauuagcgugucucaccaaacaaggucaaguugauuugaaugaugccgucuuagcacuaacagaccugggucuaauauacacagcuaaguacccaaauagcuccgaccuggauagacuuucccaaagccaucccauacugaauaugguggacacuaagaaaagcuccuugaacauuucugguuacaacuucagcuuaggagcugcagugaaagcuggggcuugcaugcuugauggggggaacauguuggagaccauuaagguuacaccucagacaauggauggcaucuugaagucuauuuuaaaggugaaaaaaucuuugggaauguuuguuucagauacaccuggugagaggaacccuuaugagaacauacuuuacaagaucugucuuucuggugacggcuggcccuacauagcuucaaggacuucuauuguggguagagcuugggagaauacuacuguggaucucgagucagauggaaaaucgcaaaaagugggcacugcuggguccaacaaaucuuuacagucagcgggguucccaacagggcuaaccuauucucaguugaugacacuuaaggacucaaugaugcagcuugacccaagugccaaaaccuggauagacauugaaggucguccagaagaccccguggaaauagcucuuuaccaaccuaugucgggcuguuacauacacuucuucagagaaccaacagacuuaaaacaguucaagcaagaugccaaauauucucaugggauugauguggcagaucuuuucccugcucaaccugguuugaccagugcagucauugaagcccucccucgcaauaugguacugaccugucaagguucagaugauauuaagagacucuuggacucccaaggaagaagggacauaaagcuuauugauauugcacuaagcaaggcugacuccaggagauuugaaaaugcuguuugggaucaaugcaaagaccugugccauaugcauacuggagugguugucgaaaagaagaaaagaggaggcaaagaagaaauaaccccgcacugugcuuuaauggacugcauaauguaugaugcagcuguaucaggaggacucaauauaccaguuuugagagcaguucuccccagggacaugguguucagaaccucaagccccaaggucguccuguaa

SEQ ID NO: 7881 - RNA, 1710 nt, Artificial Sequence
  derived and/or modified CDS sequence (wt) from LASV(Lassa virus/H.sapiens-wt/NGA/2016/ISTH_1306;Clade II)__AVO03624__NP
augagugcuucuaaggaagugaagucauuucucuggacacagucauugaggagggagcuuucagguuauugcuccaacauaaaacuucaaguuguuaaggaugcucaggcucuccuucauggucuugacuuuucugaagucaguaaugugcagcgcuuaaugcgcaaacaaaagagggaugauggugauuugaaacgucucagagauuugaaucaggcugucaacaaucuuguggaacucaaaucgacacaacaaaaaagcaucuugagaguugggacccugaccucagaugaccugcugacauuagcagccgacuuagagaaacuaaagucgaaggucauuagaacagaaaggccacuaagcucagguguuuauauggggaauuugaguacacagcagcuugagcagagaagagcauugcugaacaugauaggcaugguugguggggcucaaggcacccaaccuggaagagacggaguugucagggugugggauguuaaaaauccggaucuuuugaacaaccaguuuggcaccaugcccagucuaacauuagcaugucucaccaaacaaggucaaguugauuugaaugaugcugucuuagcauuaacagaccugggucuaauauauacagcuaaguacccaaauagcuccgaccuggacagacuuucucaaagccauccuauacugaauaugguggacacuaagaagagcuccuugaacauuucugguuacaacuucagcuuaggagcugcaguaaaagcuggagcuuguaugcuggauggggggaacauguuggagaccaucaagguuacaccucagacaauggauggcaucuugaagucuauuuuaaagguaaaaaaaucuuugggaauguuuguuucagacacaccuggugagaggaacccuuaugagaauauacuuuacaagaucugucuuuccggugacggcuggcccuacauagcuucaaggacuucuauuguggguagagcuugggagaacacuacuguggaucucgagucagauggaaagccgcaaaaagugggcacugcuggguccaacaagucuuuacagucagcgggguucccaacaggguugaccuauucucaguuaaugacacuuaaagacucaaugaugcagcuugauccaagugccaagaccuggauagacauugagggucgaccagaagacccuguggaaauagcucuuuaccagcccaugucgggcuguuacauacacuucuucagagaaccaacagacuuaaaacaguucaagcaagaugccaaauauucucaugggauugauguggcagaucuuuucccugcucaaccugguuugaccagcgcagucauugaagcucucccucgcaauaugguacugaccugucaagguucagaugauauuaagagacucuuggacucccagggaagaagagacauaaagcuuauugacauugcacucagcaaggcugacuccaggagauuugaaaaugcuguuugggaucagugcaaagaucuaugccauaugcauacuggagugguugucgaaaagaagaagagaggaggcaaagaagaaauuaccccacacugugcuuuaauggacugcauaauguaugaugcagcugugucaggaggacucaauauaccaguuuugagagcaguucucccuagggacaugguguucagaaccucaagccccaaggucguccuguaa

SEQ ID NO: 7882 - RNA, 1710 nt, Artificial Sequence
  derived and/or modified CDS sequence (wt) from LASV(Lassa virus/H.sapiens-wt/NGA/2016/ISTH_1311;Clade II)__AVO03576__NP
augagugcuucuaaggaagugaaaucauuccuuuggacacagucauugagaagagagcucucaggcuauugcucuaauauaaaacuucagguugucaaggaugcucaagcccuucugcauggucucgacuucucugaggucagcaaugugcagcgcuugaugcgcaaacagaaaagagaugacggugauuuaaaacgucuuagggaccuaaaucaggcugucaacaaucuugucgagcucaagucaacacagcaaaagaguguuuugagaguuggaacacugacuucagacgaccuauugauuuuagcagccgaucuagagaaauugaaaucaaaggucaucaggacagagagaccauuaagcucggguguguacauggggaacuugagcacacaacaacuggagcagaggagggcguuguugagcaugauaggcaugguugguggugcccaaggaacccaaccuggaagagacggaguugucagagugugggaugucaaaaacccggaucuccuaaacaaccaauuuggcaccaugccaaguuuaacgcuagcaugccucaccaaacagggucaaguugaccuaaaugacgccguucuggcauuaacagauuuaggguugauauacacaguuaaauaccccaauaguucugaucuagacaggcuuucccagagccauccuauauugaauaugguggacaccaagaagaguucccuaaauaucucuggcuacaauuucaguuugggagcugcagugaaggccggagccugcaugcucgauggggguaacauguuggagacuaucaaggucacgccucagacaauagacgguaucuugaaguccauuuugaaggugaaaaggucccugggaauguuuguuucagacacaccuggugaaagaaacccuuaugaaaacauacuuuacaagauuugucucucuggggacgguuggccuuacauagcuucaagaaccucuauuguggguagagccugggagaauaccacuguagaucuugagucagaugggaaaccacagaaagugggugcugcugggucuaacaagucucugcaaucugcaggguucccaacagggcuuacuuauucucaacuaaugacacucaaagauucaaugaugcagcuugacccgagcgccaagaccuggauagacauugaaggucgcccagaagacccuguugaaauagcccuuuaccagcccaugucagguuguuauauacauuucuucagagaaccaacggauuugaaacaguucaaacaagaugccaaauauucucaugggauugaugugacagaucucuuuucugcucagccuggucuaaccagugcaguuaucgaagcccucccccgcaacaugguguuaacgugucaagguucagaugacauuaaaaagcucuuagauucucaagggagaagggacauuaagcucaucgacaucucauuaaauaagacugacucuaggagauuugaaaaugcuguuugggaucaguguaaagaucugugucacaugcacacugggguggucguugagaaaaagaagagaggaggcaaagaggagaucacuccacauugugccuuaauggauugcauaauguuugacgcagcuguaucaggagggcucaauauaccgaucuuaagggcuguucucccaagagacaugguauuuagaaccucaagucccaaagucguccuguaa

SEQ ID NO: 7883 - RNA, 1710 nt, Artificial Sequence
  derived and/or modified CDS sequence (wt) from LASV(Lassa virus/H.sapiens-wt/NGA/2016/ISTH_1423;Clade II)__AVO03578__NP
augagugcuuccaaggaagugaaaucauuccuuuggacacagucauugaggagagagcucucggguuacugcuccaauauaaagcuucagguuguuaaagaugcucaggcucuccuucauggucuugauuuuucugaagucagcaaugugcaacgcuuaaugcgcaagcagaaaagggacgauagugaccugaaacgucucagggaccugaaucaagcaguuaacaaucuuguugagcuuaaaucaacacaacaaaagaguaucuugagaguugggacccuaaccucagaugacuuauugacauuggcagcugaccuagagaaacuaaaaucaaaggucaucagaacagaaaggccacuaagcucaggugucuacauggggaacuugagcacacagcaacuugagcaaagaagagcauuguugaacaugauaggcaugguuagugggacucagggcacucaaccugggagagacggaguuguuagggugugggaugucaagaauccugaucuucugaacaaccaguucggcaccaugccuagucugacauuagcaugccuuaccaaacaaggucaaguugauuuaaaugaugcugucuuagcacuaacggacuuaggucuaauauacacagcuaaguacccaaacagcucugaccuggacagacuuucccaaagucaucccauacugaacaugguggacaccaagaagagcucuuugaauauuucuggcuacaacuucagcuuaggagcugcagugaaggcuggagccuguaugcuugauggagggaacauguuggagaccaucaagguuacaccucaaacaauggauggcauuuugaaguccauuuuaaaggugaaaaaauccuuaggaauguuuguuucagauacaccuggugagaggaacccuuaugagaacauacuuuacaagaucugccuuucuggugacggcuggcccuacauagcuucaaggaccuccauuguggguagagcuugggagaacacuacuguagaucuugaaucagauggaaagccacagaaaauggguacagcuggguccaauaagucuuuacagucagcaggguucccaacaggguugaccuacucucaguuaaugacacuuaaagacucaaugaugcagcuugacccaagugcuaaaaccuggauagauauugaaggucgcccagaagacccuguggaaauagcucuuuaccaaccuaugucgggcuguuacauacacuucuucagagaaccaacagacuuaaaacaauucaagcaagaugcuaaguauucucaugggauugauguggcagaucuuuucccugcccaaccuggucuaaccagugcagucauugaagcccucccucgcaacauggugcugaccugccaaggcucagaugacaucaagaaacucuuggauucacaaggaagaagagacauaaagcuuauugacauugcauuaagcaaggccgauuccaggagauuugaaaacgcuguuugggaucagugcaaagauuugugccacaugcauacuggagugguuguugaaaagaagaaaagaggaggcaaagaggaaaucaccccacauugcgcucuaauggacugcauaauguaugaugcagcuguaucagggggacucaacauaccaguuuugagagcaguucuuccuagagauaugguguucagaaccucaaaccccaaggucguccuguaa

SEQ ID NO: 7884 - RNA, 1710 nt, Artificial Sequence
  derived and/or modified CDS sequence (wt) from LASV(Lassa virus/H.sapiens-wt/NGA/2016/ISTH_1472;Clade II)__AVO03606__NP
augagugcuuccaaggaagugaagucauuucucuggacacaaucauuaaggagggaacuuucggguuauugcuccaauauaaagcuucagguugucaaggaugcucaggcucuucuucauggucuugauuuuucugaagucagcaaugugcagcguuuaaugcgcaaacaaaaaagagaugauagugaucugaaacgucucagagaucugaaucaggcugucaacaaucuuguugaacucaaaucaacacaacaaaagaguauccugagaguugggaccuuaacuucagaugaccugcugacauuggcagcugacuuagagaaacuaaagucgaaggucauuaggacagaaaggccacugagcucagguguuuacauggggaauuugaguacacaacagcuugagcaaagaagagcauuauugaacaugauaggcaugguuggcgggauucagggcacccaaccuggaagagacggaguuguuagggugugggauguuaagaauccggaucuuuugaacaaccaguucggcaccaugccuaguuugacauuagcaugucucaccaaacaaggucaaguugauuugaaugauaccguccaggcacuaacagaccugggucugauauacacagcuaaguacccaaauagcucugaccuagauagacuuucccaaagccauccuauacugaauaugguggacacuaagaagagcuccuugaacauuucugguuacaauuucagcuuaggagcugcagugaaagcuggagcuuguaugcuugauggggggaacauguuggagaccaucaaaguuacaccucagacaauggauggcaucuugaagucuauuuuaaaggugaaaaaaucccuaggaauguuuguuucagacacaccuggugagaggaacccuuaugagaacauacuuuacaagaucugucuuucuggugacggcuggcccuacauagcuucaagaacuuccauuguggguagagcuugggagaauaccacuguggaucucgagucagaugggaaaccacaaaaagugggcacagcuggguccaacaagucuuuacagucagcaggguucccaacagggcugaccuauucucaguugaugacacuuaaagacucaaugaugcagcucgacccaagugccaaaaccuggauagacauugaaggucguccagaagacccuguggaaauagcucuuuaccaaccuaugucgggcuguuacauacacuucuuuagagaaccaacagacuugaaacaauucaagcaggaugccaaauauucucaugggauugauguagcagaucuuuucccugcucaaccugguuugacuagugcagucaucgaagcccucccucguaauauggugcugaccugucaagguucagaugacauuaagagacucuuagacucucaaggaagaagagacauaaagcuuauugacauuucacugagcaagacugacucuaggagauuugaaaaugcugucugggaucaaugcaaagaucuaugccauaugcauacuggagugguugucgaaaagaagaaaagaggaggcaaagaagaaauuaccccgcacugugcuuuaauggauugcauaauguaugaugcagcugugucaggaggacucaauauaccaguuuugagagcaguucuccccagagacaugguguuuagaaccucaagccccaaggucguccuguaa

SEQ ID NO: 7885 - RNA, 1710 nt, Artificial Sequence
  derived and/or modified CDS sequence (wt) from LASV(Lassa virus/H.sapiens-wt/NGA/2016/ISTH_1474;Clade II)__AVO03614__NP
augagugcuuccaaggaagugaagucauuucucuggacacaaucauuaaggagggaacuuucggguuauugcuccaauauaaagcuucagguugucaaggaugcucaggcucuucuucauggucuugauuuuucugaagucagcaaugugcagcguuuaaugcgcaaacaaaaaagagaugauagugaucugaaacgucucagagaucugaaucaggcugucaacaaucuuguugaacucaaaucaacacaacaaaagaguauccugagaguugggaccuuaacuucagaugaccugcugacauuggcagcugacuuagagaaacuaaagucgaaggucauuaggacagaaaggccacugagcucagguguuuacauggggaauuugaguacacaacagcuugagcaaagaagagcauuauugaacaugauaggcaugguuggcgggauucagggcacccaaccuggaagagacggaguuguuagggugugggauguuaagaauccggaucuuuugaacaaccaguucggcaccaugccuaguuugacauuagcaugucucaccaaacaaggucaaguugauuugaaugauaccguccaggcacuaacagaccugggucugauauacacagcuaaguacccaaauagcucugaccuagauagacuuucccaaagccauccuauacugaauaugguggacacuaagaagagcuccuugaacauuucugguuacaauuucagcuuaggagcugcagugaaagcuggagcuuguaugcuugaugggggaaacauguuggagaccauuaaggucacaccucagacaauggauggcaucuugaagucuauuuuaaaggugaaaagaucuuugggaauguuuguuucagauacaccuggugagaggaacccuuacgagaacauacuuuacaagaucugucuuucuggcgacggcuggcccuacauagccucaaggacuuccauuguggguagagcuugggagaacacuacuguggaucuagagucagauggaaaaccacagaaaguggguacugcuggguccaacaagucuuuacagucagcaggguuuccaacagggcugaccuauucucaguugaugacacuuaaagacucaaugaugcagcuugauccaagugccaaaaccuggauagacauugaaggucguccagaggacccuguggaaauagcucuuuaccaaccuaugucuggcuguuacauacacuucuuuagagaaccaacagauuuaaaacaguucaagcaagaugcuaaauauucucaugggauugauguggcagaucuuuucccugcucaaccugguuugaccagugcagucauugaagcucucccucgcaauaugguacugaccugucaagguucagaugauauuaagagacucuuggacucccaaggaagaagggacauaaagcuuauugacauugcacuaagcaaggcugauucuaggagauuugaaaaugcuguuugggaucagugcaaagaucuaugccauaugcauacuggagugguugucgaaaagaagaaaagaggaggcaaagaagaaauuaccccgcacugugcuuuaauggacugcauaauguaugaugcagcugugucaggagggcucaacauaccaguucuaagagcaguucuccccagagacaugguguuuagaaccucaagccccaaggucguccuguaa

SEQ ID NO: 7886 - RNA, 1710 nt, Artificial Sequence
  derived and/or modified CDS sequence (wt) from LASV(Lassa virus/H.sapiens-wt/NGA/2016/ISTH_1496;Clade II)__AVO03580__NP
augagugcuucuaaggaagugaagucauuccucuggacacagucauugaggagggagcuuucugguuauuguuccaauauaaaacuucagguagucaaggaugcucaagcucuccuucauggacuugacuuuucugaagucagcaaugugcagcgcuugaugcgcaagcaaaaaagagaugauagugaucugaaacgucuuagagauuugaaucaggcugucaacaaucuuguagaacucaaaucgacacaacaaaagaguaucuugaaaguugggaccuugaccucagaugaccugcugacauuagcagcugacuuagagaaacuaaagucgaaggucauuagaacagagaggccacuaagcucagguguuuauauggggaauuugaguacacagcagcuugagcaaagaagagcauugcugaauaugauaggcaugguugguggggcucagggcacccaaccuggaagagacggaguuguuagggugugggauguuaagaauccggaucuuuugaacaaccaguucggcaccaugccuagucugacauuagcaugucucaccaaacagggucaaguugauuugaaugaugccgucuuagcacuaacagacuugggucuaauauacacagcuaaauacccaaauagcuccgaccuggauagacuuucccaaagccauccuauacuaaauaugguggacacuaagaaaagcucuuugaacauuucugguuacaauuucagcuuaggggcugcagugaaagcuggggcuuguaugcuugauggggggaacauguuggaaaccaucaagguuacaccucagacaauggaugguaucuugaagucuauuuuaaagguaaaaagaucuuugggaauguuuguuucagauacaccuggugagaggaacccuuaugagaauauacucuacaagaucugucuuuccggugacggcuggcccuacauagcuucaaggacuucuaucguggguagagcuugggagaauacuaccguagaucucgagucagauggaaaaccgcaaaaagugggcacuauuggguccaacaagucucuacaaucagcaggguucccaacagggcugaccuauucucaguuaaugacacuuaaagacucaaugaugcagcuugacccaagugcuaaaaccuggauagacauugagggucguccagaagauccuguggaaauagcucuuuaccaacccaugucggguuguuacauacacuucuucagagaaccaacagauuuaaaacaguucaagcaagaugccaaauauucucaugggauugauguugcagaucuuuucccugcucaaccugguuuaaccagcgcggucaucgaagcccucccucgcaacaugguacugaccugucaagguucagaugacauuaagagacucuuggacucucaaggaagaagggauauaaagcuuauugacauugcacugagcaaggcugacucuaggagauuugaaaaugcuguuugggaucagugcaaagaucuaugccauaugcauacuggagugguugucgaaaagaagaaaagaggaggcaaagaagaaaucaccccgcacugugcuuuaauggacugcauaauguaugaugcagcugugucaggaggacucaauauaccaguuuuaagagcaguucuccccagagacaugguguuuagaaccucaagccccaaggucguccuguaa

SEQ ID NO: 7887 - RNA, 1710 nt, Artificial Sequence
  derived and/or modified CDS sequence (wt) from LASV(Lassa virus/H.sapiens-wt/NGA/2016/ISTH_1541;Clade II)__AVO03554__NP
augagugccucaaaggaagugaagucauucuuguggacucaguccuugaggagagagcugucuggcuauugcuccaacauaaaauugcaaguugucaaagaugcucaggcucuccuacauggucucgacuucucugaagucaguaaugugcagagacuaaugcgcaagcagaagagagacgauggcgaccugaaacgccucagggacuuaaaucaggcagucaacaaccuuguugaacucaagucuacacaacagaaaaguauucucagaguuggaacucucagcuccgaugacuuguuaauuuuggcugcugacuuagaaaaguugaaauccaaagugauccguacugaaagaccauugagcucgggaguuuacaugggaaaucuaagcucucagcaacuugaucagagaagggcccuauuaaauaugauuggaaugacuggugguaaucaaggagcaagcaccggaagagauggcauagugagagucugggaugucaaaaaugcagaguugcuaaacaaucaguuuggcacaaugccaaguuugaccuuagcuugccuaaccaagcaggggcagguagacuugaaugaugcuguccaagcccuaacagacuuaggacuaauuuacaccgcuaaguauccuaacucaucugaucuggacagacuuucucagagucacccuauuuugaacaugauugauacuaagaagagcucccucaacauuuccggcuacaacuucagucugggugcugcagugaaggcaggagccugcaugcuugacggcggcaacauguuggagacaaucaaaguuucaccccaaacuauggacgggauccugaaaucaauucuaaagguuaagaagaguuuggggauguuugugucagacaccccaggugagaggaauccauaugagaacauauuguacaaaauuugccuuucaggagauggauggccuuacaucgcaucgagaacuucaaucauuggcagggcuugggaaaauacuauaguggaccuagaggcagacaacaaaccucaaaaaucugggaacaacggguccaacagaucccuacaaucugcuggcuucccuucaggacugacuuauucucagcuaaugacccucaaagauuccauguugcaacuggacccaaaugccaaaacauggauggacauugaggggaggccagaugauccagucgagauagccuuauaucagccgagcucaggcuguuacauccauuucuucagagagccgacugaucucaaacaguucaaacaggaugcaaaguacucacauggaauugauguaagugaccuguuugcugcacaaccuggucuaacaagcgcagugauagaggcgcucccacgaaacauggucauuaccugucaagggucagaagacauuaagaaacucuuggaaucacaaggaaggaaagacauaaaauugguagacauuucuuugaguaaauuagacucuagaaaauucgagaauguugucugggaucaguacaaggaccuaugccauaugcacacaggcaucgugguugagaagaagaagagggguggcaaagaggaaaucacaccacacugugcacugauggauugcaucauguuugaugcagcugugaugggugggcucgaugccagaguauuaagggcuguguugcccagagacauggucuucaggacuucaacaccuaaggucguccuguaa

SEQ ID NO: 7888 - RNA, 1710 nt, Artificial Sequence
  derived and/or modified CDS sequence (wt) from LASV(Lassa virus/H.sapiens-wt/NGA/2016/ISTH_1546;Clade II)__AVO03538__NP
augagugccucaaaggaagugaagucguuccuguggacucaguccuugaggagagaacuauccggcuauuguucuaauauaaaacugcaggugguuaaagaugcucaggcucuccuacauggucuugauuucucugaagucagcaauguacagcgacuaaugcgcaagcaaaaaagagaugauggugauuuaaaacgccucagagacuugaaucaggcagucaacaaccuuguugagcucaagucuacacaacaaaaaaguguucucagaguuggaacucucagcuccgaugacuugcuaauuuuagcugcugacuuggaaaaguugaaaucuaaggucauccgcacugagagaccauuaaguucaggaguuuauaugggaaaucuaaguucacagcaacuugaucagagaagggcccuguugaacaugauugguaugacuggcggcaaucaagggacaaaugccggaagagauggcauagugaggauuugggauguuaaaaaugcggaauugcuaaauaaucaguuuggaacaaugccaagucugaccuuagcuugccugacuaagcagggacagguggacuuaaaugauguuguccaagcccugacggauuuagggcuaauuuacacugccaaguauccuaacucaucugaucuggacagacucucucagagucacccuauuuugaacaugauugacaccaaaaagagcucccucaacauuucuggcuacaacuucagucuaggugcugcagugaaggcaggagcuuguaugcuugacggcggcaacauguuggagacaaucaaaguuucaccccaaacuauggaugggauccugaagucaauuuugaaggucaaaaggagcuugggaauguuugugucagacaccccaggugagaggaacccauaugagaacauauuguacaagauuugccuuucaggagacggguggccuuacauugcaucuagaacuucaaucauugguagggcuugggaaaauaccauaguggauuuggaaacaaauaacaagccucaaaaaccugggaacaauggguccaauagaucccuacaaucugcugguuucccugcuggacugacuuauucacagcugaugacccuuaaggauuccauguugcaacuggauccaaaugccaagacauggauggacauugaggggaggccagaugacccagucgaaauagccuuauaucagccgaguucaggcuguuacauccacuucuucagagagccaacugaucuuaaacaauucaaacaagaugcaaaguacucacaugggauugaucugagugaccuguuugcugcacaaccuggucuaacaagugccguaauagaagcgcucccacgaaacauggucaucaccugucaagggucagaagacaucaugaaacuguuagagucacaagggaggaaggacauaaaguugguggacauuucuuugaguaaaucagacucuagaaaguucgagaaugcugucugggaucaguacaaggaccuaugucauaugcauacaggcaucgugguugagaaaaagaagaagggugggaaagaagaaaucacaccacauugugcacugauggauuguaucauguuugaugcagcugugaugggugggcucgaugccaaaguuuugagagcuguguugccuaaggacaugguuuucaggacuucaacaccuaaagucguccuguaa

SEQ ID NO: 7889 - RNA, 1710 nt, Artificial Sequence
  derived and/or modified CDS sequence (wt) from LASV(Lassa virus/H.sapiens-wt/NGA/2016/ISTH_1568;Clade II)__AVO03562__NP
augagugcuucuaaggaagugaagucauuucucuggacacagucauuaaggagggagcuuucaggauauugcuccagcauaaaacuucaaguuguuaaggaugcucaagcucuccuucauggucuugacuuuucugaagucagcaaugugcagcgcuuaaugcgcaaacaaaagagggaugauagugaucugaaacgucucagagauuugaaucaagcugucaacaaucuuguagaacucaaaucgacacaacaaaagagcaucuugagaguugggaccuugaccucagaugaccugcugacauuggcagcugacuuagagaaacuaaagucgaaggucaucagaacagaaaggccacuaaguucagguguuuauauggggaauuuaaguucacagcagcuugagcaaagaagagcauugcugaacaugauaggcaugguugguggggcucagggcacccagccuggaagagacggaguuguuagggugugggauguuaagaauccggaucuuuuaaacaaucaguuuggcaccaugccuagucugacguuagcaugucucaccaaacaaggucaaguugauuugaaugaugcugucuuagcacuaacagaccugggucuaauauacacagcuaaauauccaaauagcucugaccuggacagacuuucccaaagccauccuauacugaacaugguggacacuaagaagagcuccuugaacaucucugguuacaacuucagccuaggagcugcagugaaggcuggagcuugcaugcuugauggggggaacauguuggagaccaucaagguuacaccucagacaauggaugguaucuugaagucuauuuuaaaggugaaaagaucuuugggaauguuuguuucagacacaccuggugagaggaacccuuacgagaauauacuuuacaaaaucugucucuccggugacggcuggccuuauauagcuucaaggacuucuauuguggguagagcuugggagaauaccaccguggaucucgagucagauggaaaaccacaaaaaguggggccugcuggguccaacaagucuuuacagucagcgggguucccaacagggcugaccuauucucaguugaugacacuuaaagacucaaugaugcaacuugacccaagugccaaaaccuggauagauauugaaggucguccagaagacccuguggaaauagcucuuuaccaaccuauuucgggcuguuacauacacuucuucagagaaccaacagauuuaaaacaguucaagcaagaugccaaguauucucaugggauugauguggcagaucucuucccugcucaaccugguuugaccagugcagucauugaagcccucccucgcaauauggugcugaccugucaagguucagacgacauuaagagacucuuggacucccaaggaagaagggacauaaagcuuauugacauugcacugagcaaggcugacucuaggagauuugaaaaugcuguuugggaucagugcaaagaucuaugccauaugcauacuggagugguuguugaaaagaagaaaagagguggcaaagaagaaauuaccccgcacugugccuuaauggacugcauaauguaugaugcagcuguaucaggaggacucaauauaccaguucugagagcaguucuccccagagacaugguguuuagaaccucaagccccaaggucguccuguaa

SEQ ID NO: 7890 - RNA, 1710 nt, Artificial Sequence
  derived and/or modified CDS sequence (wt) from LASV(Lassa virus/H.sapiens-wt/NGA/2016/ISTH_1591;Clade II)__AVO03648__NP
augagcgcuucuaaggaggugaagucauuucucuggacacagucauugaggagggagcuuucagguuauugcuccaguauaaaacuucaaguuguuaaggaugcucaggcucuucuucauggucuugacuuuucugaagucagcaaugugcagcgcuuaaugcgcaaacaaaagagggaugauagugaucugaaacgucucagagauuugaaucaggcugucaacaaucuuguagaacucaaaucgacacaacaaaagagcaucuugagaguugggaccuugacuucagaugacuugcugacacuggcagcugacuuagaaaaacuaaaaucgaaggucauuagaacagaaaggccacuaagcucagguguuuacauggggaauuugaguucacagcagcuugagcaaagaagagcacugcugaacaugauaggcaugguugguggggcucagggcacccaaccuggaagagacggaguuguuagggugugggauguuaagaauccggaucuuuugaacaaucaguuuggcaccaugccuagucugacacuggcaugucucaccaaacaaggucaaguugauuugaaugaugccgucuuagcauuaacagaccugggucuaauauauacagccaaguauccaaauagcuccgaccuggacagacuuucccaaagccaucccauucugaauaugguggacaccaagaagagcucuuugaacauuucugguuacaacuucagcuuaggagcugcagugaaagcuggagcuuguaugcuugauggggggaacauguuggagaccaucaagguuacaccucagacaauggauggcaucuuaaagucuauuuuaaaggugaaaagaucuuugggaauguuuguuucagauacaccuggugaaaggaacccuuacgagaacauacuuuacaagaucugucuuuccggugacggcuggcccuauauagcuucaaggacuuccauuguggguagagcuugggagaauaccacuguggaucucgagucagaugggaaaccacaaaaaguggguucugcugggucuaacaagucuuuacagucagcaggguuuccaacagggcugaccuauucucaguugaugacacuuaaagacucaaugaugcagcuugacccaagugccaaaaccuggauagacauugagggucguccggaagacccuguggaaauagcucuuuaccaaccuaugucgggcuguuacauacacuucuucagagaaccaacagauuuaaaacaguucaagcaagaugccaaguauucucaugggauugauguggcagaucuuuucccugcucaaccuggucugaccagugcagucaucgaagcucucccucguaauaugguacugaccugucaagguucagaugauguuaagagacucuuggacucccaaggaagaagagacauaaagcuuauugacaucgcauugagcaaggcugacucuagaagauuugaaaaugcuguuugggaucagugcaaagaucuaugccauaugcauacuggagugguuguugaaaagaagaaaagaggaggcaaagaagaaauuaccccgcacugugcuuuaauggacugcauuauguaugaugcagcugugucaggaggacucaacauaccaguuuuaagagcaguucuccccagagacaugguguuuagaaccucgagccccaaagucguccuguaa

SEQ ID NO: 7891 - RNA, 1710 nt, Artificial Sequence
  derived and/or modified CDS sequence (wt) from LASV(Lassa virus/H.sapiens-wt/NGA/2016/ISTH_1604;Clade II)__AVO03542__NP
augagcgcuucgaaagaagugaaaucauuccuauggacucagucucugagaagagagcuauccggcuacugcuccaacauaaaacuacaagugguuaaggaugcucaagcccucuuacauggccuugacuuuucugaagucagcaaugugcaacgacugaugcgcaagcaaaagagggaugauggugaccugaaacgccucagagacuuaaaucaggcagucaacaaccuugucgaacuaaaauccacacaacagaagagcauucuaagaguugggacccucaguucugaugaucugcugaccuuggcugcugacuuagagaaguuaaaaucaaagguaauucgcacugaaagaccacugagcucgggaguuuauauggggaaccugagcacccagcagcuugaccagaggagagccuugcugaacaugaucggcaugguugguggcagucaaggaacaagugccggaagggauggcauuguaagggucugggauguaagaaauccagaacuauuaaauaaucaguuugggacaaugccaaguuugacucuagcuuguuuaacuaaacaaggacagguagacuugaaugaugcuguucaggcccugacagauuugggacuaauuuacaccgcgaaguacccaaauucaucugacuuagauaggcuuucccagagucaucccauacuaaacaugauugacaccaaaaagagcucuaucaacaucucugguuacaauuuuagucugggugcugcaguaaaagcaggggcuugcaugcuagaugguggcaacauguuggagacaaucaagguuucaccccaaucuauggaugggaucuugaaaucaauccuaaagguuaaaaggagccuagggauguuugugucagacacuccaggugagagaaacccuuaugagaauauacuguacaaaaucugccuaucaggagauggauggccuuacauugcgucaaggaccucaaucacugguagggcuugggaaaacacuguaguggauuuagagucggacaacaagccuaaaaaacccgggaacaaugaauccaacaggucucuacagucagcuggcuucccagcaggacugaccuacucccagcucaugacccucaaagauucuauguugcaacuggacccaaaugccaagaccuggauggacauugaagggaggccagaugauccggucgagauagcucuauaccagccaaacucagguuguuacauccacuucuuuagagaaccaacugaucuaaagcaauucaaacaagaugcuaaauacucacauggaaucgacauaagugauuuauuugcugcacaaccuggucugacaagugcaguaauagaagcacuuccacgaaauaugguuaucacaugccaggggucggaggaugucaagaaacuccuagagucgcaagggagaaaggacauaagguugguagacauuucccucagcaaagcagauucuagaaaguuugaaaaugcugucugggaucaguacaaagaccuaugucauaugcacacaggcaucguaguugagaagaagaagaaagguggcaaagaggagauaacaccgcauugugcacuaauggacugcaucauguuugaugcagcugugaugaauggacucgacgcgagagucuugagggcugugcugcccagagacauggucuuuagaacuucaacacccagagucguccuguaa

SEQ ID NO: 7892 - RNA, 1710 nt, Artificial Sequence
  derived and/or modified CDS sequence (wt) from LASV(Lassa virus/H.sapiens-wt/NGA/2016/ISTH_1609;Clade II)__AVO03662__NP
augagugcuucaaaggaagucaagucauuccuauggacucagucccuaaggagagaauuauccgguuauuguuccaacauaaaauugcaaguggucaaagaugcccaggcucuucuacauggucuugauuucucugaagucagcaaugugcagcgacuaaugcgcaagcagaagagagaugauggcgacuugaagcgccucagggacuugaaucaggcagucaacaaccuuguugaacucaaaucuacacaacagaagagcauucucagaguuggaacucucagcuccgaugaucuguuaauuuuggcugcugacuuggagaaguuaaaguccaaggugauccguacugaaagaccacugagcucaggaguuuauauggggaaucugagcucucagcagcuugaucagagaagggcccuauuaaacaugauuggcaugacuggugguaaucaggggacaaacaccggaagagauggcauagugaggguuugggauguuaaaaaugcagaguugcuaaacaaccaguuuggaacaaugccaagcuugaccuuagcuugucuaacuaagcaggggcagguggacuuaaaugaugccguccaagcuuugacggauuuaggacuaauuuacacugccaaguaucccaacucaucugauuuggacagacucucucagagucacccuaucuugaauaugauugacaccaaaaagagcucucucaacauuucuggcuacaacuucagucugggugcagcagugaaggcaggagcuuguaugcuugaugguggcaacauguuggagacaaucaaaguuucaccccaaacuauggaugggauacugaaaucaauucugaaggucaaaaagagcuuaggaauguuuguaucagauaccccaggugagagaaacccauaugaaaacauauuauacaagauuugccuuucaggagauggguggccuuacauugcaucaagaacuucaaucacuggcagggcuugggaaaauaccaugguggauuuggagacaaacaacaagucucaaaagcccgggaacaauggguccaauagaucccuacagucugcuggcuucccugcaggacugacuuauucucagcuaaugacccucaaagacuccauguuacaacuggacccaaaugcuaagacauggauggacauugaggggaggccggaugauccagucgagauagccuuauaucagccgagcucaggcuguuacauccauuucuucagagaaccaacugaucucaagcaguucaaacaagaugcaaaguacucacaugggauugacauaagugaccuguuugcugcacaaccuggcuugacaagugcagugauagaagugcucccacgaaacaugaccauuaccugucaaggaucagaagacaucaagaaacucuuagaaucacaaggaaggaaggacauaaaauugguggacauuucuuugaguaaauuggauucuagaaaauuugagaaugcugucugggaucaguucaaggacuugugccacaugcacacaggcaucguuguugagaagaagaagaaggguggcaaggaggaaaucacaccacacugugcacugauggacugcaucauguucgaugcagcugugaugggugggcucgaugccaaaguuuugagagcuguuuuacccagggacaugguuuucaggaccucaacacccaaagucguucuguaa

SEQ ID NO: 7893 - RNA, 1710 nt, Artificial Sequence
  derived and/or modified CDS sequence (wt) from LASV(Lassa virus/H.sapiens-wt/NGA/2016/ISTH_1610;Clade II)__AVO03604__NP
augagugcuuccaaggaaauaaaaucauuccuuuggacacagucauugagaagggagcuuucaggcuacugcuccaguauaaagcuccaaguuguuaaggaugcucaggcucuccuucauggccuugacuucucugaggucagcaauguacaacgcuuaaugcgcaaacaaaagagggaugauagugaucuaaaacgucucagagaucugaaucaggcugucaacaaccuuguugaacucaagucaacacagcaaaagaguaucuugaggguugggaccuugaccucggaugauuugcugacacuggcagcugaccuugaaaagcuuaagucgaaagucaucagaacagaaaggccacuaagcucaggcguuuacauggggaacuugagcacacagcaacuugagcaaagaagagcauuauuaaacaugauaggcaugguugguggggcucaaggcacccaaccuggaagagacgguguuguuagggugugggaugucaagaauccagaucucuugaacaaccaguucggcacuaugcccagucuuacauuagcaugucuuacuaaacaaggucaaguugauuuaaaugaugccgucuuagcauuaacagauuugggucuaauauacacagccaaguacccaaacagcucugaccuggacagacuuucucaaagccacccuauacuaaacaugguggacaccaagaagagcuccuuaaacauuucugguuacaauuucagcuuaggagcugcagugaaggcuggagcuuguaugcuugauggggggaacauguuggagaccaucaagguuacaccucagacaauggauggcaucuugaagucuauuuuaaaggugaaaagaucuuugggaauguuuguuucagacacaccuggugagaggaacccuuaugagaacauucuuuauaagauuugucucucuggugauggcuggccuuacauagcuucaaggaccucuauuguggguagggcuugggagaauacuacuguugaucuugagucagaugggaaaccacaaaaagugggcacugcuggguccaauaagucuuuacagucagcaggguuuccaacaggguugaccuacucccaguuaaugacacuuaaagacucaaugaugcagcuugacccaagugccaaaaccuggauagacauugaaggucguccagaagauccuguagaaauagcucuuuaccaaccuaugucaggcuguuacauacacuucuucagagaaccaacagacuugaagcaguucaagcaagaugccaaauauucucaugggauugauguggcagaucuuuucccugcucaaccugguuugacuagugcaguuauugaagcccucccucgaaauaugguacugaccugucaaggcucagaugauauuaaaaaacucuuggauucccaagguagaagggacauaaagcuuauugacauugcauuaagcaagacugacucuaggagauuugaaaaugcuguuugggaucagugcaaagacuugugccacaugcauacuggagugguugucgaaaagaagaaaagaggaggcaaagaagaaauuaccccacacugcgcucugauggacugcauaauguaugacgcagcugugucaggaggacucaacauaccagucuuaagagcaguccuccccagagacaugguguucagaaccucaagccccaaagucguccuguaa

SEQ ID NO: 7894 - RNA, 1710 nt, Artificial Sequence
  derived and/or modified CDS sequence (wt) from LASV(Lassa virus/H.sapiens-wt/NGA/2018/ISTH_0541;Clade II)__AVV65114__NP
augagugcuucuaaggaagugaagucauuucucuggacacagucauugaggagggagcuuucagguuauugcuccagcauaaaacuucaaguuguuaaggaugcucaggcucuccuucauggucuugacuuuucugaagucaguaaugugcaacgcuuaaugcgcaaacaaaagagggaugauagugaccugaaacgucucagagauuuaaaucaggcugucaacaaucuuguagaacucaaaucgacacaacaaaagagcaucuugagaguugggacuuuaaccucagaugacuugcugacauuggcagcugacuuagagaaacuaaagucgaaggucauuagaacagaaaggccacuaagcucagguguuuauauggggaauuugagcacacagcaacuugagcaaagaagagcacugcugaacaugauaggcaugguugguggggcucagggcacccaaccuggaagagacgggguuguuaggguaugggacgucaagaacccggaucuuuugaacaaucaguuuggcacuaugccuagucugacauuagcaugucucaccaaacaaggucaaguugauuugaaugaugcugucuuagcacuaacagaccugggucuaauauacacagcuaaguacccaaauagcuccgaccuggacagacuuucccaaagccauccuauacugaauaugguggacacuaagaagagcucuuugaacauuucugguuauaauuucagcuuaggugcugcagugaaagcuggagccuguaugcuugauggggggaacauguuggagaccauaaagguuacaccccagacaauggaugguaucuugaagucuauuuuaaaggugaagagaucuuugggaauguuuguuucagauacaccuggugagaggaacccuuacgagaacauacuuuacaagaucugccuuuccggugacggcuggccuuacauagcuucaaggacuucuauuguggguagagcuugggagaacacuacgguggaucucgagucagaugggaaaccacaaaaaguagguguugccggguccaacaagucuuuacagucagcaggguuuccaacagggcugaccuauucucaguugaugacacuuaaagacucaaugaugcagcuugacccaagugccaagaccuggauagacauugaaggucguccagaagacccuguggaaauagcucuuuaccaaccuaugucgggcuguuacauacauuucuucagagaaccaacagauuugaaacaguucaagcaagaugccaaauuuucucaugggauugauguggcagaucucuucccugcucaaccugguuugaccagugcagucauugaagcccucccucgcaauauggugcugaccugucaagguucagaugauauuaagagacucuuggacucccaaggaagaagggacauaaagcuuauugacauugcacugagcaaggcugacucuaggagauuugagaaugcuguuugggaucagugcaaagaucuaugccauaugcacacuggagugguugucgaaaagaagaaaagaggaggcaaggaggaaauuaccccgcacugugcuuuaauggacugcauaauguaugaugcagcugugucaggagggcucaauauaccaguuuuaagagcaguucuccccagagacaugguguuuagaaccucaagccccaaggucguccuguaa

SEQ ID NO: 7895 - RNA, 1710 nt, Artificial Sequence
  derived and/or modified CDS sequence (wt) from LASV(Lassa virus/H.sapiens-wt/NGA/2018/ISTH_0664;Clade II)__AVV65096__NP
augagcgcuuccaaggaagugaagucauuucucuggacacaaucauuaaggagggaacuuucagguuauugcuccaguauaaagcuucagguuguuaaagaugcucaggcccuccuucauggucuugacuuuucugaagucagcaaugugcagcguuuaaugcgcaaacaaaagagggaugauagugaucugaaacgucucagagaucugaaucaggcugucaacaaucuuguugaacucaaaucaacacaacaaaaaaguauccugagaguugggaccuugacuucagaugaccugcugacauuggcagcugacuuagagaaacuaaagucgaaggucauuaggacagaaaggccacugaguucaggugucuacauggggaauuugaguacacagcagcuugagcaaagaagagcauugcugaacaugauaggcaugguuggcgggacucaaggcacccaaccuggaagagacggaguuguuagggugugggauguuaagaauccggaucuuuugaacaaucaguucgguaccaugccuaguuugacacuagcaugucucaccaaacaaggucaaguugaucuaaaugaugccguccuggcacuaacagaccugggucuaauauacacagcuaaguacccaaauagcucugaccuagacagacuuucccaaagccauccuauacugaauaugguggacacuaagaagagcuccuugaacauuucugguuacaacuucagcuuaggagcugcagugaaagcuggagccuguaugcuugauggggggaacauguuggagaccaucaagguuacaccucagacaauggauggcaucuugaagucuauuuuaaaggugaaaaaaucccuagggauguuuguuucagauacaccuggugagaggaacccuuaugagaacauacuuuacaagaucugucuuucuggugacggcuggcccuacauagcuucaaggacuuccauuguggguagagcuugggagaauaccacuguggaucucgagccagauggaaaacuacaaaaagugggcacaguuggguccaacaagucuuuacagucagcaggguucccaacagggcugaccuauucucaguugaugacacuuaaagacucaaugaugcagcuugacccaagugccaagaccuggauagacauugaaggucguccagaagacccuguggaaauagcucuuuaccaaccuaugucgggcuguuacauacacuucuucagagaaccaacagacuugaaacaauucaagcaggaugccaaauauucucaugggauugauguagcagaucuuuucccugcucaaccugguuugacuagugcaguuauugaagcccucccucgcaauaugguacugaccugucaagguucagaugacauuaagagacucuuagacucccaaggaagaagagacauaaagcuuauugacauuucacugagcaaggcugacucuaggagauuugaaaaugcuguuugggaucaaugcaaagaucuaugccauaugcacacuggagugguugucgaaaagaagaaaagaggaggcaaagaagaaauuaccccgcacugugcuuuaauggauugcauaauguaugaugcagcugugucaggaggacucaauauaccaguuuuaagagcaguucuccccagagacaugguguuuagaaccucaagccccaaggucguccuguaa

SEQ ID NO: 7896 - RNA, 1710 nt, Artificial Sequence
  derived and/or modified CDS sequence (wt) from LASV(Lassa virus/H.sapiens-wt/NGA/2018/ISTH_0959;Clade II)__AVV65100__NP
augagugcuucuaaggaagugaagucauuucucuggacacagucuuugaggagggagcuuucagguuauugcuccaauauaaaacuucaaguuguuaaggaugcucaggcucuccuucauggucuugacuuuucugaagucagcaaugugcagcgcuuaaugcgcaaacaaaagagggaugauagugaucugaagcgucucagagauuugaaucaggcugucaacaaucuuguagaacuuaaaucgacacaacaaaagagcaucuugagaguugggacccugaccucagaugaccugcugacacuggcagcugacuuagagaaacuaaagucgaaggucauuagaacagaaaggccacuaagcucagguguuuauauggggaauuugaguacacagcagcuugagcagagaagggcauugcugaacuugauaggcaugguugguggggcucagggcacccagccuggaagagacggaguuguuaggguuugggauguuaagaauccggaccuucugaacaaccaguucggcaccaugccuagucugacauuggcaugucucaccaaacaaggucaaguugauuugaaugaugucgucuuagcacugacagaccugggccuaauauacacagccaaguacccaaauagcuccgaccuggacagacuuucccagagccauccuauacugaauaugguggacacaaagaagagcucuuugaacauuucugguuucaacuucagcuuaggagcugcaguaaaagcuggagcuuguaugcuugauggggggaacauguuagagaccaucaagguuacaccucagacaauggauggcaucuugaagucuauuuuaaagguaaaaaaaucuuugggaauguuuguuucggacacaccuggugagaggaacccuuaugagaauauacuuuacaagaucugucuuuccggugacggauggcccuauauagcuucaaggacuuccauuguggguagggcuugggagaauaccacuguggaucucgagucagauggaaaaccgcauaaaguaggcacugcuggguccaacaagucuuuacagucagcgggguucccaacagggcugacuuauucucaguugaugacacuuaaagacucaaugaugcagcuugacccaagugccaagaccuggauagacauugaaggucguccagaagacccuguggagauagcccucuaccaaccuaugucaggcuguuacauacacuucuucagagaaccaacagacuugaaacaauucaagcaagaugccaaauauucucaugggauugauguggcagaucuuuucccugcucaaccugguuugaccagcgcagucauugaagcccucccucgcaauauggugcuaaccugucaagguucagaugauauuaagagacucuuagacucccaaggaagaaaggauauaaagcuuauugacauugcacugagcaagacugacucuaggagauuugaaaaugcuguuugggaucaguguaaggaucuaugccauaugcacacuggagugguugucgaaaagaagaagagaggaggcaaagaagagaucaccccgcacugugcuuuaauggacugcauaauguaugaugcagcugugucaggaggacucaauauaccaguuuuaagggcaguucuccccagggacaugguguuuagaaccucaagucccaaggucguccuguaa

SEQ ID NO: 7897 - RNA, 1710 nt, Artificial Sequence
  derived and/or modified CDS sequence (wt) from LASV(Lassa virus/H.sapiens-wt/NGA/2018/ISTH_1024;Clade II)__AVV65106__NP
augagugcuucuaaggaaguaaaaucauuccucuggacacagucauugagaagggagcuuucagguuauugcuccagcauaaagcuucaaguuguuaaagaugcacaggcucuccuucauggucuugacuuuucugaagucagcaaugugcaacgcuuaaugcguaagcagaaaagggaugauagugaucugaagcgucuuagagaucugaaucaggcugucaacaaucuuguggaacucaaaucaacacaacaaaagagugucuuaagaguugggaccuuauccucagaugaccugcugacauuagcagcugauuuagagaagcuaaagucaaaggucaucagaacagaaaggccacuaagcucagguguuuauauggggaauuugaguacacagcaacuugagcaaaggagagcauugcugaacaugauaggcaugguugguggggcucagggcacccaaccuggaagagacggaguuguuagggugugggauguuaaaaauccggaucucuugaacaaccaguuuggcaccaugcccagucugacauuagcaugucucacuaaacaaggucaaguugauuuaaaugaugccguuuuagcacuaacagaccuggguuuaauauacacagccaaguacccaaauagcuccgaccuggauagacuuucccaaagucaucccauacugaacaugguggacaccaagaaaagcucuuugaauauuucugguuacaacuucaguuuaggagcugcagugaaagcuggagcuuguaugcuugauggagggaacauguuggagaccaucaagguuacaccucagacaauagaugguauccugaagucuauuuuaaaggugaaaaaauccuugggaauguuugucucagauacgccuggugagagaaacccuuaugagaacauacuuuauaagaucugucuuuccggugacggcuggcccuacauagcuuccaggacuucuauuguggguagagcuugggagaauacuacuguggaucucgaaucagauggaaaaccacaaaaggugggcacugcugggucuaacaagucuuugcagucagcgggguuuccaacagggcugaccuacucucagcugaugacacuuaaggauucaaugaugcagcuugacccaagugccaaaaccuggauagacauugaaggucguccagaagacccuguggaaauagcucuuuaccaaccuaugucgggcuguuauauacacuucuucagagaaccaacagacuuaaaacaauucaaacaagaugccaaauacucccaugggauugauguaguagaucuuuucccugcucaaccuggcuugaccagugcaguuauugaagcccucccucgcaauaugguacugaccugucaagguucagaugauaucaagagacucuuggauucccaaggaagaagggacauaaagcuuauugacauugcacugagcaaggcugacucuaggagauuugaaaaugcuguuugggaucaaugcaaagaucugugccacaugcacacuggggugguugucgaaaagaagaaaagagggggcaaagaagaaaucaccccacauugugcuuuaauggacugcauaauguaugaugcagcugugucaggaggacucaauauaccaguuuuaagagcaguucucccuagagacaugguguucagaaccucaagccccaaggucguccuguaa

SEQ ID NO: 7898 - RNA, 1710 nt, Artificial Sequence
  derived and/or modified CDS sequence (wt) from LASV(Lassa virus/H.sapiens-wt/NGA/2018/ISTH_1079;Clade II)__AVV65108__NP
augagugcuuccaaggaagugaagucauuucucuggacacagucauuaaggagggaacuuucagguuauugcuccaauauaaagcuucaaguuguuaaggaugcucaggcucuccuucauggccuugacuuuucugaagucagcaaugugcagcguuuaaugcgcaaacaaaaaagggaugacagugaucugaaacgucucagagaucugaaucaggcugucaacaaucuuguugaacucaaaucaacacaacaaaagaguauccugagaguugggaccuugacuucagaugaucugcugacauuggcagcugacuuagagaaacuaaagucgaaggucauuaggacagaaaggccauugagcucagguguuuauauggggaauuugagcacacaacagcuugagcaaagaagagcauugcugaacaugauaggcaugguugguggaacccagggcacccaaccuggaagagacggaguugucagggugugggauguuaagaauccggaucuucugaacaaccaguucggcaccaugccuaguuugacauuagcaugucucaccaaacaaggucaaguugaucuaaaugaugccguccuggcacuaacagaccuaggucugauauacacagcuaaguacccaaauagcucugaccuagacagacuuucccaaagccauccuauacugaauaugguggacacuaagaagagcuccuugaacauuucugguuacaacuucagcuuaggagcugcagugaaagcuggagcuuguaugcuugauggggggaacauguuggagaccaucaagguuacaccucagacaauggauggcauccugaagucuauuuuaaaggugaaaaaauccuuaggaauguuuguuucagauacaccuggugagaggaacccuuaugagaauauacuuuacaagaucugucuuucuggugacggcuggcccuauauagcuucaaggacuuccauuguagguagagcuugggagaauaccacuguggaucucgagucagauggaaaaccacaaaaagugggcacagcuggguccaacaagucuuuacagucagcaggguuuccaacagggcugaccuauucucaguugaugacacuuaaagacucaaugaugcagcuugacccaagugccaaaaccuggauagacauugaaggucguccagaagacccuguggaaauagcucuuuaccaacccauaucgggcuguuacauacacuucuucagagaaccaacagacuuaaaacaauucaagcaggaugccaaauauucucaugggauugauguagcagaucuuuucccugcucaaccugguuugacuagugcagucaucgaagcccucccucgcaauaugguacugaccugucaagguucagaugauauuaagagacucuuagacucccaaggaagaagagacauaaagcucauugacauuucacugagcaaggcugacucuaggagauuugaaaaugcuguuugggaucagugcaaagaucuaugccauaugcauacuggagugguugucgaaaagaagaaaagaggagguaaagaagaaauuaccccgcacugugcuuuaauggauugcauaauguaugaugcagcugugucaggaggacucaauauaccaguuuuaagagcaguucuccccagagacaugguguuuagaaccucaagccccaaggucguccuguaa

SEQ ID NO: 7899 - RNA, 1710 nt, Artificial Sequence
  derived and/or modified CDS sequence (wt) from LASV(Lassa virus/H.sapiens-wt/NGA/2018/ISTH_1375;Clade II)__AVV65116__NP
augagugcuucuaaggaagugaagucauuucucuggacacaguccuugaggagggagcuuucaggcuauugcuccaacauaaaacuucaaguuguuaaggaugcucaggcucuccuucauggucuugacuuuucugaaguuagcaaugugcagcgcuuaaugcgcaaacaaaagagggaugacagugaucugaaacgucucagagauuugaaucaagcugucaacaaucuuguagaacuuaaaucgacacaacaaaagaguaucuugagaguugggaccuugaccucagaugaccugcugauauuggcagcugacuuagagaaacugaaaucgaaggucauuagaacagaaaggccacuaagcucagguguuuauauggggaacuugagcacacagcagcuugagcagagaagagcauugcugaacuugauaggcaugguugguggggcucagggcacucaaccugggagagacggaguugucaggguuugggauguuaagaauccagaccuuuugaacaaccaguucggcaccaugccuagucugacauuggcaugucucaccaaacaaggccaagucgauuugaaugaugcugucuuagcacugacagaccugggccuaauauacacagccaaguacccaaauagcuccgaccuggacagacuuucccaaagccauccuauacugaauaugguggacacuaagaagagcuccuugaauauuucugguuucaacuucagcuuaggagcugcagugaaagcuggagcuuguaugcuugauggggggaacauguuggagaccaucaggaucacaccucagacaauggauggcaucuugaagucuauuuuaaagguaaaaaaaucuuugggaauguuuguuucggacacaccuggugagaggaacccuuaugagaauauacuuuacaagaucugucuuuccggugacggauggcccuacauagcuucaaggacuucuauuguggguagggcuugggagaauaccacuguggaucucgagucagauggaaaaccgcauaaagugggcacugcuggguccaacaagucuuuacagucagcgggguucccaacagggcugacuuauucucaguugaugacacuuaaagacucaaugaugcagcuugacccaagugccaaaaccuggauagacauugaaggucguccagaagacccuguggagauagcccuuuaccaaccuaugucaggcuguuauauacacuucuucagagaaccaacagacuugaaacaguucaagcaagaugccaaauauucucaugggauugauguggcagaucuuuucccugcucaaccuggauugaccagcgcagucauugaagcccucccucgcaauauggugcuaaccugucaagguucagaugauauuaagagacucuuggacucccaaggaagaagggauauaaagcuuauugacauugcacugagcaaggcugacucuaggagauuugaaaaugcuguuugggaucagugcaaagaucuaugccauaugcacacuggagugguugucgaaaagaagaaaagaggaggcaaagaagaaaucaccccacacugugcuuuaauggacugcauaauguaugaugcagcugugucaggaggacucaauauaccaguuuuaagggcaguucuccccagggacaugguguucagaaccucaagucccaaggucguccuguaa

SEQ ID NO: 7900 - RNA, 1710 nt, Artificial Sequence
  derived and/or modified CDS sequence (wt) from LASV(Lassa virus/H.sapiens-wt/NGA/2018/ISTH_1381;Clade II)__AVV65112__NP
augaguguuuccaaggaagugaagucauuucucuggacacagucacugaggagggaacuuucagguuauugcuccagcauaaagcuucaaguuguuaaggaugcucaggcucuccuucauggucuugacuuuucugaagucagcaaugugcagcgcuuaaugcgcaagcaaaaaagagaugauagugaucugaaacgucucagagaucugaaucaggcugucaacaaucuuguagaacucaaaucaacacaacaaaagagcaucuugagaguugggacucuaaccucagaugaccuguugacauuggcagcugacuuagagaaacuaaagucgaaggucauuagaacagaaaggccacuaagcucagguguuuauauggggaaccugaguacacagcaacuugagcaaagaagagcauugcugaacaugauaggcauggcugguggggcccagggcacccagccuggaagagauggaguuguuagggugugggauguuaagaauccggaucuuuugaacaaucaguuuggcaccaugccuagucugacauuagcaugucucaccaaacaaggucaaguugauuugaaugaugcugucuuagcacuaacagaccugggucuaauauacacagcuaaguacccaaauagcuccgaccuagacaggcuuucccaaagucaucccauacuaaauaugguagacacuaagaagagcuccuugaacauuucugguuacaacuucagcuuaggggcugcagugaaagcuggagcuuguaugcuugauggggggaacauguuggagaccaucaagguuacaccucagacaauggauggcauccugaagucuauuuugaagguaaaaagauccuugggaauguuuguuucagauacaccuggugagaggaacccuuaugagaacauacuuuacaagaucugucuuuccggugacggcuggcccuacauagcuucaaggacuuccauuguggguagagcuugggagaauaccacuguggaucucgagucagauggaaagccacaaaagauaggcaauacuggguccaacaagucucuacagucagcgggguuuccaacagggcugaccuauucucaguugaugacacuuaaggauucaaugaugcagcuugacccaagugccaaaaccuggauagacauugaaggucguccagaagaccccguagaaauagcucuuuaccagccuaugucgggcuguuacauacacuucuucagagaaccaacagacuugaaacaguuuaagcaagaugccaaauauucucauggaauugauguagcagaucuuuucccugcucaaccugguuugaccagugcagucauugaagcccucccucgcaauaugguacugaccugucaagguucagaugauauuaagagacuccuugaaucccaaggaagaagagacauaaagcuuauugacauugcacugagcaaggcugacucuaggagauuugaaaaugcuguuugggaucagugcaaagaccugugccauaugcacacuggagugguugucgagaagaagaaaagaggagguaaagaagaaauuaccccgcacugugcuuuaauggacugcauaauguaugaugcagcugugucaggaggacucaauauaccaguuuuaagagcaguucuccccagagacaugguguuuagaaccucuagccccaaggucguccuguaa

SEQ ID NO: 7901 - RNA, 1710 nt, Artificial Sequence
  derived and/or modified CDS sequence (wt) from LASV(LASV003-NIG-2008;Clade II)__AIT17581__NP
augagugcuuccaaggaagugaagucauuucucuggacacagucauugaggagggagcuuucagguuauugcuccagcauaaagcuucaaguugucaaggaugcucaggcucuucuucauggucuugacuuuucugaaguuagcaaugugcagcgcuuaaugcgcaaacaaaaaagggaugauagugaucugaaacgucucagagaucugaaucaggcugucaacaaucuuguggaacucaaaucaacacaacaaaagagugucuugagaguuggaaccuugaccucagaugaccugcugacauuggcagcugacuuagagaaacuaaagucgaaggucaucagaacagaaaggccacuaagcucagguguuuauauggggaauuugagugcacagcaacuugagcaaagaagaacauugcugaacaugauaggcaugguugguggggcucagggcacucaaccuggaagagacggaguuguuagggugugggauguuaagaauccagaucuuuugaacaaucaguucggcaccaugcccagucugacauuagcaugucucacuaaacaaggccagguugauuugaaugaugucgucuuagcacuaacagaccugggucuaauauacacagcuaaguacccuaauagcuccgaccuggacagacuuucccaaagucauccuauauugaguaugguggacaccaagaagagcuccuugaacauuucugguuacaacuucagcuuaggagcugcagugaaagcuggagcuuguaugcuugauggggggaacauguuggaaaccaucaagguuacaccucagacaauggauggcaucuugaagucuauuuuaaagguaaaaaaauccuugggaauguuuguuucagacacaccuggugagaggaacccuuaugagaacauacuuuacaagaucugucuuucuggugacgguuggcccuauauagcuucaaggacuucuauuguggguagagcuugggagaauacuacuguggaucucgagucagauggaaaaccacaaaaagugggaacugcuggguccaauaagucuuuacagucagcgggguuuccaacagggcugacuuacucucaguugaugacacuuaaagacucaaugaugcagcuugacccaagugccaaaaccuggauagacauugaaggucguccagaagacccuguggaaauagcucuauaccagcccaugucgggcugcuacauacacuucuucagagaaccaacagacuuaaaacaguucaagcaagaugccaaauauucucauggaauugauguaacagaucuuuucccugcucaaccuggauuaaccagugcagucauugaagcccucccucgcaauaugguacugaccugucaagguucagaugacaucaagcgacucuuggauucccaaggaaggagggacauaaagcuuauugacauugcauugagcaaggcugacucuagaagauuugaaaaugcuguuugggaucagugcaaagaucuaugccauaugcacacuggagugguugucgaaaagaagaaaagaggaggcaaagaagaaauuaccccacauugugcucuaauggacugcauaauguaugaugcagcugugucaggaggacucaauauaccaguuuugagagcaguccuccccagagacaugguguuuagaaccucaagccccaaggucguccuguaa

SEQ ID NO: 7902 - RNA, 1710 nt, Artificial Sequence
  derived and/or modified CDS sequence (wt) from LASV(LASV035-NIG-2009;Clade II)__AIT17589__NP
augagugcuuccaaggaaguaaagucauuccucuggacacagucauugaggagggaacucucagguuacugcucuaguauaaagcuucaaguuguuaaggaugcucaggcucuccuucauggucuugacuuuucugaggucagcaauguucagcgcuugaugcgcaaacaaaaaagggacgacagugaucugaaacgucucagagaucugaaccaggcugucaacaaucuuguagaacucaaaucaacacaacaaaagaguauccugagaguugggaccuugaccucagaugaccugcugacauuggcagcugacuuagagaaacuuaagucgaaggucaucagaacagaaaggccacuaagcucagguguuuacauggggaauuugagugcacagcaacuugagcaaagaagagcauugcugaacaugauaggcaugguugguggagcucaggguacccaaccuggaagagacggaguuguuagggugugggaugucaagaauccggaucuuuugaacaaccaauucggcaccaugccuagccugacauuagcaugucucaccaaacaaggucaaguugauuugaaugaugcugucuuggcacuaacagaccugggucuaauauacacagcuaaguacccaaacagcuccgaccuggacagacuuucccaaagccauccuauacugaauaugguggacacuaagaagagcuccuugaacauuucugguuacaacuucaguuuaggagcugcagugaaagcuggagcuuguaugcuugauggggggaauauguuggagacuaucaagguuacaccucagacaauggauggcaucuugaaaucuaucuuaaagguaaaaagaucuuugggaauguuuguuucagacacaccuggugagaggaacccuuaugagaacauacuuuacaagaucugucuuucuggggacgguuggcccuacauagcuucaagaacuuccauuguggguagagcuugggagaacaccacuguggaucucgagucagauggaaaaccacaaaaggugggcacuacuggguccaacaagucuuuacagucagcgggguucccaacaggguugaccuauucucaguugaugacacuuaaagacucaaugaugcaacuugacccaagugcuaaaaccuggauagacauugaaggucgaccagaagacccuguggaaauagcucuuuaccaaccuaugucgggcuguuacauacacuucuucagagaaccaacagacuuaaaacaguucaagcaagaugccaaauauucucaugggauugauguagcagaucuuuucccugcucaaccuggcuugaccagugcagucauugaagcccuuccucgcaauauggugcugaccugucaggguucagacgauauuaagaaacucuuagauucccaaggaagaagggacauaaagcuuauugacauugcacugaguaaggcugacucuaggaaguuugaaaaugcuguuugggaccaaugcaaggaucuaugccauaugcauacuggggugguuguugaaaagaagaaaagaggaggcaaagaagaaauuaccccgcacugugcucuaauggauugcauaauguaugaugcagcugugucaggaggacucaauauaccaguuuugagagcaguucuccccagagacaugguguuuagaaccucaagccccaaggucguccuguaa

SEQ ID NO: 7903 - RNA, 1710 nt, Artificial Sequence
  derived and/or modified CDS sequence (wt) from LASV(LASV042-NIG-2009;Clade II)__AIT17593__NP
augagugcuucuaaggaagugaaaucauuucucuggacacagucauugaggagggagcuuucagguuauugcuccagcauaaaacuucaaguugucaaggaugcucaggcucuccuucauggucuugacuuuucugaaguuagcaaugugcagcgcuuaaugcgcaaacaaaagagggaugauggugaucugaaacgucucagagauuugaaucaggcugucaacaaucuuguagaacucaagucgacacaacaaaagagcaucuugagaguugggaccuugacuucagaugaccugcugacauuggcagcugacuuagagaaacuaaagucgaaggucauuagaacagaaaggccacuaagcucagguguuuauauggggaauuugaguucacagcagcuugagcaaagaagagcauugcugaacaugauaggcaugguugguggggcucagggcacccagcccggaagagacggaguuguuagggucugggauguuaagaauccggaucuuuugaauaaucaguucggcaccaugccuagucugacauuagcaugucucacuaagcaaggucaaguugauuugaaugaugcugucuuagcacuaacagaccugggucugauauacacagcuaaguauccaaauagcuccgaccuagacagacuuucccaaagccauccuauacugaauaugguggacacgaagaagagcuccuugaacauuucugguuacaacuucagcuuaggagcugcagugaaagcuggagcuuguaugcuugauggggggaacauguuggaaaccauuaagguuacaccucagacaauggauggcaucuugaagucuauuuuaaaggugaaaagaucuuugggaauguuuguuucagauacaccuggugagaggaacccuuacgagaacauacuuuauaagaucugucuuuccggugacggcuggcccuacauagcuucaagaacuucuauuguggguagagcuugggagaauacaacuguggaucucgagucggauggaaaaccacaaaaagugggugcugcuggguccaccaagucuuuacagucagcgggguuuccaacagggcuaaccuauucucaguuaaugacacuuaaagacucaaugaugcagcuugacccaagugccaaaaccuggauagacauugaaggucguccagaagacccuguggaaauagcucuuuaccaaccuaugucgggcuguuacauacacuucuucagagaaccaacagauuuaaaacaguucaagcaagaugccaaauauucucaugggauugauguggcagaucuuuucccugcucaaccugguuugaccagugcagucauugaagcccucccucgcaauauggugcugaccugucaagguucagaugauauuaagagacucuuggacucccaaggaagaagggacauaaagcuuauugacauugcacuaagcaagguugacucuaggagauuugaaaaugcuguuugggaucaaugcaaagaucuaugccauaugcauacuggaguuguugucgaaaagaagaaaagagggggcaaagaagaaauuacuccgcacugugcuuuaauggacugcauaauguaugaugcagcugugucaggaggacucaauauaccaguucuaagagcaguucuccccagagacaugguguuuagaaccucaagccccaaggucguccuguaa

SEQ ID NO: 7904 - RNA, 1710 nt, Artificial Sequence
  derived and/or modified CDS sequence (wt) from LASV(LASV049-NIG-2009;Clade II)__AIT17605__NP
augagugcuuccaaggaagugaagucauuucucuggacacagucauugaggagggagcuuucagguuauugcuccagcauaaaacuucaaguuguuaaggaugcucaggcucuccuucauggucuugacuuuucugaggucagcaaugugcagcgcuuaaugcgcaaacaaaaaagggaugauagugaucugaaacgucucagagaucuaaaucaggcugucaacaaucuuguagaacucaaaucaacacaacaaaagaguaucuugagaguugggacccugacuucagaugaccugcugacauuggcggcugacuuggagaaacuaaagucgaaggucauuagaacagaaaggccacuaagcucaggugucuauauggggaauuugaguacacagcagcuugaacaaagaagagcauuguugaacaugauaggcauggcugguggggcucaaggcacccaaccuggaagagacggaguugucagggugugggauguuaagaauccggaucuuuugaacaaccaguucggcaccaugccuagucuaacauuagcaugucucaccaaacaaggucaaguugauuugaaugaugccgucuuagcacuaacagaccugggucuaauauacacagccaaguacccaaauagcuccgacuuggacagacuuucccagagccauccuauacugaauaugguagacacuaagaagaguuccuugaacauuucugguuacaacuucagcuuaggagcugcagugaaagcuggagcuuguaugcuugaugggggaaacauguuggagaccaucaagguuacaccucagacaauggauggcaucuugaaaucuauuuuaaagguaaaaaaguccuugggaauguuuguuucagauacaccuggugagaggaacccuuaugagaauauacuuuacaagaucugucuuucuggugacggcuggcccuacauagcuucaaggacuuccauuguggguagagcuugggagaauacuacuguggaucucgagucagaugggaaaccacagaaagugggcacugcuggguccaacaagucuuuacagucagcgggguucccaacagggcugaccuauucucagcugaugacacucaaagacucaaugaugcaacuugauccaagugccaaaaccuggauagacauugaaggucguccagaagacccuguagaaauagcucuuuaccaaccuaugucgggcuguuacauacacuucuucagagaaccaacagacuuaaaacaguucaaacaagaugccaaauauucucaugggauugauguagcagaucuuuucucugcucaaccugguuugaccagugcagucauugaagcccucccucgcaacaugguacugaccugucaagguucagaugauaucaagagacucuuggacucccaaggaagaagggacauaaagcuuauugacauugcauugagcaaggccgauuccaggagauuugaaaaugcuguuugggaucagugcaaagaucuaugccauaugcauacuggagugguugucgaaaagaagaaaagaggaggcaaagaagaaauuaccccgcacugugccuuaauggacugcauaauguaugaugcagcugugucaggaggacucaauauaccaguuuuaagagcaguucuccccagagacaugguguuuagaaccucaagccccaaggucguccuguaa

SEQ ID NO: 7905 - RNA, 1710 nt, Artificial Sequence
  derived and/or modified CDS sequence (wt) from LASV(LASV052-NIG-2008;Clade II)__AIT17609__NP
augagugcuuccaaggaagugaagucauuucucuggacacaaucauugaggagggagcuuucagguuauugcuccagcauaaaacuucaaguuguuaaggaugcucaggcucuccuucauggucuugacuuuucugaagucagcaaugugcagcgcuuaaugcgcaaacaaaagagggaugauagugaucugaaacgucucagagauuugaaucaggcugucaacaaucuuguagagcucaaaucgacacaacaaaagagcaucuugagaguugggaccuugaccucagaugaccugcugacacuggcagcugacuuagagaaacuaaagucaaaggucauuagaacagaaaggccacuaagcucagguguuuauauggggaauuugaguacacagcagcuugagcaaagaagagcauugcugaacaugauaggcauggcugguggggcucagggcacccagccugggagagacggaguugucagggugugggauguuaagaauccggaucuuuugaacaaucaguucggcaccaugccuagucugacauuagcaugucucaccaaacaaggucaaguugauuugaaugaugcugucuuagcacuaacagaccugggucuaauauacacagcuaaguauccaaauagcuccgaccuggacagacuuucucaaagccauccuauacugaauaugguggacacuaagaagagcucuuugaacauuucugguuacaacuucagcuugggagcugcagugaaagcuggagcuuguaugcuugauggggggaacauguuggagaccauuaagguuacaccucagacaauggauggcaucuugaagucuauuuuaaagguaaaaagaucuuugggaauguuuguuucagauacaccuggugagaggaacccuuacgagaacauacuuuacaagaucugucuuucuggugacggcuggcccuacauagcuucaaggacuuccauuguggguagagcuugggagaacacuaccguggaucucgagucagauggaaaaccacaaaaagugggugcugcuggguccaacaagucuuuacagucagcaggguuuccaacagggcugaccuauucucaguugaugacacuuaaagacucaaugaugcagcuugacccaagugccaaaaccuggauagauauugaaggucguccagaggacccuguggaaauagcucuuuaccaaccuaugucaggcuguuacauacacuucuucagagaaccaacagauuuaaaacaguucaagcaagaugccaaauauucucaugggauugauguggcagaucuuuucccugcucaaccugguuuaaccagugcagucauugaagcccuuccucgcaauaugguacuaacuugucaagguucagaugauauuaagagacucuuggacucccaaggaagaagggacauaaagcuuauugacauugcacugagcaaggcugacucuaggagauuugaaaaugcuguuugggaucagugcaaagaucuaugccauaugcauacuggagugguugucgaaaagaagaaaagaggagguaaagaagaaauuaccccgcacugugcuuuaauggacugcauaauguaugaugcagcugugucaggaggacucaauauaccagucuuaagagcaguucuccccagagacaugguguuuagaaccucaagccccaaggucguccuguaa

SEQ ID NO: 7906 - RNA, 1710 nt, Artificial Sequence
  derived and/or modified CDS sequence (wt) from LASV(LASV056-NIG-2008;Clade II)__AIT17613__NP
augagugcuucuaaggaagugaagucauuucucuggacacagucauugaggagggagcuuucagguuauugcuccaauauaaaacuucaaguuguuaaggaugcucaggcucuucuucauggucuugacuuuucugaagucagcaaugugcagcgcuuaaugcgcaaacagaagagggaugauagugaucugaaacgucucagagauuugaaucaggccgucaacaaucuuguagaacucaaaucgacacaacagaagagcauccugagaguugggaccuugaccucagaugaccugcuaacauuggcagcugacuuagagaaacuaaagucgaaggucauuagaacagaaaggccacuaagcucagguguuuauauggggaauuugaguacacagcagcuugagcaaagaagagcacugcugaacaugauaggcaugguugguggggcucagggcacacaaccuggaagagauggaguuguuagggugugggauguuaagaacccggaucuuuugaacaaucaguucggcaccaugcccagucugacauuagcaugucuuacuaaacaaggucaaguugauuugaaugaugcugucuuggcacuaacagaccugggucugauauacacagcuaaguauccaaauagcuccgaccuagacagacuuucccaaagucauccuauauugaauaugguggacacuaagaagagcuccuugaauauuucugguuacaacuucagcuuaggagccgcagugaaagcuggagcuuguaugcuugauggagggaacauguuggagaccauuaagguuacaccucagacaauggauggcaucuuaaagucuauuuuaaaggugaaaagaucuuugggaauguuuguuucagacacaccuggugagaggaacccuuacgagaacauacuuuacaaaaucugucuuuccggugacggcuggccuuacauagcuucaaggacuucuauuguggguagagcuugggagaauacuacuguggaucucgagucagacggaaaaccacaaaaaguggguacugcuggguccaacaagucuuuacagucagcgggguuuccaacagggcugaccuauucucaguugaugacacuuaaagacucaaugaugcagcuugacccaagugccaaaaccuggauagacauugaaggucguccagaagacccuguagaaauagcucuuuaccaaccuaugucgggcuguuacauacacuucuucagagaaccaacagauuuaaaacaguucaaacaagaugccaaauauucucaugggauugauguggcagaucucuucccugcucaaccugguuugaccagugcagucauugaagcccucccucgcaauaugguguugaccugucaagguucagaugauauuaagagacucuuggacucccaaggaagaagggacauaaagcuuauugacauugcacugagcaagacugacucuaggagauuugaaaaugcuguuugggaucagugcaaagaucuaugucauaugcauacuggagugguuguugaaaagaagaagagaggaggcaaagaagaaauuaccccgcauugugcuuuaauggacugcauaauguaugaugcagcuguaucaggaggacucaauauaccaguuuuaagagcaguucuccccagagacaugguguuuaggacuucaagccccaaggucguccuguaa

SEQ ID NO: 7907 - RNA, 1710 nt, Artificial Sequence
  derived and/or modified CDS sequence (wt) from LASV(LASV058-NIG-2008;Clade II)__AIT17617__NP
augagugcuucuaaggaagugaagucauuucuuuggacacagucauugaggagggagcuuucagguuauugcuccagcauaaaacuucaaguugucaaagaugcucaggcucuccuucauggucuugacuuuucugaagucagcaaugugcagcgcuuaaugcgcaaacagaagagggaugauagugaucugaaacgucucagagauuugaaucaggccgucaacaaucuuguagaacucaaaucgacacaacaaaagagcaucuugagaguugggaccuugaccucagaugaccugcugacacuggcagcugacuuagagaaacuaaagucgaaggucauuagaacagaaaggccacuaagcucagguguuuauauggggaauuugagugcucagcagcuugagcaaaggagagcauugcugaacaugauaggcauggucgguggggcucagggcacucaaccuggaagggauggaguuguuagggugugggauguuaagaauccggaucuuuugaacaaucaguucggcaccaugcccagucugacauuagcaugucuuacuaaacaaggucaaguugauuugaaugaugcugucuuagcacuaacagaccugggucuaauauacacagcuaaguauccaaauagcucugaccuagacagacuuucccaaagccauccuauacugaauaugguggacacuaagaagagcuccuugaauauuucugguuucaacuucagcuuaggagcugcagugaaagcuggagcuugcaugcuugauggggggaacauguuggagaccauuaagguuacaccucagacaauggauggcaucuuaaaguccauucuaaaggugaaaagaucuuugggaauguuuguuucagauacaccuggugagaggaacccuuacgagaacauacuuuacaagaucugucuuuccggugauggcuggcccuacauagcuucaagaacuucuauuguggguagagcuugggagaauacuacuguggaucucgagucagauggaaaaccacaaaagguggguacugcuggguccaauaagucuuuacagucagcaggguuuccaacagggcugaccuauucccaauugaugacacuuaaagacucaaugaugcagcuugacccaagugccaaaaccuggauagacauugaaggucgaccagaagacccuguagaaauagcucuuuaccaaccuaugucgggcuguuacauacacuucuucagagagccaacagauuuaaaacaguucaagcaagaugccaaauauucucaugggauugauguggcagaucuuuucccugcccaaccugguuugaccagugcagucauugaagcccucccucgcaauaugguacugaccugucaagguucagaugauaucaagagacucuuggacucccagggaaggagggacauaaagcuuauugacauugcacugagcaaggcugauucuaggagauuugaaaaugcuguuugggaucaguguaaagauuuaugccauaugcauacuggagugguugucgaaaagaagaaaagaggaggcaaagaagaaauuacuccgcacugugcuuuaauggacugcauaauguaugaugcagcugugucaggaggacucaauauaccaguuuuaagagcaguucucccuagagacaugguguuuagaaccucaagccccaaggucguccuguaa

SEQ ID NO: 7908 - RNA, 1710 nt, Artificial Sequence
  derived and/or modified CDS sequence (wt) from LASV(LASV063-NIG-2009;Clade II)__AIT17621__NP
augagugcuucuaaggaagugaagucauuucucuggacacagucauuaaggagggagcuuucagguuauugcuccagcauaaaacuucagguuguuaaggaugcucaggcucuccuucauggucuugacuuuucugaagucaccaauguucaacgcuugaugcgcaaacaaaagagggaugauagugaucugaaacgucucagagauuugaaucaggcugucaacaaucuuguagaacucaaaucgacacaacaaaagagcaucuugagaguugggaccuugaccucagaugaccugcugacauuggcagcugacuuagagaaauuaaagucgaaggucauuagaacagaaaggccacuaagcucagguguuuacauggggaauuugaguacacagcagcuugagcaaagaagagcauugcugaacaugauaggcaugguugguggggcucagggcacccaaccuggaagagacggaguuguuagggugugggacguuaaaaauccggaucuuuugaacaaucaguucggcaccaugccuagucugacauuagcaugucucaccaaacaaggucaaguugauuugaaugaugcugucuuagcacuaacagaccugggucuaauauacacagccaaguauccaaauagcuccgaccuggacagacuuucccaaagccauccuauacugaauaugguggacacuaagaagagcuccuugaacauuucugguuauaacuucagcuuaggagcugcagugaaagcuggagcuuguaugcuugauggggggaacauguuggagaccauuaagguuacaccucagacaauggacggcauuuugaagucuauuuuaaagguaaaaaggucuuugggaauguuuguuucagauacaccuggugagaggaacccuuacgagaacauacuuuacaagaucugucuuuccggugacggcuggcccuacauagcaucaaggaccucuauuguggguagagcuugggagaauacuacuguggaucuugaaucagauggaaaaccacaaaagguggguauugcuggguccaacaagucuuuacagucagcgggguuuccaacagggcugaccuauucucaguugaugacacuuaaagacucaaugaugcagcuugacccaagugccaaaaccuggauagacauugaaggucguccagaagacccuguagagauagcucuuuaucaaccuaugucgggcuguuacauacacuucuucagagaaccaacagacuuaaaacaguucaagcaagaugccaaauacucucaugggauugauguggcugaucuuuucccugcucagccugguuugaccagugcagucauugaagcccucccucgcaauauggugcuaaccugucaagguucagaugauaucaagagacucuuggacucccaaggaagaagggacauaaagcuuauugacauugcacugagcaaggcugauucuaggaaauuugaaaaugcuguuugggaucagugcaaagaucuaugccauaugcacacuggagugguugucgaaaagaagaagagaggaggcaaagaagaaauuaccccgcacugugcuuuaauggacugcauaauguaugaugcagcugugucaggaggacucaacauaccaguuuuaagagcaguucuacccagagacaugguguuuagaaccucaagccccaaggucguccuguaa

SEQ ID NO: 7909 - RNA, 1710 nt, Artificial Sequence
  derived and/or modified CDS sequence (wt) from LASV(LASV1000-NIG-2009;Clade II)__AIT17783__NP
augagugcuucuaaggaagugaagucauuucucuggacacagucauugaggagggagcuuucagguuacugcuccaacauaaaacuucaagucguuaaggaugcucaggcucuccuucauggucuugacuucucugaagucagcaaugugcagcgcuuaaugcgcaaacaaaaaagggaugauagugauuugaaacgucucagagauuugaaucaggcugucaacaaucuuguagaacucaaaucgacacaacaaaaaaguaucuugagaguugggaccuugaccucagaugaccugcugacauuagcagcugacuuagagaaauuaaagucgaaggucauuagaacagaaaggccacuaagcucagguguuuauauggggaauuugaguacacagcagcuugagcagagaagagcacugcugaacaugauaggcaugguugguggggcucagggcacccaaccuggaagagacggaguuguuagggugugggauguuaagaauccggaucuuuugaacaaccaguucggcaccaugccuagucugacauuagcaugucucaccaaacaaggucaaguugauuugaaugauguugucuuagcacuaacagaccugggucuaauauacacagcuaaguacccaaauagcuccgaccuggacagacuuucccaaagccauccuauacugaauaugguggacacuaagaagagcuccuugaacauuucugguuacaacuucagcuuaggagcugcaguaaaagcuggagcuuguaugcuugauggggggaacauguuggagaccaucaagguuacaccccagacaauggauggcaucuuaaagucuauuuuaaagguaaaaaaaucuuugggaauguuugucucagacacaccuggugagaggaacccuuaugagaauauacuuuacaagaucugucuuuccggugacggcuggcccuacauagcuucaaggacuucuauuguggguagagcuugggagaacaccacuguggaucucgagucagauggaaagccgcaaaaagugggcacugcuggguccaacaagucuuuacagucagcgggguucccaacagggcugaccuauucucaguuaaugacacuuaaagacucaaugaugcagcuugauccaagugccaaaaccuggauagacauugaaggucguccagaagacccuguggaaauagcucuuuaccaaccugugucgggcuguuacauacacuucuucagagaaccaacagacuuaaaacaguucaagcaagaugccaaauauucucaugggauugauguggcagaucuuuucccugcccaaccugguuugaccagcgcagucauugaagcccucccucgcaauaugguacugaccugucaagguucagaugauauuaagagacucuuggacucccaaggaagaagggacauaaagcuuauugacauugcacugagcaaggcugacuccaggagauuugaaaaugcuguuugggaucagugcaaggaucuaugccauaugcauacuggagugguugucgaaaagaagaaaagaggaggcaaagaagaaaucaccccgcacugugcuuugauggacugcauaauguaugaugcagcugugucaggaggacucaauauaccaguuuuaagagcaguucuccccagggacaugguguuuagaaccucaagccccaaggucguccuguaa

SEQ ID NO: 7910 - RNA, 1710 nt, Artificial Sequence
  derived and/or modified CDS sequence (wt) from LASV(LASV1008-NIG-2009;Clade II)__AIT17787__NP
augagugcuucuaaggaagugaagucauuccucuggacacagucauugaggagggagcuuucagguuauugcuccaacauaaagcuucaaguuguuaaggaugcucaggcucuccuucauggucuugacuuuucugaaguuagcaaugugcagcgcuugaugcgcaaacaaaagagggaugauggugaucugaaacgucucagagaucugaaucaggcugucaacaaucuuguagaacucaaaucaacacaacaaaagaguaucuugagaguugggaccuugaccucagaugaccugcugacauuggcagcugacuuagagaaacuaaagucgaaggucaucagaacagaaaggccacuaagcucagguguuuacauggggaacuugagcacacagcaacuugagcaaagaagggcauugcugaacaugauaggcaugguugguggggcucagggcacccaaccuggaagagacggaguuguuagggugugggauguuaagaacccagaucucuugaacaaccaguucggcaccaugcccagucugacauuagcaugucucacuaaacagggucagguugauuugaaugaugccgucuuagcacugacagaccugggucuaauauacacagcuaaguacccuaauagcucugaccuggacagacuuucccaaagccauccuauauugaauaugguggacacuaagaagagcuccuugaacaucucugguuacaacuuuagcuuaggagcugcagugaaagcuggagcuuguaugcuugauggggggaacauguuggagaccaucaagguuacaccucagacaauggauggcaucuugaagucuauuuuaaagguaaaaaaauccuugggaauguuuguuucagauacaccuggugagaggaacccuuaugagaacauacuuuacaagaucugucuuuccggugacggcuggcccuacaucgcuucaaggacuucuauuguggguagagcuugggaaaacaccacuguagaucucgagucagauggaaaaccacaaaaagugggaacugcuggguccaacaagucuuuacagucagcgggguuuccaacagggcugacuuauucucaguugaugacacuuaaagacucaaugaugcagcuugacccaagugccaaaaccuggauagacauugaaggucguccagaagacccuguggagauagcucuuuaccagccuaugucgggcugcuauauacacuucuuccgagaaccaacagacuuaaaacaguucaagcaagaugccaaauauucucaugggauugauguaacagaucuuuucucugcucaaccuggauuaaccagugcagucauugaagcucucccucgcaauaugguauugaccugucaagguucagaugauauuaagcgacucuuggauucccaaggaagaagggacauaaagcuuauugauauugcacugagcaagguugacucuaggagauuugaaaaugcuguuugggaucagugcaaagaucuaugccauaugcacacuggaguggucgucgagaagaagaaaagaggaggcaaagaagaaauuaccccacacugugcucuaauggacugcauaauguaugaugcagcugugucaggaggucucaauauaccagucuugagagcaguccucccuagggacaugguguuuagaaccucaagccccaaggucguccuguaa

SEQ ID NO: 7911 - RNA, 1710 nt, Artificial Sequence
  derived and/or modified CDS sequence (wt) from LASV(LASV1015-NIG-2009;Clade II)__AIT17795__NP
augagugcuuccaaggaaguaaagucauuccuuuggacacagucauugaggagggagcucucagguuacugcuccagcauaaagcuucaaguuguuaaagaugcucaggcucuccuucauggucuugacuuuucugaagucagcaauguucagcgcuugaugcgcaaacaaaaaagggacgacagugaucugaaacgucucagagaucugaaccaggcugucaacaaucuuguagaacucaaaucaacacaacaaaagaguauccugagaguugggaccuugacuucagaugaccugcugacauuggcagcugacuuagagaaacuuaagucgaaggucaucagaacagaaaggccacuaagcucagguguuuacauggggaauuugaguacacagcaacuugagcaaagaagagcauuguugaacaugauaggcaugguugguggggcucaggguacccaaccuggaagagacggaguuguuagggugugggacgucaagaauccggaucuuuugaacaaccaauucggcaccaugccuagucugacauuagcaugucucaccaaacaaggucaaguugauuuaaaugaugcugucuuagcacuaacagaccuaggucuaauauauacagcuaaguacccaaacagcuccgaccuggacagacuuucccaaagccauccuauacugaauaugguggacacuaagaagagcuccuugaauauuucugguuacaacuucagucuaggagcugcagugaaagcuggagccuguaugcuugauggggggaacauguuggagaccaucaagguuacaccucagacaauggauggcaucuugaaaucuaucuuaaagguaaagagaucuuugggaauguuuguuucagauacaccuggugagaggaacccuuaugagaacauacuuuacaagaucugucuuucuggggacgguuggcccuacauagcuucaagaacuuccauuguggguagagcuugggagaacaccacuguggaucucgagucagauggaaaaccacaaaaggugggcacugcuggguccaacaagucuuuacagucagcgggguuuccaacaggguugaccuauucucaguugaugacacuuaaggacucaaugaugcaacuugacccaagugcuaaaaccuggauagacauugaaggucguccagaagacccuguggaaauagcucuuuaccaaccuaugucgggcuguuauauacacuucuucagagaaccaacagacuugaaacaguucaagcaagaugccaaauauucucauggaauugauguagcagaucuuuucccugcucaaccuggcuugaccagugcagucauugaagcccuuccccgcaauauggugcugaccugucaggguucagacgauauuaagaaacucuuagauucccaaggaagaagggacauaaagcuuauugacauugcacugagcaaagcugacucuaggagguuugagaaugcuguuugggaucaaugcaaggaucuaugccauaugcauacuggggugguuguugaaaagaagaaaagaggaggcaaagaagaaauuaccccacacugugcucuaauggauugcauuauguaugaugcagcugugucaggaggacucaauauaccaguuuuaagagcaguucuccccagagacaugguguuuagaaccucaagccccaaggucguccuguaa

SEQ ID NO: 7912 - RNA, 1710 nt, Artificial Sequence
  derived and/or modified CDS sequence (wt) from LASV(LASV1016-NIG-2009;Clade II)__AIT17799__NP
augagugcuucuaaggaagugaagucauuucucuggacacagucauugaggagggagcuuucagguuauugcuccaacauaaaacuucaaguuguuaaagaugcucaggcucuccuucauggucuugacuuuucugaagucagcaaugugcagcgcuuaaugcgcaaacaaaaaagggaugauagugaucugaaacgucucagagauuugaaucaggcugucaacaaucuuguagaacucaaaucgacacaacaaaagaguaucuugaggguugggaccuugaccucagaugaccugcugacauuagcagcugacuuagagaaacuaaagucgaaggucauuagaacagaaaggccacuaagcucaggugucuauauggggaauuugagugcacagcagcuugagcagagaagagcauugcugaacaugauaggcaugguugguggggcucagggcacucaaccuggaagagacggaguuguuagggugugggauguuaagaauccggaucuuuugaacaaccaguucgguaccaugccuagucugacacuagcgugucucaccaaacaaggucaagucgauuugaaugaugccgucuuagcacuaacagaccugggucuaauauacacagcuaaguacccaaauagcuccgaccuggacagacuuucucaaagccaucccauacugaauaugguggacacuaagaagagcuccuugaacauuucugguuacaacuucagcuuaggagcugcaguaaaagcuggagcuuguaugcuugauggggggaacauguuggagaccaucaagguuacaccucagacaauggauggcaucuugaagucuauuuuaaaggugaaaaaaucuuugggaauguuuguuucagauacaccuggugagaggaacccuuaugagaacauacuuuacaagaucugucuguccggugacggcuggcccuacauagcuucaaggaccucuauuguggguagagcuugggagaauacuacuguggaccucgagucagauggaaaaccgcaaaaagugggcacugcuggguccaacaaaucuuuacagucagcgggguuuccaacggggcugaccuauucccaguuaaugacacuuaaagacucaaugaugcaacuugacccaagugccaaaaccuggauagacauugaaggucguccagaagacccuguggaaauagcucuuuaccaaccuaugucgggcuguuacauacacuucuucagagaaccaacagacuuaaaacaguucaagcaggaugccaaauauucucaugggauugauguggcagaucuuuucccugcucaaccuggcuugaccagcgcagucauugaagcccucccucgcaauaugguacugaccugucaagguucagaugauauuaagagacucuuggacucccaaggaagaagggacauaaaacuuauugacauugcacugagcaaggcugacucuaggagauuugaaaaugcuguuugggaucagugcaaagaucuaugccauaugcauacuggagugguugucgaaaagaagaaaagaggaggcaaagaagaaauuaccccgcacugugcuuuaauggacugcauaauguaugaugcagcugugucaggaggacucaauauaccaguuuuaagagcaguucuccccagggacaugguguucagaaccucaagccccaaggucguccuguaa

SEQ ID NO: 7913 - RNA, 1710 nt, Artificial Sequence
  derived and/or modified CDS sequence (wt) from LASV(LASV221-NIG-2010;Clade II)__AIT17625__NP
augagugcuucuaaggaaguaaagucauuucucuggacacagucauugaggagggagcuuucagguuauugcuccagcauaaaacuucaaguuguuaaggaugcucaggcucuccuucauggucuugacuuuucugaagucagcaaugugcagcgcuuaaugcgcaaacaaaggagggaugauagugaucugaaacgucucagagauuugaaucaggcugucaacaaucuuguagaacucaaaucgacacaacaaaagagcaucuugagaguugggaccuugaccucggaugaccugcugacauuggcagccgaccuagaaaaacuaaagucgaaggucauuagaacagaaaggccacuaagcucagguguuuauauggggaauuugagcacacagcagcuugagcaaagaagagcauugcugaacaugauaggcaugguugguggggcccagggcacccaaccuggaagggacggaguuguuagagugugggauguuaagaauccggaucuuuugaacaaucaguucggcaccaugccuagucugacauuagcaugucucaccaaacaaggccaaguugauuugaaugaugcugucuuggcacuaacagaucugggucuaauauacacagcuaaguauccaaauagcuccgaccuggacagacuuucccaaagccauccuauacugaacaugguggacaccaagaagagcuccuugaacauuucuggcuacaacuucagcuuaggagcugcagugaaagcuggagcuuguaugcuugaugggggaaacauguuggagaccauuaaggucacaccucagacaguggauggcaucuugaagucuauuuuaaagguaaaaagaucuuugggaauguuuguuucagauacaccuggugagaggaacccuuacgagaacauacuuuacaagaucugucuuucuggcgacggcuggcccuacauagcuucaaggacuucuauuguggguagagcuugggagaauacuacuguggaucucgagucagauggaaaaccacagaaaguggguacugcuggguccaacaagucuuuacagucagcgggguuuccaacagggcugaccuauucucaguugaugacacuuaaagacucgaugaugcagcuugacccaagugccaaaaccuggauagacauugagggucguccagaagacccuguggaaauugcucuuuaccaaccuaugucuggcuguuacauacacuucuucagagaaccaacagauuuaaaacaguucaagcaagaugccaaauauucucaugggauugauguggcagaucuuuucccugcucaaccugguuugaccagugcagucauugaagcucucccucgcaacaugguacugaccugucaagguucagaugauauuaagagacucuuggacucccaaggaagaagggacauaaagcuuauugacauugcacugagcaaggcugauucuaggaaauuugaaaaugcuguuugggaucagugcaaagaucuaugccauaugcauacuggagugguugucgaaaagaagaaaagaggagguaaagaagaaaucaccccgcacugugcuuuaauggacugcauaauguaugaugcagcugugucaggaggacucaacauaccaguucuaagagcaguucuccccagagacaugguguuuagaaccucgagccccaaagucguccuguaa

SEQ ID NO: 7914 - RNA, 1710 nt, Artificial Sequence
  derived and/or modified CDS sequence (wt) from LASV(LASV224-NIG-2010;Clade II)__AIT17627__NP
augagcgcuucuaaggaggugaagucauuucucuggacacagucauugaggagggagcuuucagguuauugcuccaguauaaaacuucaaguuguuaaggaugcucaggcucuucuucauggucuugacuuuucugaagucagcaaugugcagcgcuuaaugcgcaagcaaaagagggaugauagugaucugaaacgucucagagauuugaaucaggcugucaacaaucuuguagaacucaaaucgacacaacaaaagagcauccugagaguugggaccuugacuucagaugacuugcugacacuggcagcugacuuagaaaaacuaaagucgaaggucauuagaacagaaaggccacuaagcucagguguuuauauggggaauuugaguucacagcagcuugagcaaagaagagcacugcugaacaugauaggcaugguugguggggcucagggcacccaaccuggaagagacggaguuguuagggugugggauguuaagaauccggaucuuuugaacaaucaguucggcaccaugccuagucugacacuggcaugucucaccaaacaaggucaaguugauuugaaugaugccgucuuggcauuaacagaccugggucugauauacacagccaaguacccaaauagcuccgaccuggacagacuuucccaaagccaucccauacugaauaugguggacaccaagaagagcucuuugaacauuucugguuacaacuucagcuugggagcugcagugaaagcuggagcuuguaugcuugauggggggaacauguuggagaccaucaagguuacaccucagacaauggauggcaucuuaaagucuauuuuaaaggugaaaagaucuuugggaauguuuguuucagauacaccuggugaaaggaacccuuacgagaacauacuuuacaagaucugucuuuccggugacggcuggcccuauauagcuucaaggacuuccauuguggguagagcuugggagaauacuacuguggaucucgagucagaugggaaaccacaaaaaguggguucugcugggucuaacaagucuuuacagucagcaggauuuccaacaggguugaccuauucucaguugaugacacuuaaagacucaaugaugcagcuugacccaagugccaaaaccuggauagacauugagggucguccggaagacccuguggaaauagcucuuuaccaaccuaugucgggcuguuacauacacuucuucagagaaccaacagauuuaaaacaguucaagcaagaugccaaguauucucaugggauugauguggcagaucuuuucccugcucaaccuggucugaccagugcagucaucgaagcucucccucguaauaugguacugaccugucaagguucagaugauauuaagagacucuuggacucccaaggaagaagagacauaaagcuuauugacaucgcauugagcaaggcugacucuagaagauuugaaaaugcuguuugggaucaguguaaagaucuaugccauaugcauacuggagugguuguugaaaagaagaaaagaggaggcaaagaagaaauuaccccgcacugugcuuuaauggacugcauuauguaugaugcagcugugucaggaggacucaacauaccaguuuuaagagcaguucuccccagagacaugguguuuagaaccucgagccccaaagucguccuguaa

SEQ ID NO: 7915 - RNA, 1710 nt, Artificial Sequence
  derived and/or modified CDS sequence (wt) from LASV(LASV225-NIG-2010;Clade II)__AIT17631__NP
augagugccuccaaggaaauaaagucauuccuuuggacacaguccuugaggagggagcuaucagguuacugcuccagcauaaagcuucaaguuguuaaggaugcucaggcucuccuucauggucuugacuuuucugaagucagcaauguucagcgcuugaugcgcaaacaaaaaagggacgacagugaucugaaacgucucagagaucugaaccaggcugucaacaaucuuguagaacucaaaucaacacaacaaaagaguauccugagaguugggaccuugaccucggaugaccuguugacauuggcagcugacuuagagaaacuuaagucgaaggucaucagaacagaaaggccacuaagcucagguguuuacaugggaaauuugaguacacagcaacuugagcaaagaagagcauugcugaacaugauaggcaugguugguggggcucaggguacccaaccuggaagggacggaguuguuagggugugggaugucaagaauccggaucucuugaacaaccaauuuggcaccaugcccagucugacauuggcaugucucaccaagcaaggucaaguugauuuaaaugaugcugucuuagcacuaacagaucugggucuaauauacacagcuaaguacccaaacagcuccgaccuggacagacuuucccaaagccauccuauacugaauaugguggacacuaagaagagcuccuugaauauuucuggcuacaacuucaguuuaggagcugcagugaaagcuggagccuguaugcuugauggggggaacauguuggagaccaucaagguuacaccucagacaauggauggcaucuugaaaucuaucuuaaagguaaaaagaucuuugggaauguuuguuucagaugcaccuggugagaggaacccuuaugagaacauacucuacaagaucugucuuucuggggacgguuggcccuacauagcuucaagaacuuccauuguggguagagcuugggagaacaccacuguggaucucgagucagauggaaaaccacaaaaggugggcacugcuggguccaacaagucuuuacagucagcgggguuuccaacaggguugaccuauucucaguugaugacacuuaaagacucaaugaugcagcuugacccaagugcuaaaaccuggauagacauugaaggucguccagaagacccuguagaaauagcucuuuaccaaccuaugucgggcuguuacauacacuucuucagagaaccaacagacuugaaacaguuuaagcaagaugccaaauauucucaugggauugauguagcagaucuuuucccugcucaaccuggcuugaccagugcagucauugaagcccuuccucgcaauaugguacugaccugccaggguucagacgauauuaagagacucuuagauucacaaggaagaagggacauaaagcuuauugacauugcacugagcaaggcugacuccaggagguuugagaaugcuguuugggaucaaugcaaggaucuaugccauaugcauacuggggugguuguugaaaagaagaaaagaggaggcaaagaagaaauuaccccacacugugcucuaauggauugcauaauguaugaugcagcugugucaggaggacucaauauaccaguuuugagagcaguucuccccagagacaugguguuuagaacaucaagccccaaggucguccuguaa

SEQ ID NO: 7916 - RNA, 1710 nt, Artificial Sequence
  derived and/or modified CDS sequence (wt) from LASV(LASV229-NIG-2010;Clade II)__AIT17635__NP
augagugcuucuaaggaaguaaaaucauuucucuggacacaaucauugaggagggagcuuucaggcuauugcuccaacauaaaacuucaaguuguuaaagaugcucaggcucuccuucauggucuugacuuuucugaagucagcaaugugcagcgcuugaugcgcaaacaaaaaagggaugauaaugaucuaaaacgucucagagauuugaaucaggcugucaacaaucuuguagaacuuaaaucgacacaacaaaagaguauccugaggguugggaccuugacuucagaugaccugcugacauuggcagcugacuuagagaaauuaaagucgaaggucauuagaacggaaaggccacuaagcucagguguuuauauggggaaccugaauacacagcagcuugagcaaagaagagcacugcugaacaugauagguaugguugguggagcucagggcacucaacccggaagagacggaguuguuagggugugggauguuaagaauccggaucuuuugaacaaccaguucggcaccaugcccaguuugacauuagcaugucucaccaaacaaggucaaguugauuugaaugacgccgucuuggcauuaacagaccugggucuaauauacacagcuaaguacccaaauagcuccgaucuggacagacuuucccaaagccauccuauacugaauaugguggacaccaagaagagcuccuugaacauuuccgguuacaacuucagccuaggagcugcagugaaggcuggagcuuguaugcuugauggggggaacauguuggagaccaucaagguuacaccucagacaauggauggcaucuugaagucuaucuuaaaggugaaaaaaucuuugggaauguuuguuucagauacaccuggugagagaaacccauaugagaacauacuuuacaagaucugucuuuccggugauggcuggcccuacauagcuucaaggacuuccauuguggguagagcuugggagaauacuacuguggaucuugagucagauggaaaaccacaaaaagugggcacugcuggguccaacaagucuuugcaaucagcgggguuuccaacagggcugaccuauucucaguugaugacacuuaaagacucaaugaugcaacuugacccaagugccaaaaccuggauagacauugaaggccguccagaagacccuguggaaauagcucuuuaccaacccaugucgggcuguuacauacacuucuucagagaaccaacagacuuaaaacaguucaagcaggaugccaaauauucucaugggauugauguagcagaccuuuucccugcccaaccugguuugaccagugcagucauugaagcccuuccucgaaauaugguacugaccugucaagguucagaugauauuaagagacucuuggacucccaaggaagaagggacauaaagcucauugacauugcacugagcaaggcugacucuaggagauuugaaaaugcuguuugggaucagugcaaagaucuaugccauaugcauacuggggugguugucgaaaagaagaaaagaggagguaaagaagaaaucaccccacacugcgcuuuaauggacugcauaauguaugaugcagcuguaucaggaggacucaacauaccaguuuuaagagcaguucuccccagggacaugguguuuagaaccucaagccccaaggucguucuguaa

SEQ ID NO: 7917 - RNA, 1710 nt, Artificial Sequence
  derived and/or modified CDS sequence (wt) from LASV(LASV237-NIG-2010;Clade II)__AIT17639__NP
augagugcuucuaaggaagugaagucauuucucuggacacagucauugaggagggagcuuucaggcuauugcuccaacauaaaacuucaaguuguuaaggaugcucaggcucuucuucauggucuugacuuuucugaagucagcaaugugcagcgcuuaaugcgcaagcaaaaaagggaugauagugaucugaaacgucucagagauuugaaucaggcugucaacaaucuuguagaacucaaaucgacacaacaaaagaguaucuugagaguugggaccuugacuucagaugaucugcugacauuggcagcugacuuagagaaacuaaagucgaaagucauuagaacagaaaggccucuaagcucagguguuuacauggggaauuugagcacacagcagcuugagcagagaagggcauugcugaacaugauaggcaugguugguggggcucaaggcacccaaccuggaagagacggaguuguuagggugugggauguuaagaauccggaucuuuugaacaaccaguucggcaccaugccuagucugacauuagcaugucucaccaaacaaggucaaguugauuugaaugaugccgucuuagcacuaacagaccugggucuaauauacacagcuaaguacccaaauagcuccgaccuagauagacuuucccaaagccauccuauacugaauaugguggacauuaagaaaagcucccugaacauuucugguuacaacuucagcuuaggagcugcagugaaggcuggggccugcaugcucgauggggggaacauguuggagaccaucaagguuacaccucagacaauggauggcaucuugaagucuauuuuaaaaguaaaaagaucuuugggaauguuuguuucagauacaccuggugagagaaacccuuaugagaacauacuuuacaagaucugucuuuccggugacggcuggcccuacauagcuucaaggacuucuauuguggguagggcuugggagaauacuacuguggaucucgagucagauggaaaaccgcaaaaagugggcucugcuggguccaacaaguccuuacagucagcgggauucccaacagggcugaccuauucucaguugaugacacuuaaagacucaaugaugcagcuugacccaagugccaaaaccuggauagacauugaaggucguccagaagacccuguggaaauagcucuuuaccaaccuaugucgggcuguuacauacacuucuucagagagccaacagacuuaaaacaguucaagcaggaugccaaauauucucaugggauugauguggcagaucuuuucccugcucaaccugguuugaccagcgcaguuauugaagcccucccucgcaauauggugcugaccugucaagguucagaugauauuaagagacucuuagacucccaaggaagaagggacauaaagcuuauugacauugcacugagcaaggcugacucuaggagauuugaaaaugcuguuugggaucaguguaaagaccuaugccauaugcauacuggagugguugucgaaaagaagaaaagaggaggcaaagaagaaauaacuccgcacugugcuuuaauggacugcauaauguaugaugcagcugugucaggagggcucaauauaccaguuuuaagagcaguucuucccagagacaugguguuuagaaccucaagccccaaggucguccuguaa

SEQ ID NO: 7918 - RNA, 1710 nt, Artificial Sequence
  derived and/or modified CDS sequence (wt) from LASV(LASV242-NIG-2010;Clade II)__AIT17651__NP
augagugcuuccaaggaagugaagucauuucucuggacacagucauugaggagggagcuuucagguuauugcuccagcauaaagcuucaaguugucaaggaugcucaggcucuccuucauggucuugacuuuucugaaguuagcaaugugcagcgcuuaaugcgcaaacaaaaaagggaugauagugaucugaaacgucucagagaucugaaucaggcugucaacaaucuuguggaacuaaaaucaacacaacaaaagagugucuugagaguugggaccuugaccucagaugaccugcugacauuggcagcugacuuagagaaacuuaagucgaaggucaucagaacagaaaggccacuaagcucagguguuuauauggggaauuugagugcacagcaacuugagcaaagaagagcauuacugaacaugauaggcaugguugguggggcucagggcacccaaccuggaagagacggaguuguuagggugugggauguuaaaaauccagaucuuuugaacaaucaguucggcaccaugcccagucugacauuagcaugccucacuaaacaaggccagguugauuugaaugaugucgucuuagcacuaacagaccuaggucuaauauacacagcuaaguacccuaauagcuccgaccuggacagacuuucccaaagucauccuauauugaauaugguggacaccaagaagagcuccuugaacauuucugguuacaacuucagcuuaggagcugcagugaaagcuggagcuuguaugcuugauggggggaacauguuggaaaccaucaagguuacaccucagacaauggauggcaucuugaagucuauuuuaaaggugaaaaaauccuugggaauguuuguuucagacacaccuggugagaggaacccuuaugagaacauacuuuacaagaucugucuuucuggugaugguuggcccuacauagcuucaaggacuucaauuguggguagagcuugggagaauacuacuguggaucucgagucagauggaaaaccacaaaaagugggaacugcuggguccaauaagucuuuacagucagcgggguucccaacagggcugacuuacucucaguugaugacacuuaaagacucaaugaugcagcuugacccaagugccaaaaccuggauagacauugaaggucguccagaagacccuguggaaauagcucuuuaccagcccaugucgggcugcuacauacacuucuucagagaaccaacagacuugaaacaguucaagcaagaugccaaauauucucaugggauugauguaacagaucuuuucucugcucaaccuggauuaaccagugcagucauugaagcccucccacgcaauauggugcugaccugucaagguucagaugacaucaagcgacucuuggauucccaaggaagaagggacauaaaacuaauugacauugcauugagcaaggcugacucuaggagauuugaaaaugcuguuugggaucagugcaaagaucuaugccauaugcacacuggagugguugucgagaagaagaaaagaggaggcaaagaagaaauuaccccacauugugcucuaauggauugcauaauguaugaugcagcugugucaggaggacucaauauaccaguuuuaagagcgguccuccccagagacaugguguuuagaaccucaagccccaaggucguccuguaa

SEQ ID NO: 7919 - RNA, 1710 nt, Artificial Sequence
  derived and/or modified CDS sequence (wt) from LASV(LASV245-NIG-2011;Clade II)__AIT17655__NP
augagugcuucuaaggaagugaagucauuccucuggacacagucauugaggagggagcuuucagguuacugcuccaacauaaaacuucaaguuguuaaggaugcucaggcucuccuucauggucuugacuuuucugaagucagcaaugugcagcgcuuaaugcgcaaacaaaaaagggaugacagugaucugaaacgucucagagauuugaaucaggcugucaacaaucuuguagaacucaaaucgacacaacaaaagaguaucuugagaguugggaccuugaccucagaugaccugcugacauuggcagcugacuuagagaaacuaaagucgaaggucauuagaacagaaaagccacuaagcucagguguuuauauggggaauuugagcacacagcagcuugagcagagaagagcacugcugaacaugauaggcaugguugguggggcucagggcacccaaccuggaagagacggaguugugagggugugggauguuaagaauccagaccuuuugaacaaccaguucggcaccaugccuagucugacauuagcaugucucaccaaacaaggucaaguugauuugaaugaugccgucuuggcacuaacagaccugggucuaauauacacagccaaguucccaaauagcucugaccuggauagacuuucccaaagccauccuauacugaauaugguggacacuaagaaaagcuccuuaaacauuucugguuacaacuucagcuuaggagcugcaguaaaagcuggagcuuguaugcuugauggggggaacauguuggagaccaucaagguuacaccucagacaauggauggcaucuugaagucuauuuuaaagguaaaaaaaucuuuggggauguuuguuucagauacaccuggugagaggaacccuuaugagaacauacuuuacaagaucugucuuuccggugacggcuggcccuacauagcuucaagaacuucuauuguggguagagcuugggagaauacuacuguggaucucgagucagauggaaaaccgcaaaaagugggcacuacuggguccaacaagucuuuacagucagcgggguucccaacagggcugaccuacucucaguugaugacacuuaaagacucaaugaugcagcuugacccaagcgccaaaacuuggauagacauugaaggucguccagaagacccuguggaaauagcucuuuaccaaccuaugucaggcuguuauauacacuuuuucagagagccaacagacuuaaaacaguucaagcaagaugccaaauauucucaugggauugauguggcagaucuuuucccugcucaaccugguuugaccagcgcagucauugaagcccucccucgcaauauggugcugaccugucaagguucagaugauauuaagagacucuuggacucccaaggaagaagggauauaaagcuuauugacauugcacugagcaaggcugacucuaggagauuugaaaaugcuguuugggaucaaugcaaagaucuaugccauaugcacacuggagugguggucgaaaagaagaaaagagggggcaaagaggagaucaccccgcacugugcuuuaauggacugcauaauguaugaugcagcugugucaggaggacucaauauaccaguuuuaagagcaguucuccccagggacaugguguuuagaacuucaagccccaaggucguccuguaa

SEQ ID NO: 7920 - RNA, 1710 nt, Artificial Sequence
  derived and/or modified CDS sequence (wt) from LASV(LASV246-NIG-2010;Clade II)__AIT17659__NP
augagugcuucuaaggaagugaagucauuucucuggacacagucauugaggagggagcucucagguuauugcuccagcauaaagcuucaaguuguuaaggaugcucaggcucuccuucauggucuugacuuuuccgaagucagcaaugugcagcgcuuaaugcgcaaacaaaaaagagaugauagugauuugaaacgccucagagaucugaaucaggcugucaacaaucuuguagaacucaagucaacacaacaaaagagugucuugagaguugggaccuugaccucagacgaccugcugacauuggcagccgacuuagagaaauugaaaucgaaagucauaagaacagaaaggccacuuagcucagguguuuauauggggaacuugaguacacaacagcuugagcaaagaagagcauuacuaagcaugauaggcaugguugguggggcucagggcacccaaccugggagagauggaguuguuagggugugggauguuaagaauccggaucuuuugaacaaucaguuuggcaccaugccuagucugacauuagcaugucucacuaaacaaggucaaguugauuugaaugaugccgucuuagcacuaacagaccugggucuaauauauacagcuaaguacccaaauagcuccgaucuagacagacuuucccaaagccacccuauacugaauaugguggacaccaagaagagcuccuugaacauuucugguuacaacuucagcuuaggagcugcagugaaagcuggagcuuguaugcuagaugggggaaacauguuggagaccaucaaggucacaccucagacaauggauggcaucuugaagucaauuuuaaagguaaaaagaucuuugggaauguuuguuucagauacaccuggugaaaggaacccuuaugagaauauacuuuacaagaucugucuuucuggugacgguuggcccuauauagcuucaaggacuucuauuguggguagggcuugggagaauacuacuguggaucuugagucagaugggaaaccacaaaaggugggcacugcuggguccaacaagucuuuacagucagcgggguuuccaacagggcugaccuauucucaguugaugacacuuaaagacucaaugaugcagcuugacccaagugccaaaaccuggauagacauugaaggucguccagaagacccuguggaaauagcucuuuaccaaccuaugucgggcuguuacauacacuucuucagagaaccaacagacuuaaaacaguucaagcaggaugccaaauacucucaugggauugauguagcagaucuuuucccugcucagccugguuugaccagugcagucauugaagcucucccucgcaauaugguacugaccugucaagguucagaugauauuaagagacucuuggacucccaaggaaggagggacauaaagcucauagacauugcacugaacaaggcugacuccaggagauuugagaaugcuguuugggaucagugcaaagaucuaugccauaugcacacuggagugguugucgaaaagaagaaaagaggagggaaagaagagaucaccccgcacugugcuuuaauggacugcauaauguaugaugcagcugugucaggaggacucaauauaccaguuuuaagagcaguucuccccagagacaugguguucagaacuucaagccccaaggucguccuguaa

SEQ ID NO: 7921 - RNA, 1710 nt, Artificial Sequence
  derived and/or modified CDS sequence (wt) from LASV(LASV251-NIG-2010;Clade II)__AIT17667__NP
augagugcuuccaaggaagugaagucauuucucuggacacagucauugaggagggagcuuucagguuauugcuccagcauaaagcuucaaguuguuaaagaugcucaagcucuccuucauggucuugacuuuucugaaguuagcaaugugcagcgcuuaaugcgcaaacaaaaaagggaugauagugaucugaaacgucucagagaucugaaucaggcugucaacaaucuuguagaacucaaaucaacacagcaaaagaguaucuugagaguugggaccuugaccucagaugaucugcugacauuggcagcugauuuagagaaacuaaagucgaaggucaucagaacagaaaggccacuaagcucagguguuuauauggggaacuugaguacacagcaacuugagcaaagaagagcauugcugaacaugauaggcaugguugguggggcucagggcacccaaccaggaagagauggaguuguuagggugugggauguuaagaauccagaucuuuuaaacaaccaguucggcaccaugcccagucugacauuagcaugucucacuaaacaaggucagguugauuugaaugaugcugucuuagcacuaacagaccugggucuaauauauacagcuaaguaccccaauagcuccgaccuggacagacuuucccaaagccauccuauauugaauaugguggacacuaagaagagcuccuuaaacauuucugguuacaacuucaguuuaggagcugcagugaaagcuggagcuuguaugcuugauggggggaacauguuggagaccaucaagguuacaccucagacaauagauggcaucuugaagucuauuuuaaagguaaaaaaauccuugggaauguuuguuucagacacaccuggugagaggaacccuuaugagaacauacuuuacaagauuugucuuuccggugacgguuggcccuacauagcuucaaggacuucuauuguggguagagcuugggagaauacuacuguggaucucgagucagauggaaaaccacaaaaagugggaacuaccggguccaacaaaucuuuacagucagcaggguuuccaacagggcugacuuauucucaguugaugacacuuaaagacucaaugaugcagcuugacccaagugccaaaaccuggauagacauugaaggucguccagaagacccuguggaaauugcucuuuaccagccuaugucgggcugcuacauacacuucuucagagaaccaacagacuugaaacaguucaagcaagaugccaaauauucucaugggauugauguaacagaucuuuucccugcucaaccuggauuaaccagcgcagucauugaagcccucccucgcaacaugguacugaccugucaagguucagaagauauuaagcgacucuuagauucccaaggaagaagggacauaaaacucauugacauugcacugagcaaggcugacucuaggagauuugaaaaugcuguuugggaucagugcaaagaccuaugccacaugcacacuggagugguugucgaaaagaagaaaagaggaggcaaagaagaaauuaccccacacugugcucuaauggacugcauaauguaugaugcagcugugucagguggacuuaauauaccaguuuuaagagcaguccuccccagagacaugguguuuagaaccucaagccccaaggucguccuguaa

SEQ ID NO: 7922 - RNA, 1710 nt, Artificial Sequence
  derived and/or modified CDS sequence (wt) from LASV(LASV253-NIG-2011;Clade II)__AIT17671__NP
augagugcuuccaaggaagugaagucauuccucuggacacagucauugaggagggagcuuucagguuauugcuccagcauaaagcuucaaguugucaaggaugcucaggcucuccuucauggucucgacuuuucugaaguuagcaaugugcagcgcuuaaugcgcaaacaaaaaagggaugauagugaucugaaacgucucagagaucugaaucaggcugucaacaaucuuguggaacuuaaaucaacacaacaaaagagugucuugagaguugggaccuugaccucagaugaccugcugacauuggcagcugacuuagagaaacuaaagucgaaggucaucagaacagaaaggccacuaagcucagguguuuauauggggaauuugaguacacagcaacuugagcagaggagagcauuacugaacaugauaggcaugguugguggggcucagggcacccaaccuggaagagacggaguuguuagggugugggauguuaaaaauccagaucuuuugaacaaucaguucggcaccaugcccagucugacauuagcaugucucacuaaacaaggccagguugauuugaaugaugucgucuuagcacuaacagaccugggucuaauauacacagcuaaguacccuaauagcuccgaccuggacagacuuucccaaagucauccuauauugaacaugguggacaccaagaagagcuccuugaacauuucugguuacaacuucagcuuaggagcugcagugaaagcuggagcuuguaugcuugaugggggaaacauguuggaaaccaucaagguuacaccucagacaauggauggcaucuugaagucuauuuuaaaggugaaaaaauccuugggaauguuuguuucagacacaccuggugagaggaauccuuaugagaacauacuuuacaagaucugucucucuggugacgguuggcccuacauagcuucaaggacuucaauuguggguagagcuugggagaauacuacuguggaucucgagucagauggaaaaccacaaaaagugggaacugcuggguccaauaagucuuuacagucagcgggguucccaacagggcugacuuacucucaguugaugacacuuaaagacucaaugaugcaacuugacccaagugccaaaaccuggauagacauugaaggucguccagaagacccuguggaaauagcucuuuaccagcccaugucgggcugcuacauacacuucuucagagaaccaacagacuugaaacaguucaagcaagaugccaaauauucucaugggauugauguaacagaucuuuucccugcucaaccuggauuaaccagugcagucauugaagcccucccucgcaauaugguacugaccugucaaggcucagaugacaucaagagacucuuggauucccaaggaagaagggacauaaaacuuauugacauugcauugagcaaggcugacucuaggagauuugaaaaugcuguuugggaucagugcaaagaucuaugccauaugcacacuggagugguugucgaaaagaagaaaagaggaggcaaagaagaaauuaccccacauugugcucuaauggacugcauaauguaugaugcagcugugucaggaggacucaauauaccaguuuuaagagcgguccuccccagagacaugguguuuagaaccucaagccccaaggucguccuguaa

SEQ ID NO: 7923 - RNA, 1710 nt, Artificial Sequence
  derived and/or modified CDS sequence (wt) from LASV(LASV254-NIG-2011;Clade II)__AIT17675__NP
augagugcuucuaaggaagugaagucauuucucuggacacagucauugagaagggaacuuucagguuauugcuccagcauaaagcuucaaguuguuaaagaugcucaggcucuccuucauggucuugacuuuucugaagucagcaaugugcagcgcuuaaugcgcaaacaaaaaagggaugauagugaucugaaacgucucagagaucugaaucaggcugucaacaaucuuguggaacucaaaucaacacaacaaaagagugucuugagaguugggaccuuaaccucagaugaccugcugacauuggcagcugacuuagagaaacuaaagucaaaggucauuagaacagaaagaccacugagcucagguguuuauauggggaauuugaguacacagcagcuugagcaaaggagagcauuguugaacaugauaggcaugguugguggggcucagggcacccaaccuggaagagacggagugguuagggugugggauguuaaaaauccggaucuuuugaacaaccaguuuggcaccaugccuagucugacauuagcaugucucacuaaacaaggucaaguugauuugaaugaugccgucuuagcacuaacagaccugggucuaauauauacagcuaaguacccaaauagcuccgaccuggacagacuuucucaaagucauccuauacugaacaugguggacacuaagaaaagcuccuugaacauuucugguuacaacuucagcuuaggagcugcagugaaagcuggagcuuguaugcuugauggggggaacauguuggagaccaucaagguuacaccucagacaauggauggcauccugaagucuauuuuaaagguaaaaaaauccuugggaauguuuguuucagauacaccuggugagaggaacccuuaugagaacauacuuuacaagaucugucuuuccggugacggcuggcccuacauagcuucuaggacuuccauugugggcagagcuugggagaauaccaucguggaucucgagucagaugggaaaccacaaaaggugggcacugcugggucuaacaagucuuuacagucagcgggguuuccaacagggcugaccuauucucaguugaugacacuuaaagacucaaugaugcagcuugacccaagugccaaaaccuggauagacauugaaggucguccagaggacccuguagaaauagcucuuuaccaaccuaugucgggcuguuauauacauuucuucagagagccaacagacuuaaaacaguucaaacaagaugccaaauauucucaugggauugauguagcagaucuuuucccugcucaaccuggcuugaccagugcagucauugaagcccucccccgcaauaugguccugaccugucaagguucagaugacauuaagagacucuuggauucucaagggagaagggacauaaagcuuauugacauugcacugagcaaggcugacucuaggagauuugaaaaugcuguuugggaucagugcaaagaucuaugccauaugcacacuggaguggucgucgaaaagaagaaaagagggggcaaagaagaaauuaccccgcauugugcuuuaauggacugcauaauguaugaugcagcugugucaggaggacucaauauaccaguuuuaagagcaguucuccccagagauaugguguuuagaaccucaagccccaaagucguccuguaa

SEQ ID NO: 7924 - RNA, 1710 nt, Artificial Sequence
  derived and/or modified CDS sequence (wt) from LASV(LASV256-NIG-2010;Clade II)__AIT17679__NP
augagugcuuccaaggaagugaagucauuucucuggacacagucauugaggagggagcuuucagguuacugcuccagcauaaaacuucaaguuguuaaggaugcucaggcucuccuucauggucuugacuuuucugaagucagcaaugugcagcgcuuaaugcgcaaacaaaagagggaugauagcgaucugaaacgucucagagauuugaaucaggcugucaacaaucuuguagaacucaaaucgacacaacaaaagagcaucuugagaguugggacuuugaccucagaugaccugcugacauuggcagccgacuuagaaaaacuaaagucgaaggucauuagaacagaaaggccacuaagcucagguguuuauauggggaauuugaguacacagcaacuugagcaaagaagagcauugcugaacaugauaggcaugguugguggggcucagagcacccaaccuggaagagacggaguugucagggugugggauguuaagaacccagaucuuuugaacaaucaguucggcaccaugccuagucugacauuagcaugucuuaccaaacaaggucagguugauuugaaugaugcugucuuagcacuaacagaccugggucuaauauacacagcuaaguauccaaauagcuccgaccuggacagacuuucccaaagccaucccauacugaauaugguggacacuaagaagaguuccuugaacauuucugguuacaacuucagcuuaggagcugcagugaaagcuggagcuugcaugcuugauggggggaacauguuggagaccauuaagguuacaccucagacaauggauggcaucuugaagucuauuuuaaagguaaaaagaucuuugggaauguuuguuucagauacaccuggugagaggaacccuuacgagaacauacuuuacaagaucugucuuuccggugacggcuggcccuacauagcuucaaggacuucuauuguggguagagcuugggagaauacaaccguggaucuugagucagauggaaagccacaaaaagugggcacugcuggguccaacaagucuuuacagucagcaggguuuccaacagggcugaccuauucucaguugaugacacuuaaagacucaaugaugcagcuugacccaagugccaaaaccuggauagauauugaaggucguccagaagacccuguggaaaucgcucuuuaccaaccuaugucgggcuguuacauacacuucuucagagaaccaacagauuuaaaacaguucaagcaagaugccaaauauucucacgggauugauguggcagaucuuuucccugcucaaccugguuugaccagugcagucauugaggcccucccucgcaauaugguacugaccugucaagguucagaugauauuaagagacucuuggacucccaaggaagaagggacauaaagcuuauugacauugcacugagcaaggcugauucuaggagauuugaaaaugcuguuugggaucagugcaaagaucuaugccauaugcauacuggagugguuguugaaaagaagaaaagaggagguaaagaggaaauuaccccacacugugcuuuaauggacugcauaauguaugacgcagcugugucaggaggacucaauauaccaguuuuaagagcaguucuccccagagacaugguguuuagaaccucaagccccaaggucguccuguaa

SEQ ID NO: 7925 - RNA, 1710 nt, Artificial Sequence
  derived and/or modified CDS sequence (wt) from LASV(LASV263-NIG-2011;Clade II)__AIT17683__NP
augagugcuucuaaggaagugaagucauuucucuggacacagucuuugaggagggagcuuucagguuauugcuccaauauaaaacuucaaguuguuaaggaugcucaggcucuccuucauggucuugacuuuucugaagucagcaaugugcagcgcuuaaugcgcaaacaaaagagggaugauagugaucugaaacgucucagagauuugaaucaggcugucaacaaucuuguagaacuuaaaucgacacaacaaaagaguaucuugagaguugggaccuugaccucagaugaccugcugacauuagcagcugacuuagagaaacuaaagucgaaggucauuagaacggagaggccacuaagcucagguguuuauauggggaauuugaguacacagcagcuugagcagagaagagcauugcugaacaugauaggcaugguugguggggcucaaggcacccaaccuggaagagacggaguuguuagggugugggauguuaagaauccggaccuuuugaacaaccaguucggcaccaugccuagucugacauuggcaugucucaccaaacaaggucaaguugauuugaaugaugccgucuuagcacugacagaccugggucuaauauacacagccaaguacccaaauagcuccgaccuagacagacuuucccaaagccauccuauacugaauaugguggacacuaagaaaagcuccuugaacauuucugguuucaacuucagcuuaggagcugcagugaaagcuggagcuuguaugcuugauggggggaacauguuggagaccaucaagguuacaccucagacaauggauggcaucuuaaagucuaucuuaaagguaaaaaagucuuugggaauguuuguuucggacacaccuggugagaggaacccuuaugagaauauacuuuacaagaucugucuuuccggugacggauggccuuacauagcuucaaggacuucuauuguggguagggcuugggaaaauaccacuguggaucucgagucagauggaaaaccgcaaaaagugggcacugcuggguccaacaagucuuuacagucagcgggguucccaacagggcugacuuauucucaguugaugacacuuaaagacucaaugaugcagcuugacccaagugccaaaaccuggauagacauugaaggucguccagaagacccuguggaaauagcucuuuaccaaccuaugucaggcuguuacauacacuucuucagagaaccaacagacuuaaagcaguucaagcaagaugccaaauauucucaugggauugauguggcagaucuuuucccugcucaaccugguuugaccagugcagucauugaagcccuuccucgcaauauggugcuaaccugucaagguucagaugauauuaagagacucuuagacucccaaggaagaagggauauaaagcuuauugacauugcacugagcaaggcugacucuaggagauuugaaaaugcuguuugggaucagugcaaagaucuaugccauaugcacaccggagugguugucgaaaagaagaaaagaggaggcaaagaagaaauuaccccgcacugugcuuuaauggacugcauaauguaugaugcagcugugucaggaggacucaacauaccaguuuuaagggcaguucuccccagggacaugguguuuagaaccucaagucccaaggucguccuguaa

SEQ ID NO: 7926 - RNA, 1710 nt, Artificial Sequence
  derived and/or modified CDS sequence (wt) from LASV(LASV267-NIG-2010;Clade II)__AIT17687__NP
augagugcuucuaaggaagugaagucauuucuuuggacacagucauugaggagggagcuuucagguuauugcuccaguauaaaacuucaaguuguuaaagaugcucaggcucuccuucauggucuugauuuuucugaagugagcaaugugcagcgcuuaaugcgcaaacaaaaaagagaugauagugauuugaaacgucucagagaccugaaccaggcuguuaacaaucucguagaacucaaaucgacgcaacaaaagagcaucuugagaguugggaccuugaccucagaugaccugcugacauuggcagcugacuuggagaaacugaagucgaaggucauuagaacagaaaggccacuaagcucagguguuuauauggggaauuugagugcacaacagcuugagcagagaagagcauugcugaacaugauaggcaugguuggcggggcucagggcacccaaccuggaagagacgggguuguuagggugugggauguuaagaauccggaucuuuugaacaaccaguuuggcaccaugccuagucugacauuagcaugucucaccaaacaaggucaaguugauuugaaugaugccgucuuagcacuaacagaccugggucugauauacacagcuaaguauccaaauagcuccgaccuggacagacuuucccaaagccauccuauacugaacaugguggacacuaagaagagcuccuugaacauuucugguuacaacuucagcuuaggagcugcagugaaagcuggagcuuguaugcuugauggggggaacauguuggagaccaucaagguuacaccucagacaauggauggcaucuugaaaucuaucuuaaagguaaaaagaucuuugggaauguuuguuucagauacaccuggugagaggaacccuuaugaaaacauacuuuacaagaucugucuuuccggugacggcuggcccuacauagcuuccaggacuucuauuguggguagagcuugggagaauacuacuguagaucucgagucagaugggaaaccacaaaaaguggguacugcuggguccaacaagucuuuacagucagcgggguucccaacagggcugaccuauucucaguugaugacgcucaaagacucaaugaugcagcuugacccaagugccaaaaccuggauagacauugaaggccguccagaagaccccguggaaauagcucuuuaccaaccuaugucaggcuguuacauacacuucuuuagagaaccaacagacuuaaagcaguucaagcaagaugcuaaguacucucaugggauugauguggcagaucuuuucccugcucaaccugguuugaccagugcagucauugaagcccucccucgcaauauggugcugaccugccaagguucagaugauauuaagaggcuuuuagacucccaaggaagaagggacauaaagcuuauugacauugcacugagcaaagcugacucuaggagauuugaaaaugcuguuugggaucagugcaaagaucugugccauaugcauacuggagugguugucgaaaagaagaagagaggaggcaaagaagaaauuaccccgcacugugcuuuaauggacugcaucauguaugaugcagcugugucuggaggacucaauauaccaguuuuaagagcgguucuccccagagacaugguguuuagaaccucaagccccaaggucguccuguaa

SEQ ID NO: 7927 - RNA, 1710 nt, Artificial Sequence
  derived and/or modified CDS sequence (wt) from LASV(LASV274-NIG-2010;Clade II)__AIT17695__NP
augagugcuucuaaggaagugaagucauuucucuggacacagucauugaggagggagcuuucagguuauugcuccaacauaaaacuucaaguuguuaaggaugcucaggcucuccuucauggucuugacuuuucugaagucagcaaugugcagcgcuuaaugcgcaaacaaaagagggaugauagugaucugaaacgucucagagauuugaaucaggcugucaacaaccuuguagaacuuaaaucgacacaacaaaagaguaucuugagaguugggaccuugaccucagaugaccugcugacauuggcagcugacuuggagaaacuaaagucgaaggucauuagaacagaaaggccacuaagcucagguguuuauauggggaauuugaguacacagcagcuugagcagagaagagcauugcugaacuugauaggcaugguugguggggcucagggcacccaaccuggaagagacggaguuguuaggguuugggauguuaagaauccggaccuuuugaacaaccaguucggcaccaugccuagucugacauuggcaugucucaccaaacaaggucaaguugauuugaaugaugucgucuuagcacugacagaccugggccuaauauacacagccaaauacccaaauagcuccgaccuggacagacuuucucaaagccauccuauacugaauaugguggacacuaagaagagcuccuugaacauuucugguuucaacuucagcuuaggagcugcagugaaagcuggagcuuguaugcuugauggggggaacauguuggagaccaucaagguuacaccucacacaauggauggcaucuugaagucuauuuuaaagguaaaaaaaucucugggaauguuuguuucggacacaccuggugagaggaacccuuaugagaauauacuuuacaagaucugucuuuccggugacggauggccuuacauagcuucaaggacuucuauuguggguagggcuugggagaauaccacuguggaucucgagucagauggaaaaccgcauaaagugggcacugcuggguccaacaagucuuuacagucagcaggguucccaacagggcugacuuauucucaguugaugacacuuaaagacucaaugaugcagcuugacccaagugccaaaaccuggauagauauugaaggucguccagaagacccuguggagauagcccuuuaccaaccuaugucaggcuguuacauacacuucuucagagaaccaacagacuugaaacaguucaagcaagaugccaaauauucucaugggauugauguggcagaucuuuucccugcucaaccugguuugaccagugcagucauugaagcccucccucgcaauaugguguuaaccugucaagguucagaugauauuaagagacucuuagacucccaaggaagaagggauauaaagcuuauugacauugcacugagcaaggcugacucuaggagauuugagaaugcuguuugggaucagugcaaagaucuaugccauaugcacacuggagugguugucgaaaagaagaaaagaggaggcaaagaagaaaucaccccgcacugugcuuuaauggacugcauaauguaugaugcagcugugucaggaggacucaauauaccaguuuuaagggcaguucuccccagggacaugguguuuagaaccucaagucccaaggucguccuguaa

SEQ ID NO: 7928 - RNA, 1710 nt, Artificial Sequence
  derived and/or modified CDS sequence (wt) from LASV(LASV719-NIG-2009;Clade II)__AIT17705__NP
augagugcuucuaaggaagugaagucauuucucuggacacagucuuugaggagggagcuuucagguuauugcuccaauauuaaacuucaaguuguuaaggaugcucaggcucuccuucauggucuugacuuuucugaagucagcaaugugcaacgcuuaaugcgcaaacaaaagagggaugauagugaucugaaacgucuccgagauuugaaucaagcugucaacaaucuuguagaacuuaaaucgacacaacaaaagaguaucuugagaguugggaccuugaccucagaugaccugcugacauuggcagcugacuuagagaaacuaaagucgaaggucauuagaacagaaaggccacuaagcucagguguuuauaugggaaauuugaguacacagcaacuugagcagagaagagcauugcugaacuugauaggcaugguugguggggcucagggcacccaaccuggaagagacggaguuguuaggguuugggauguuaagaauccggaccuuuugaacaaccaguucggcaccaugccuagucugacauuggcaugucucaccaaacagggucaaguugauuugaaugaugccgucuuagcacugacagaccugggccuaauauacacagccaaguacccaaauagcuccgaccuggacagacuuucccaaagccauccuauacugaauaugguggacacuaagaagagcuccuugaacauuucugguuucaacuucagcuuaggagcugcagugaaagcuggagcuuguaugcuugauggggggaacauguuggagaccaucaagguuacaccucagacaauggauggcaucuugaagucuauuuuaaagguaaaaaaaucuuugggaauguuuguuucggacacaccuggugagaggaacccuuaugagaauauacuuuacaagaucugucuuuccggugacggauggcccuacauagcuucaaggacuucuauuguggguagggcuugggagaauaccacuguggaucucgagucagauggaaaaccgcacaaagugggcacugcuggguccaacaggucuuuacaaucagcgggguucccaacagggcugacuuauucucaauugaugacacuuaaagauucaaugaugcagcuugacccaagugccaaaaccuggauagauauugaaggucguccagaagacccuguggagauagcccuuuaccaaccuaugucaggcuguuacauacacuucuucagagaaccaacagacuugaaacaguucaagcaagaugccaaauauucucaugggauugauguggcagaucuuuucccugcucaaccugguuugaccagcgcagucauugaagcccucccucgcaauauggugcuaaccugucaagguucagaugauauuaagagacucuuagacucccaaggaagaagggauauaaagcuuauugacauugcacugagcaaggcugacucuaggagauucgaaaaugcuguuugggaucagugcaaagaucuaugccauaugcacacuggagugguugucgaaaagaagaaaagaggaggcaaagaagaaaucaccccgcacugugcuuuaauggacuguauaauguaugaugcagcugugucaggaggacucaauauaccaguuuuaagggcaguucuccccagggacaugguguuuagaaccucaagucccaaggucguccuguaa

SEQ ID NO: 7929 - RNA, 1710 nt, Artificial Sequence
  derived and/or modified CDS sequence (wt) from LASV(LASV737-NIG-2009;Clade II)__AIT17711__NP
augagugcuucuaaggaagugaagucauuucucuggacacagucuuugaggagggagcuuucagguuauugcuccaauauaaaacuucaaguuguuaaggaugcucaggcucuccuucauggucuugacuuuucugaagucagcaaugugcagcgcuuaaugcgcaaacaaaagagggaugauagugaucugaaacgucucagagauuugaaucaggcugucaacaaucuuguagaacucaaaucgacacagcaaaagaguaucuugagaguugggaccuugaccucagaugaccugcugacauuggcagcugacuuagagaaacuaaagucgaaggucauuagaacagaaaggccacuaagcucagguguuuauauggggaauuugaguacacagcagcuugagcagaggagagcauugcugaacuugauaggcaugguugguggggcucagggcacccaaccuggaagagacggaguuguuaggguuugggauguuaagaauccggaccuuuugaacaaccaguucggcaccaugccuagucugacauuggcaugucucaccaaacaaggucaaguugauuugaaugaugccgucuuagcacugacagaccugggccuaauauacacagccaaguacccaaauagcuccgaccuggacagacuuucccaaagccauccuauacugaauaugguggacacuaagaagagcuccuugaacauuucugguuucaacuucagcuuaggagcugcagugaaagcuggagccuguaugcuugauggggggaacauguuggagaccaucaagguuacaccucagacaauggauggcaucuugaagucuauuuuaaagguaaaaaaaucuuugggaauguuuguuucggacacaccuggugagaggaacccuuaugagaauauacuuuacaagaucugucuuuccggugacggauggcccuacauagcuucaaggacuucuauuguggguagggcuugggagaauaccacuguggaucucgagucagauggaaaaccgcauaaagugggcacugcuggguccagcaagucuuugcagucagcgggguucccaacagggcugacuuauucucaguugaugacacuuaaagacucaaugaugcagcuugacccaagugccaaaaccuggauagacauugaaggucguccagaagacccuguggagauagcccuuuaccaaccuaugucaggcuguuacauacacuucuucagagaaccaacagacuugaaacaguucaagcaagaugccaaauauucucaugggauugauguggcagaucuuuucccugcucaaccugguuugaccagcgcagucauugaagcccucccucgcaauauggugcuaaccugucaagguucagaugauauuaagagacucuuagacucccaaggaaggagggauauaaagcuuauugacauugcacugagcaaggcugacucuaggagauuugaaaaugcuguuugggaucaguguaaagaucuaugccauaugcacacuggaguaguugucgaaaagaagaaaagaggaggcaaagaagaaaucaccccgcacugugcuuuaauggacugcauaauguaugaugcagcugugucaggaggacucaauauaccaguuuuaagggcaguucuccccagggauaugguguuuagaaccucaagucccaaggucguccuguaa

SEQ ID NO: 7930 - RNA, 1710 nt, Artificial Sequence
  derived and/or modified CDS sequence (wt) from LASV(LASV738-NIG-2009;Clade II)__AIT17713__NP
augagugcuucuaaggaagugaagucauuccucuggacacagucauugaggagagaacuuucagguuauugcuccaacauaaaacuucaaguuguuaaggaugcucaggcucuccuucauggucuugacuuuucugaagucagcaaugugcagcgcuuaaugcgcaaacaaaaaagggaugauagugaucugaagcgucucagagauuugaaucaggcugucaacaaucuuguagaacucaaaucgacacaacaaaagaguaucuugaggguugggacuuugaccucagaugaccugcugacauuagcagcugacuuagagaaacuaaagucgaaggucauuagaacagaaaggccauuaagcucaggugucuauauggggaauuugaguacacagcagcuugagcagagaagagcauugcugaacaugauagguaugguugguggggcucagggcacccaaccuggaagagacggaguuguuagggugugggauguuaagaauccggaucuuuugaacaaccaguuuggcaccaugccuagucugacauuagcaugucucacuaaacaaggucaagucgauuugaaugacgccgucuuggcacuaacagaccugggucuaauauacacagcuaaguacccaaauagcuccgaccuggacagacuuucccaaagccacccuauacugaauaugguggacauuaagaagagcuccuugaacauuucugguuacaacuucagcuuaggagcugcaguaaaagcuggagcuuguaugcuugauggggggaacauguuggagaccaucaagguuacaccucagacaauggauggcauccugaagucuauuuuaaagguaaaaaagucuuugggaauguuuguuucagauacgccuggugagaggaacccuuaugagaacauacuuuacaagaucugucuguccggugacggcuggcccuacauagcuucaaggaccucuauuguggguagagcuugggagaacacuacuguggaucucgagucagauggaaaaccgcaaaaagugggcacugcuggguccaacaaguccuuacagucagcgggguucccaacagggcugaccuauucccaguuaaugacacuuaaagacucaaugaugcagcuugacccaagugccaaaaccuggauagauauugaaggucguccagaagacccuguggagauagcucucuaccaaccuaugucgggcuguuacauacacuucuucagagaaccaacagacuuaaaacaguucaagcaggaugccaaauauucucaugggauugauguggcagaccuuuucccugcucaaccugguuugaccagcgcagucauugaagcccucccucgcaauaugguacugaccugucaagguucagaugauaucaagagacucuuggacucccaaggaagaagggacauaaaacuuauugacauugcacuaaacaaggcugacucuaggagauuugaaaaugcuguuugggaucagugcaaagaucuaugccauaugcacacuggagugguugucgaaaagaagaaaagaggaggcaaagaagaaauuaccccgcacugugcuuuaauggacuguauaauguaugaugcagcugugucaggaggacucaauauaccaguuuuaagagcaguucuccccagggacaugguguuuagaaccucaagccccaaggucguccuguaa

SEQ ID NO: 7931 - RNA, 1710 nt, Artificial Sequence
  derived and/or modified CDS sequence (wt) from LASV(LASV966-NIG-2009;Clade II)__AIT17719__NP
augagugcuucuaaggaagugaagucauuucucuggacacagucauuaaggagggagcuuucagguuacugcuccagcauaaagcuucaaguuguuaaggaugcucaggcucuccuucauggucuugacuuuucugaagucagcaaugugcagcgcuuaaugcgcaaacaaaaaagggaugauagugaucugaagcgucuuagagaucugaaucaggcugucaacaaucuuguagaacucaaaucaacacaacaaaagaguaucuugagaguugggaccuugaccucagaugaccugcugacauuagcagcugacuuagagaaacuaaagucgaagguaaucagaacagaaaggccacuaagcucagguguuuauauggggaacuuaaguacgcaacagcuugagcaaagaagagcauugcugaacaugauaggcaugguuaguggagcucaaggcacccaaccuggaagagacggaguuguuagggugugggauguuaagaauccggaacuuuugaacaaccaguucggcaccaugccaagucugacauuggcaugccucaccaaacaaggucaaguugauuugaaugaugcugucuuagcacuaacagacuugggucuaauauacacagcuaaguacccaaauagcuccgaccuggacagacuuucucaaagccauccuauacugaauaugguggacacuaagaagagcucauugaacauuucugguuacaacuucagcuuaggagcugcaguaaaagcuggagcuuguaugcuugauggggggaacauguuggagaccaucaagguuacaccccagacaauggauggcaucuugaaguccauuuuaaaggugaaaaaauccuuaggaauguuuguuucagauacaccuggugagaggaacccuuaugaaaacauacuuuacaagaucugucuuuccggugacggcuggcccuacauagcuucaaggacuucuauuguggguagagcuugggagaauacuacuguggaucuugagucagauggaaaaccacaaaaagugggcacugcuggguccaacaagucuuuacaaucagcgggguuuccaacagggcugaccuauucucaguugaugacacuuaaagauucaaugaugcagcuugacccaagugccaaaacuuggauagacauugaaggucguccagaagacccuguggaaauagcucuuuaccaaccuaugucgggcuguuacauacacuuuuucagagaaccaacagacuuaaaacaguucaaacaagaugccaaauauucucaugggauugauguagcagaucuuuucccugcucaaccuggcuugaccagugcagucauugaggcccucccucgcaauaugguacugaccugucaagguucagaugauauuaagagacuccuggacucccagggaagaagagacauaaagcuuauugacauuucacugagcaaggcugacuccaggagauuugaaaaugcuguuugggaucagugcaaagaucuaugccauaugcauacuggagugguugucgaaaagaagaaaagaggaggcaaagaagaaaucaccccgcacugugcuuuaauggacugcauaauguaugaugcagcugugucaggaggacucaauauaccaguuuuaagagcaguucuccccagagacaugguguuuagaaccucaagccccaaggucguccuguaa

SEQ ID NO: 7932 - RNA, 1710 nt, Artificial Sequence
  derived and/or modified CDS sequence (wt) from LASV(LASV969-NIG-2009;Clade II)__AIT17725__NP
augagugcuucuaaggaaguaaagucauuucucuggacacagucauugaggagagagcuuucagguuacuguuccaacauaaaacuucaaguuguuaaggaugcucaggcucuccuucauggucuugacuuuucugaagucagcaaugugcagcgcuuaaugcgcaaacaaaaaagggaugacagugaucugaaacgucucagagauuugaaucaggcugucaacaaucuuguagagcucaaaucgacacaacaaaagagcaucuugagaguugggaccuugaccucagaugaccugcugacauuggcagcugacuuagagaaacuaaagucgaaggucaucagaacagaaaggccacuaagcucagguguuuauauggggaauuugagugcacagcaacuugagcagagaagagcauugcugaacaugauaggcaugguugguggggcucagggcacccaacuuggaagagacggaguuguuagggugugggauguuaagaauccggaucuuuugaacaaucaguucggcaccaugccuagucugacauuggcaugucucaccaaacaaggucaaguugauuugaaugaugccgucuuagcacuaacagaccuggguuuaauauacacagcuaaauacccaaauagcuccgaccuggacagacuuucccaaagccauccuauacugaauaugguggacacuaagaagagcucucugaacauuucugguuacaacuucagcuuaggagcugcagugaaagcuggagcuuguaugcuugauggggggaauauguuggagaccaucaagguuacaccucaaacaauggauggcaucuugaaguccauuuuaaagguaaagaaaucuuugggaauguuuguuucagauacaccuggugagaggaacccuuaugagaacauacuuuacaagaucugucuuuccggugacggcuggcccuacauagcuucaaggacuucuauuguggguagagcuugggagaauacuacuguggaucucgagucagauggaaaaccgcaaaaaguggguacugcuggguccaacaagucuuuacagucagcgggguucccaacagggcugaccuauucucaguuaaugacacuuaaagacucaaugaugcagcuugacccaagugccaaaaccuggauagacauugaaggucguccagaagacccuguggaaauagcucuuuaccaaccuaugucgggcuguuauauacacuuuuuuagagaaccaacagacuugaaacaguucaagcaagaugccaaguauucucaugggauugauguggcagaucuuuucccugcucaaccugguuugaccagugcaguuauugaagcccucccucgcaauaugguacugaccugucaagguucagaggauauuaagagacucuuggacucccaaggaagaagggacauaaagcuuauugacauugcacugagcaaggcugacucuaggagauuugaaaaugcuguuugggaucagugcaaagaucuaugccauaugcauacuggagugguugucgagaagaagaaaagaggaggcaaagaagaaauuaccccgcacugugcuuugauggacugcauaauguaugaugcagcuguaucaggaggacucaauauaccaguuuuaagagcaguucuccccagggacaugguguuuagaaccucaagccccaaggucguccuguaa

SEQ ID NO: 7933 - RNA, 1710 nt, Artificial Sequence
  derived and/or modified CDS sequence (wt) from LASV(LASV971-NIG-2009;Clade II)__AIT17729__NP
augagugcuucuaaggaagugaagucauuucucuggacacagucauugaggagggagcuuucagguuauugcuccagcauaaaacuucagguuguuaaggaugcucaggcucuccuccauggucuugacuuuucugaagucagcaaugugcagcguuuaaugcgcaaacaaaggagggaugauagugaucugaagcgucuuagagauuugaaucaggcugucaacaaucuuguugaacucaaaucaacacaacaaaagagcaucuugagaguugggaccuugaccucagaugaccugcugacauuggcagcugacuuagagaaacuaaagucgaaagucauuagaacagaaaggccacuaagcucagguguuuauauggggaauuugaguacacagcagcuugagcaaaggagagcacugcugaacaugauaggcaugguugguggaacucagggcacccaaccuggaagagacggaguuguuaggguaugggauguuaagaauccggaucuuuugaacaaucaguucggcaccaugccuagucugacacuggcaugucucaccaaacaaggucaaguugacuugaaugaugccgucuuagcacuaacagacuugggucugauauacacagccaaguauccaaauagcucugaccuggacagacuuucccaaagccacccuauacugaauaugguggacacuaagaagagcuccuugaacauuucugguuacaacuucagcuuaggagcugcagugaaagcuggagcuuguaugcuugauggggggaacauguuggagaccaucaaggucacaccucagacaauggauggcaucuugaagucaauuuuaaaggugaaaagaucuuugggaauguuuguuucagauacaccuggugagaggaacccuuacgagaauauacuuuacaaaaucugucuuucuggugacggcuggcccuacauagcuucaaggacuucuauuguggguagagcuugggaaaauacuacuguggaucucgagucagauggaaaaccacagaaaguggguacugcuggguccaacaaaucuuuacaaucagcgggguuuccaacagggcugaccuauucucaguugaugacacuuaaagacucaaugaugcagcuugacccaagugccaaaaccuggauagacauugaaggucguccagaagacccuguggaaauagcucuuuaccaaccuaugucgggcuguuacauacacuucuuuagagaaccaacagauuuaaaacaguucaagcaagaugccaaauauucucaugggauugauguggcagaucuuuucccugcucaaccugguuugaccagugcagucauugaagcucucccucgcaauaugguacugacuugucaagguucagaugauauuaagagacucuuggacucccaaggaagaagggacauaaagcuuauugacauugcacugagcaaggcugacucuaggaaauuugaaaaugcuguuugggaucaguguaaagaucuaugccauaugcauacuggagugguugucgaaaagaagaaaagaggaggcaaagaagaaauuaccccgcauugugcuuuaauggacugcauaauguaugaugcagcugugucaggaggacucaauauaccaguuuuaagagcaguucuccccagagacaugguguuuagaaccucaagccccaaggucguccuguaa

SEQ ID NO: 7934 - RNA, 1710 nt, Artificial Sequence
  derived and/or modified CDS sequence (wt) from LASV(LASV975-NIG-2009;Clade II)__AIT17733__NP
augagugcuuccaaggaagugaagucauuucucuggacacagucauugaggagggagcucucagguuauugcuccaacauaaaacuucaaguuguuaaggaugcucaagcucuccuucauggucuugacuuuucugaagucagcaaugugcagcgcuuaaugcgcaaacaaaaaagggacgauagugaucugaaacgucucagagauuugaaucaggcugucaacaaucuuguggaacucaaaucgacacaacaaaagaguaucuugagaguugggaccuugaccucagaugaccugcugauauuggcagcugaccuagagaaacugaagucgaaggucauuagaacagaaaggccacuaagcucagguguuuauauggggaauuugaguacacagcagcuugagcagagaagagcauugcugaacaugauaggcaugguugguggggcucagggcacccaaccuggaagagacgggguuguuagggugugggauguuaaaaauccggaucuuuugaacaaccaguucggcaccaugcccagucugacauuagcaugucucaccaaacaaggucaaguugauuugaaugaugccgucuuagcacuaacagaccugggccuaauauacacagcuaaguacccaaauagcuccgaccuugacagacuuucccaaagccauccuauacugaauaugguggacacuaagaaaagcuccuugaacauuucugguuacaacuucagcuuaggagcugcagugaaagcuggggcuugcaugcuugauggagggaacauguuggagaccaucaagguuacaccucagacaauggauggcaucuugaagucuauuuuaaagguaaaaaaaucuuugggaauguuuguuucagauacaccuggugagaggaaccccuaugagaacauacucuacaagaucugucuuuccggugauggcuggccuuacauagcuucaagaacuucuauuguggguagagcuugggagaauacuacuguggaucucgagucagauggaaaaccgcaaaaagugggcacugcuggguccaacaagucuuuacagucagcgggguucccuacagggcugaccuauucccaguugaugacacuuaaagacucaaugaugcagcuugacccaagugccaaaaccuggauagacauugaaggucguccagaagacccuguggaaauagcucuuuaucaaccuaugucgggcuguuacauacacuucuucagagaaccaacagacuuaaaacaguucaaacaagaugccaaauauucucaugggauugauguggcagaucuuuucccugcucaaccugguuugaccagugcagucauugaagcccucccucgcaauauggugcugaccugucaagguucagaugauauuaagagacucuuggacucccaaggaagaagggacauaaagcuuauugacauugcacugagcaaggcugacuccaggagauuugaaaaugcuguuugggaucagugcaaagaccuaugccauaugcauacuggagugguugucgaaaagaagaaaagaggaggcaaagaagaaauaaccccgcacugugcuuuaauggacuguauaauguaugaugcagcugugucaggaggacucaauauaccgguuuugagagcaguucuccccagggacaugguguuuagaaccucaagccccaaggucguccuguaa

SEQ ID NO: 7935 - RNA, 1710 nt, Artificial Sequence
  derived and/or modified CDS sequence (wt) from LASV(LASV978-NIG-2009;Clade II)__AIT17745__NP
augagugcuuccaaggaaauaaagucauuccuuuggacacagucuuugaggagggagcuuucagguuacugcuccagcauaaagcuucaaguuguuaaggaugcucaggcucuccuucauggucuugacuuuucugaagucagcaauguucagcgcuuaaugcgcaaacaaaaaagggacgacagugaucugaaacgucucagagaucugaaccaggcugucaacaaucuuguagaacucaaaucaacacaacaaaagaguauccugagaguugggaccuugaccucagaugaccugcugacauuggcagcggacuuagagaaacuuaagucgaaggucaucagaacagaaaggccacuaaguucagguguuuacaugggaaauuugaguacacagcaacuugagcaaagaagagcauugcugaacaugauaggcaugguugguggggcucaggguacccaaccuggaagggacggaguuguuagggugugggaugucaagaauccggaucuuuugaacaaccaauucggcaccaugccuagucugacauuagcaugucucaccaaacaaggucaaguugauuuaaaugaugccgucuuagcacuaacagaccugggucuaauauacacagcuaaguacccaaacaguuccgaccuggacagacuuucccaaagccauccuauacugaauaugguggacacuaagaagagcuccuugaauauuucugguuacaacuucaguuuaggagcugcagugaaagcuggagccuguaugcuugauggggggaacauguuggagaccaucaagguuacaccucaaacaauggauggcaucuugaaaucuaucuuaaagguaaaaagaucuuugggaauguuuguuucagaugcaccuggugagaggaacccuuaugagaacauacuuuacaagaucugucuuucuggggacgguuggcccuacauagcuucaagaacuuccauuguggguagagcuugggagaacaccacuguggaucucgagucagauggaaaaccacaaaaggugggcacugcuggguccaacaagucuuuacagucagcgggguuuccaacaggguugaccuauucucaguugaugacacucaaagacucaaugaugcaacuugacccaagugcuaaaaccuggauagacauugaaggucguccagaagacccuguggaaauagcucuuuaccaaccuaugucggguuguuacauacacuucuucagagaaccaacagacuugaaacaguucaagcaagaugccaaauauucucaugggauugauguagcagaucuuuucccugcucaaccuggcuugaccagugcaguuauugaggcccuuccucgcaauaugguacugaccugucaggguucagacgauauuaagagacucuuagauucacaaggaagaagggauauaaagcuuauugacauugcacugagcaagguugacucuaggagguuugagaaugcuguuugggaucaaugcaaggaucuaugccauaugcauacuggggugguuguugaaaagaagaaaagaggaggcaaagaagaaauuaccccacacugugcucuaauggauuguauaauguaugaugcagcugugucaggaggacucaauauaccaguuuugagagcaguucuccccagagacaugguguuuagaacaucaagccccaaggucguccuguaa

SEQ ID NO: 7936 - RNA, 1710 nt, Artificial Sequence
  derived and/or modified CDS sequence (wt) from LASV(LASV981-NIG-2009;Clade II)__AIT17753__NP
augagugcuucuaaggaagugaagucauuucucuggacacagucauugaggagggagcuuucagguuauugcuccagcauaaaacuucaaguuguuaaggaugcucaggcucuccuucauggucuugauuuuucugaagucagcaaugugcaacgcuuaaugcgcaaacaaaagagggaugacagugaucugaaacgucucagagauuugaaucaggcuguuaacaaucuuguagaacucaaaucgacacaacaaaagagcaucuugagaguugggaccuugaccucagaugaccugcugacauuggcagcugacuuggagaaacuaaagucgaaggucauuagaacggaaaggccacugagcucagguguuuauauggggaauuugaguacacagcagcuugagcaaagaagagcauugcugaacaugauaggcaugguugguggggcucagggcacccaaccugguagagacgguguuguuagagugugggacguuaagaauccggaucuuuugaacaaucaguucggcaccaugccuagucugacauuagcaugucucaccaagcaaggucaaguugauuugaaugaugcugucuuagcacuaacagaccuaggucuaauauacacagcuaaguacccaaauagcuccgaccuggacagacuuucucaaagccaucccauacugaauaugguggacaccaagaagagcuccuugaacauuucugguuacaacuucagcuuaggggcugcagugaaagcuggagcuuguaugcuugaugggggaaacaugcuggagaccauuaagguuacaccccagacaauggauggcaucuugaaaucuauuuuaaagguaaaaagaucucugggaauguuuguuucagauacaccuggcgagaggaacccuuaugagaacauacuuuacaagaucugucuuuccggugacggcuggcccuauauugcuucaaggacuucuauuguggguagagcuugggagaauacuacuguggaucucgagucagauggaaaaccacaaaaaguggguacuacuggguccaacaagucuuuacagucagcaggguuuccaacagggcugaccuauucucaguugaugacacuuaaagacucaaugaugcagcuugacccaagugccaaaacuuggauagacauugaaggucguccagaagacccuguggaaauagcucuuuaccaaccuaugucgggcuguuacauacacuucuucagagaaccaacagauuuaaaacaguucaagcaggaugccaaauauucucaugggauugauguggcagaucuuuucccugcucaaccugguuugaccagugcaguuauugaggcccucccucgcaauauggugcugaccugucaagguucagaugacauuaagagacucuuggacucccaaggaagaagggacauaaagcuuauugacauugcgcugagcaaggcugacucuaggagauuugaaaaugcuguuugggaucagugcaaagaucuaugccauaugcauacuggagugguugucgaaaagaagaaaagaggaggcaaagaggaaauuaccccgcacugugcuuuaauggacugcauaauguaugaugcagcugugucaggaggacucaacauaccaguuuuaagagcaguucuccccagagacaugguauuuagaacuucaagcccaaaggucguccuguaa

SEQ ID NO: 7937 - RNA, 1710 nt, Artificial Sequence
  derived and/or modified CDS sequence (wt) from LASV(LASV988-NIG-2009;Clade II)__AIT17759__NP
augagugcuucuaaggaagugaagucauuucucuggacacagucauugaggagggagcuuucagguuauugcuccaacauaaaacuucaaguuguuaaggaugcucaggcucuccuucauggucuugacuuuucugaagucagcaaugugcagcgcuugaugcgcaaacaaaaaagggacgauagugaucugaaacgucucagagauuugaaucaggcugucaacaaucuuguggaacucaaaucgacacaacaaaagaguaucuugagaguugggaccuugaccucagaugaccugcugacauuggcagcugacuuagagaagcuaaagucgaaggucauuagaacagaaaggccacuaagcucggguguuuauauggggaauuugaauacacagcagcuugagcagagaagagcauugcugaacaugauaggcauggcugguggggcucaaggcacccaaccaggaagagacggaguuguuagggugugggauguuaagaauccggaucuuuugaacaaccaguucggcaccaugccuagucugacauuagcaugucucacuaaacaaggucaaguugauuugaaugaugccgucuuagcacuaacagacuugggccuaauauacacagcuaaguacccaaauagcuccgaccuggauagacuuucccaaagccauccuauacugaauaugguggacacuaagaaaagcuccuugaacauuucugguuacaacuucagcuuaggagcugcagugaaagcuggggcuuguaugcuugauggagggaacauguuggagaccaucaagguuacaccucagacaauggauggcaucuugaaguccauuuuaaagguaaaaaaaucuuugggaauguuuguuucagauacaccuggugagaggaacccuuaugagaauauacuuuacaagaucugucuuucaggugacggcuggccuuacauagcuucaaggacuucuauuguggguagagcuugggagaauaccacuguggaucucgagucagauggaaagccgcaaaaagugggcacugcuggguccaacaagucucugcagucagcgggguucccaacagggcugaccuauucucaguugaugacacuuaaagacucaaugaugcagcuugacccaagugccaagaccuggauagacauugaaggucguccagaagacccuguggaaauagcucuuuaccaaccuaugucgggcuguuacauacacuucuucagagaaccaacagacuuaaaacaauucaagcaagaugccaaauauucucaugggauugauguggcagaucuuuucccugcucaaccugguuugaccagugcagucauugaagcccucccucgcaauaugguacugaccugucaagguucagaugacauuaagagacucuuggauucccaaggaagaagggacauaaagcuuauugacauugcacugagcaaggcugacucuaggagauuugaaaaugcuguuugggaucagugcaaagaccuaugccauaugcauacuggagugguugucgaaaagaagaaaagaggaggcaaagaagaaauaaccccgcacugugcuuuaauggauugcauaauguaugaugcagcugugucaggaggacucaauauaccaguuuugagagcaguucuccccagggacaugguguuuagaaccucaagccccaaggucguccuguaa

SEQ ID NO: 7938 - RNA, 1710 nt, Artificial Sequence
  derived and/or modified CDS sequence (wt) from LASV(LASV989-NIG-2009;Clade II)__AIT17763__NP
augagugcuuccaaggaaguaaagucauuucucuggacacagucauugaggagggagcuuucagguuauugcuccagcauaaagcuucaaguuguuaaggaugcucaggcucuccuucauggucuugacuuuucugaagucagcaaugugcagcgcuuaaugcgcaaacaaaaaagggaugauagugaucugaaacgucucagagaucugaaucaggcugucaacaaucuuguagaacucaagucaacacaacaaaagaguaucuugagaguugggaccuugaccucagaugaccugcugacauuggcagcugacuuagagaaacuaaagucgaaggucaucagaacagaaaggccacuaagcucggguguuuauauggggaacuugaguacacagcaacuugagcaaaggagagcauugcugaacaugauagguaugguugguggggcucagggaacccaaccuggaagagacggaguuguuagggugugggauguuaagaauccggaucuuuugaauaaccaguucggcaccaugcccagucugacauuggcaugucucaccaaacagggucaaguugauuugaaugaugcugucuuagcacuaacagaccugggucuaauauacacagcuaaguacccaaauagcuccgaccuagacagacuuucccaaagccauccuauauugaauaugguggacaccaagaagagcuccuugaacauuucugguuacaacuucagcuuaggagcugcagugaaagcuggagccuguaugcuugauggggggaacauguuggagaccaucaagguuacaccucagacaguggaugguaucuugaaguccauucuaaagguaaaaagauccuugggaauguuuguuucagauacaccuggugagaggaacccuuaugagaacauacuuuacaagaucugucuuucuggugacggcuggcccuacauagcuucaaggacuucuauuguggguagagcuugggagaacacuacuguggaucucgagucagaugaaaaaccacaaaaagugggagcugcugggucuaacaagucucuacagucagcgggguuuccaacagggcugacuuauucucaguugaugacacuuaaagacucaaugaugcagcuugacccaagugccaaaaccuggauagacauugaaggucguccagaagacccuguggaaauagcucuuuaccagcccaugucaggauguuacauacacuucuucagagaaccaacagacuuaaaacaguucaagcaagaugccaaguauucucaugggauugaugugacagaucuuuucccugcucaaccuggauuaaccagugcagucauugaagcccuuccucgcaauaugguacugaccugucaagguucagaugauauuaagagacucuuggauucccaaggaagaagggacauaaaacuuauugacauugcacugaguaaggcugacucuaggagauuugaaaaugcuguuugggaucaaugcaaagaucuuugccauaugcacacuggagugguugucgaaaagaagaaaagaggaggcaaggaagaaauuaccccgcacugugcucuaauggacugcauaauguaugaugcagcugugucaggaggacuuaauauaccaguuuuaagagcaguucuccccagagacaugguguuuagaaccucaagccccaaggucguccuguaa

SEQ ID NO: 7939 - RNA, 1710 nt, Artificial Sequence
  derived and/or modified CDS sequence (wt) from LASV(LASV991-NIG-2009;Clade II)__AIT17771__NP
augagugcuucuaaggaagugaagucauuucucuggacacagucauugaggagggagcuuucaggcuauugcuccagcauaaaacuucaaguugucaaggaugcucaggcucuccuucauggucuugacuuuucugaagucagcaauguucagcgcuuaaugcguaaacagaaaagggaugauagugaucugaaacgucucagagauuugaaucaggcuguuaacaaucuuguagaacucaaaucgacacaacaaaagagcaucuugagaguugggaccuugaccucagacgaccugcugacauuggcagcugacuuagagaaacuaaagucgaaggucauuagaacagaaagaccacuaagcucagguguuuauauggggaauuugaguacacagcagcuugagcaacgaagagcauugcugaacaugauaggcaugguugguggggcucagggcacccaaccuggaagagacggaguuguuagggugugggauguuaagaauccggaucuuuugaacaaccaguuuggcaccaugccuagucuaacauuagcaugucucaccaaacaaggucaaguugauuugaaugaugccgucuuagcacuaacagaccugggucuaauauacacagcuaaguauccaaauagcuccgaccuagacagacuuucccaaagccauccuauacugaauaugguggacacuaagaagagcuccuugaacauuucugguuacaacuucagcuuaggagcugcagugaaagcuggagcuuguaugcuugauggagggaacauguuggagacuauuaaagucacaccucagacgauggauggcauuuugaagucuauuuuaaagguuaaaagaucuuuaggaauguuuguuucagauacaccuggugagaggaacccuuacgagaacauacuuuacaaaaucugucuuuccggcgacggcuggcccuacauagcuucaaggacuucuauuguggguagagcuugggagaauacuacuguggaucucgagucagauggaaaaacacaaaaagugaguacugcuggguccaacaagucuuuacagucagcaggguuuccaacaggacugacuuauucccaguugaugacacuuaaagacucaaugaugcaacuugacccaagugccaaaaccuggauagacauugaaggucguccagaagacccuguggaaauagcucuuuaccaaccuaugucgggcuguuacauacauuucuucagagaaccaacagauuuaaaacaguuuaagcaagaugccaaauauucucaugggauugaugugacagaucuuuucccugcucaaccugguuugaccagugcggucauugaagcccucccccgcaauaugguacugaccugucaagguucagaugauauuaagagacucuuggacucccaaggaagaagggacauaaagcuuauugacauugcacugaguaaggcugacucuaggagauuugaaaaugcuguuugggaucagugcaaagaucuaugccauaugcauacuggagugguugucgaaaagaagaagagaggaggcaaagaagaaauuaccccgcacugugcuuuaauggacugcauaauguaugaugcagcugugucaggaggacucaauauaccaguuuugagagcaguucuccccagagacaugguguucagaaccucaagccccaaggucguccuguaa

SEQ ID NO: 7940 - RNA, 1710 nt, Artificial Sequence
  derived and/or modified CDS sequence (wt) from LASV(LASV993-NIG-2009;Clade II)__AIT17779__NP
augagugcuucuaaggaagugaagucauuucucuggacacagucauugaggagagagcuuucagguuacugcuccaacauaaagcuucaaguuguaaaggaugcucaggcucuccuucauggucuugacuuuucugaaguuagcaaugugcagcgcuugaugcgcaaacaaaagagggaugauggugaucugaaacgucucagagaucugaaucaggcugucaacaaucuuguagaacucaaaucaacacaacaaaagaguaucuugagaguugggacccugaccucagaugaccugcugacauuggcagcugacuuagagaaacuaaagucgaaggucaucagaacagaaaggccacuaagcucagguguuuauauggggaauuugaguacacagcaacuugagcaaagaagggcauugcugaacaugauaggcaugguugguggggcucagggcacccaaccuggaagagacggaguuguuagggugugggauguuaagaauccagaucuuuugaacaaccaguucggcaccaugcccagucugacauuagcaugucuuacuaaacagggucaaguugauuugaaugaugccgucuuagcacuaacagaccugggucuaauauacacagcuaaguacccuaauagcuccgaccuggacagacuuucccaaagccauccuauauugaauaugguggacacuaagaagagcuccuugaacauaucugguuacaacuuuagcuuaggagcugcagugaaagcuggagcuuguaugcuugauggggggaacauguuggagaccaucaagguuacaccucagacaauggauggcaucuugaagucuauuuuaaagguaaaaaaauccuugggaauguuuguuucagauacaccuggugagaggaacccuuaugagaacauacuuuacaagaucugucuuuccggugacggcuggcccuauaucgcuucaaggacuucuauuguggguagagcuugggagaauacuacuguagaucucgagucagauggaaaaccacaaaaggugggaacugcuggguccaacaagucuuuacagucagcgggguuuccaacagggcugacuuauucucaguugaugacacuuaaagauucaaugaugcagcuugacccaagugccaaaaccuggauagacauugaaggucguccagaagacccuguggaaauagcucuuuaccagccuaugucaggcugcuauauacacuucuucagagaaccaacagacuuaaagcaguucaagcaagaugccaaauauucucaugggauugauguaacagaucuuuucucugcucaaccuggauuaaccagugcagucauugaagcccucccucgcaauaugguacugaccugucaagguucagaugauauuaagcgacucuuggauucccaaggaagaagggauauaaagcuuauugacauugcacugagcaagacugacucuaggagauuugaaaaugcuguuugggaucagugcaaagaucuaugccauaugcacacuggaguggucgucgaaaagaagaaaagaggaggcaaagaagaaauuaccccacacugugcucuaauggacugcauaauguaugaugcagcugugucaggaggucucaauauaccaguuuugagagcaguccuccccagggacaugguguuuaggaccucaagccccaaggucguccuguaa

SEQ ID NO: 7941 - RNA, 1710 nt, Artificial Sequence
  derived and/or modified CDS sequence (wt) from LASV(Nig08-04;Clade II)__ADU56611__NP
augagugcuuccaaggaagugaaaucauuccuuuggacacagucauugaggagagagcuuucaggcuauugcucuaauauaaaacuccaaguggucaaggaugcucaggcccuucugcauggucucgacuucucugaggucagcaauguccagcgcuugaugcgcaaacagaaaagagaugacggugaccuaaaacgucuuagagaccuaaaucaggcaguuaacaaccuugucgagcucaagucaacacaacaaaagaguguucugaggguuggaacauugaccucagacgacuugcugacuuuagcagcugaucuagagaaauugaagucaaagguuauuaggacggagagaccauuaaguucagguguguauauggggaacuugagcacacaacaacuugagcagaggaaggcguuguugaguaugauaggcauggucgguggugcucagggaacccaaccuggaagagacggaguugucagagugugggaugucaaaaacccggaccuccucaacaaccaauuuggcaccaugccuaguuuaacgcuagcaugucucacuaaacagggucagguugacuuaaaugacgccguucuggcgcuaacagacuugggauuaauauacacagcuaaauaccccaauaguuccgaccuagacagacuuucccagagccauccuauacugaauaugguagauaccaagaagagcucccuaaauauuucugguuauaauuuuaguuugggagcugcagugaaggccggagcuugcaugcucgauggggguaacauguuggaaacuaucaaggugacgccucagacaauggauggcauucugaagucuauucuaaagguaaaaaggucccugggaauguuuguuucagacacaccuggugaaagaaacccuuaugaaaacauacuuuacaaaauuugucucucuggggacggcuggcccuacauagcuucaagaaccuccauuguggguagagcuugggagaauaccacuguagaccuugagucagaugggaaaccacagaaaguggguacugcuggauccaacaaaucucugcaaucugcuggguucccaacagggcugaccuauucucaacugaugacacucaaagauucaaugaugcaacuugacccaagcgccaaaaccuggauagacauugaaggucguccagaagacccuguugagauagcucuuuaccaaccuaugucaggcuguuauauacauuucuucagagaaccaacggauuuaaaacaguucaaacaagaugccaaauauucucaugggauugaugugacagaucucuuuucugcucagccuggucuaaccagugcagucauugaggcucucccccgcaacaugguguugacgugccaagguucagacgacauuaaaaaacucuuggauucucaggggagaagggacaucaagcucauugacaucucauuaaauaaggcugauucuaggagauuugaaaaugcugucugggaucaguguaaagauuugugucacaugcacacuggagugguuguugagaaaaagaagagaggaggcaaagaggagaucacuccacauugugcuuuaauggauugcauaauguuugacgcagcugugucaggaggacucaauauaccaaucuugagagcuguucucccaagagauaugguguucagaacuucaagucccaaagucguccuguaa

SEQ ID NO: 7942 - RNA, 1710 nt, Artificial Sequence
  derived and/or modified CDS sequence (wt) from LASV(Nig08-A47;Clade II)__ADU56631__NP
augagugcuuccaaggaagugaagucauuucucuggacacagucauugaggagggagcuuucagguuacugcuccaauauaaagcuucaaguugucaaggaugcucaggcucuccuucauggccuugacuuuucugaaguuagcaaugugcagcgcuugaugcgcaaacaaaaaagagaugauagugaucugaaacgccucagagaucugaaucaggcugucaacaaucuuguagaacuuaaaucaacacaacaaaagaguaucuugagaguugggaccuugaccucagaugaccugcugacauuggcagcugacuuagagaagcuaaagucgaaggucaucagaacagaaaggccacuaagcucagguguuuauauggggaauuugagcacacagcagcuugagcaaagaagagcauugcugaacaugauaggcaugguugguggagcucagggcacccaaccuggaagagacggaguuguuagggugugggauguuaagaauccagaucuuuugaauaaccaguucggcaccaugcccagucugacauuagcaugucucacuaaacaaggucaaguugauuuaaaugaugccgucuuagcacuaacagaccugggucuaauauacacagcuaaguacccuaacaguuccgacuuggacagacuuucucaaagccauccuauauugaacaugguggacacuaagaagagcuccuugaacauuucugguuacaacuuuagcuuaggagcugcagugaaagcuggagcuuguaugcuugauggggggaacauguuggagaccaucaagguuacaccucagacaauggauggcaucuugaagucuauuuuaaagguaaaaaaauccuuaggaauguuuguuucagauacaccuggugagaggaacccuuaugagaacauacuuuacaagaucugucuuuccggugacggcuggcccuacauagccucaaggacuuccauuguggguagagcuugggagaauacuacuguagaucucgagucagauggaaaaccacaaaaggugggaacugcuggguccaacaagucuuugcagucagcgggguuuccaacagggcugacuuauucucaguugaugacacuuaaagacucaaugaugcagcuugauccaagugccaaaaccuggauagacauugaaggucguccagaagacccuguggaaauagcucuuuaccaaccuaugucgggcugcuauauacauuucuucagagaaccaacagacuuaaaacaguucaagcaagaugccaaauauucucaugggauugauguaacagaucuuuucccugcucaaccuggauugaccagugcagucauugaggcccucccucgcaauaugguacugaccugucaggguucagaugauauuaagcgacucuuggauucccaaggaaggagagacauaaagcucauugacauugcacugagcaaggcugacucuaggagauuugaaaaugcuguuugggaucagugcaaagaucuaugccauaugcacacuggagugguugucgaaaagaagaaaaggggaggcaaagaagaaauuaccccacacugugcucugauggacugcauaauguaugaugcagcugugucaggaggacucaauauaccaguuuuaagagcaguccuccccagagacaugguguuuagaaccucaagccccaaagucguccuguaa

SEQ ID NO: 7943 - RNA, 1713 nt, Artificial Sequence
  derived and/or modified CDS sequence (wt) from LASV(GA391;Clade III)__AAA46284__NP
augagugcuuccaaggaagugaggucaugcuuguggacucaaucccuaagaagggaacuaucuggcuacuguuccaacauaaaguugcagguaguuaaagacgcucaagcucuccuucauggucuugacuucuccgaggucaguaauguucagagauugaugcgcaagcagaaaagagaugauggcgaccuaaaacgacugagagaucucaaucaagcagucaacaaucuuguugagcucaaauccacacagcagaaaagugucuuaagaguuggaaccuuaaguucagacgaucuacuaauccuggccgcugauuuagaaaaacugaaaucaaaagucaccagaacagaaaggccuuugaguucaggaguuuauauggggaauuugaguucacaacagcuugaucaaaggagagcccuuuugaacaugauuggcaugacuggaguaaguggagggggaaagggugccaguaauggcauugugagaguuugggaugucaaaaaugcagaguuacucaacaaucaguucggaacaaugccaagccuaacuuuagcaugccugaccaaacaggggcaaguggaccugaaugaugccguucaagcuuugacagauuuagggcugauuuacacagccaaauaccccaacucaucugaucucgacagauugucucagagucauccaauucugaauaugauugacacuaagaaaaguucacucaacaucucugguuacaauuucaguuugggugcugcugucaaagcaggggccugcaugcuugauggugguaacauguuagagacuauuaagguuucaccucagaccauggaugguaucuugaagucaaucuugaaaguuaagaagagucugggaauguuuguaucagacacaccgggugaaaggaacccuuaugagaacauccuauacaagaucugucucucaggagacggaugguccuauauugcaucaaggaccucgauugugggaagagcaugggaaaauacugugguggaccuugagcaagacaacaagccccagaaaauuggaaaugggggguccaacaagucauuacagucugcaggcuuugcugcaggauuaaucuacucucaguugaugacucucaaagauuucaagugcuucaacuugauucccaacgcaaaaaccuggauggauauugaaggaagaccagaagacccaguugagauagcccuuuaucaaccgagcucggguugcuauguacauuucuuuagggagccaacagauuugaagcaauucaaacaagaugcaaaguauucacaugguagggaugugacugauuuguuugcugcccaaccuggguuaaccagugcagugauagaagcccuuccucggaacauggucaucacuugccaaggaucagaggauaucagaaaacuccuugagucacaagggaggagagacauaaaacugauugacaucacucuuaguaaagcagauucaagaaaguuugagaaugcuguuugggaucaauucaaggaucuaugucacaugcacacugggguaguuguggagaaaaagaagagaggugguaaagaggaaauaacuccucauugugcacugauggauugcauuauguuugaugcagcaguuucaggaggacuugaugcaaaaguccugagaguugugcucccuagagacaugguguucagaacuucaacaccuaaagucguccuguag

SEQ ID NO: 7944 - RNA, 1710 nt, Artificial Sequence
  derived and/or modified CDS sequence (wt) from LASV(ISTH2121-NIG-2012;Clade III)__AIT17541__NP
augagugcuucgaaagaagugaagucauuccuguggacucagucccugaggagagagcuauccggcuauugcuccaacauaaagcugcaaguggucaaagaugcucaagcucucuuacacggucuugacuucucugaaguuagcaauguucagcgauuaaugcgcaagcagaagagagaugacggugaucuaaaacgccuuagagaucugaaucaggcaguuaauaaccuuguugagcuuaaaucuacacaacaaaaaaguguucucagaguugggacucucagcucugaugacuuacugacuuuggcugcugauuuagagaaguugaagucuaaagucauccguacugagagaccauuaagcucaggagucuauauggggaaucugagcucccagcagcuugaucagagaagggcucuguugaacaugauugguaugacuagugauagacaaggggcaagcaccgggagagauggcauagugagaguuugggaugucaagaaugcagaauuguuaaauaaucaauucgggacggugccaagucugacucuagccugcuugaccaaacaggggcaaguggaucugaaugaugcuguccaagcucugacagauuugggucugauuuauaccgcuaaguaucccaauucaucugauuuagauaggcucucucaaagucacccuaucuuaaacaugauugacaccaaaaagaguucccucaacaucucuggcuacaacuucagucugggugcugcagugaaggcaggagccugcaugcuugauggcggcaauauguuagagacaaucaaaguuucaccccaaacuauggaugggauuuuaaaaucaauucugaaggucaagaggagcuuggggauguuuguaucagacauuccaggugagaggaauccauaugagaacauauuauacaaaaucugccuuucaggagacggauggccuuacauugcaucaagaacuucaaucacugguagggcuugggaaaacacuauaguagauuuggagucagacagcaaaccucagaagcccggaaauaguggguccaacagaucccugcaaucugcaggcuucccugcgggacugaccuauucucagcucaugacucucaaggauuccaugcugcaauuggacccaaacgccaagacuuggauggacauugaagguaggccagaugauccaguugagauagcuuuauaucaaccaagcucaggcuguuacauucauuucuuuagggagccaacugaucucaaacaauucaagcaagaugcaaaguauucacaugggauugaugugggugacuuguuugcugcgcagcccggccugacaagugcaguuauagaggcacucccacgaaacauggucaucaccugucaagggucggaagacauuaagaaacucuuagaaucacaaggaagaaaagauauaaaauugguggacaucucuaugagcaaaccggacuccagaaaguuugagaacgcuguuugggaucaguacaaagacuugugccacaugcauacgggcauugugguugagaaaaagaaaagggguggcaaggaagaaaucacaccacauugugcacuaauggauugcaucauguuugacgcagcuguagugggugggcuugaugccaggaucuuaagagcuguguuacccagggacauggucuucaggaccucaacaccuaaggucguccuguaa

SEQ ID NO: 7945 - RNA, 1710 nt, Artificial Sequence
  derived and/or modified CDS sequence (wt) from LASV(Nig08-A18;Clade III)__ADU56615__NP
augagugccuccaaggaagugaaaucauuccuauggacucagucucugagaagagagcuaucuggcuauugcucuaauauaaaacuccagguggugaaggaugcucaagcucuccuucauggcuuagacuucucugaggucaguaauguucagcgcuugaugcgcaaacaaaaaagagaugauagugaucucaaacggcuaagagaccucaaucaagcagucaacaaccuuguugagcuaaagucaacucaacagaaaaguguuuugagaauuggaacccuaaguucagaugaucuauugauuuuagcugcugaccuagaaaaacugaaaucaaagguuguuaggacagaaagaccccugagcucaggaaucuacauggggaauuuaaguucacagcagcuugaucagaggaaagcccuccuuaacaugaucggcaugacuggugggaauggggggaggaaugccacuagugauggcauugugagaguuugggaugucaaaaaugcggagcugcucaacaaucaguuuggaacaaugccaagucugacucuagcaugucugacuaaacaagggcaaguggauuugaaugaugcuguucaggccuugacagacuugggguuaauuuacacagcaaaauacccuaacucaucugaucuggacaggcuggcccagagccauccaauauugaauaugauugacaccaagaagagcucccuuaacaucucugguuacaacuuuagcuuaggagcugcugucaaggcaggggcuugcaugcuugauggaggcaacauguuggagacuauaaaggucucaccucaaaccauggauggcaucuugaagucaauccugaaagucaagagaagccugggaauguucaucucagacacaccaggugagaggaacccuuaugaaaacauacuguacaaaaucugccucucaggagauggguggccuuacauugcaucaaggacuucaauuguggggagagcuugggaaaacacugugguugacuuagagacagauaacaaaccacaaaagaccgggaauggggguucaaauaagucacugcaaucugcaggguuugcugcaggacugacuuacucucaauuaaugaccuuaaaggauucaaugcuucagcuugacccaaacgcaaagaccuggauggauauugagggaagaccagaagauccaguugaaauagcucuguaucaaccaguuucaggcuguuauauacacuucuuuagggaaccaacagacuugaagcaguuuaaacaggaugcaaaauauucacaugguauugauguaacggauuuguuugcugcacagccaggguugacaagugcagugauagaggcucuuccuaggaacauggucaucaccugucaaggaucagaagacaucaggaaacuucuggagucacaggggagaagagauauaaagcugauugacauuucccucaguaagguggauucaagaaaauuugagaacgcugugugggaccaguucaaagaccuaugucacaugcacaccgggauuguuguggagaagaaaaagagaggaggcaaggaggaaauaacuccucauugugcauugauggacugcaucauguuugaugccgcagucucaggaggaguugaugcaaagguccugagggcuguacucccuagagacaugguguucaggacuucgacaccuaaagucguccuguaa

SEQ ID NO: 7946 - RNA, 1710 nt, Artificial Sequence
  derived and/or modified CDS sequence (wt) from LASV(Nig08-A19;Clade III)__ADU56619__NP
augagugcuuccaaagaagugaaaucauuccuguggacucagucucugagaagagaguuaucuggcuauugcuccaauauaaaacuccaggugguaaaggaugcucaagcucuccuucaugguuuggacuucucugaggucaguaauguucaacgcuugaugcgcaaacaaaaaagggacgauggugaucuuaaacggcuaagagaccucaaucaagcagucaacaaccuuguugaacuaaagucaacucaacaaaagagugugcugaggguuggaacccuaaguucagacgaucuauugguuuuggcugcugaccuggaaaaacugaagucaaagguuguuaggacagaaagaccccugagcucaggaauuuauauggggaaucuaaguucacagcagcuugaucagaggaaggcccuccucaacaugauuggcaugacuggugggaaugggggaaggaauaccacuagugaugguauugugagaguuugggacgucaagaaugcagagcugcuuaacaaucaguuugggacaaugccaagucuaacucuagcauguuugaccaaacaagggcaaguggauuugaaugaugcuguucaggcuuugacagauuugggauugauuuacaccgcaaaauacccuaauucaucugauuuggacaggcuggcccagagccauccgauauugaacaugauugauacuaagaagagcucccuuaacaucucugguuacaauuuuaguuuaggagccgccgucaaggcuggggccugcaugcuugauggaggcaauaugcuagagacuauaaaggucucaccucaaaccauggauggcaucuugaagucaaucuugaaagucaagagaagccugggaauguucaucucagauacgccaggugaaaggaacccuuaugaaaacauacuguacaaaaucugccucucaggagauggguggccuuacauugcaucaaggacuucaauugugggaagagcuugggagaacaccgugguugacuuagagucagacaacaaaccgcaaaagaccggcaauggggguucaaauaagucauugcaaucugcaggguuugcugcaggacugacuuauucucaacugaugaccuuaaaggauucaaugcuucagcuugacccaaaugcaaagacuuggauggauauugagggaagaccagaagauccaguugaaauagcucuguaucaaccaaguucaggcugcuauauacacuucuucagggaaccgacagacuuaaagcaguuuaaacaggaugcaaaauauucacaugguauugaugugacagauuuguuugcugcacagccaggguuaacaagugcagugauagaggcucuuccuagaaacauggucaucaccugucaagggucagaagacaucagaaaacuucuggagucacaggggaggagggauauaaaacugauugacauuucccuuaguaagguggacucaagaaaauuugagaaugcugugugggaucaauucaaggauuuaugucacaugcacaccgggauuguuguggagaagaaaaagaggggaggcaaggaggaaauaacaccucauugugcauuaauggacugcaucauguuugaugcugcagucucaggaggaguugaugcaaagguccugagggcugugcuccccagagauaugguguucagaacuucgacacccaaagucguccuguaa

SEQ ID NO: 7947 - RNA, 1710 nt, Artificial Sequence
  derived and/or modified CDS sequence (wt) from LASV(ONM-299;Clade III)__ANH09735__NP
augagcgcuucaaaggaagugaaaucauuccuauggacucaguccuugaggagagaguugucuggcuacugcuccaacauaaaguugcaaguggucaaggacgcucaagcccuccuacauggucuugauuuuucggaagucagcaauauacagcgauuaaugcgcaaagagaggagggaugauagugaccugaaacgccucagagacuuaaaucaggcagucaacaaccuugucgaacugaaauccacacagcaaaaaaguguucuuagagucgggacucucagcucugaugaucuguugacuuuagcugcugauuuagagaaguugaaaucuaaggugauucgcacugagaggccguuaagcucaggugucuauaugggaaauuugagcacccagcaacuagaccagaggagggcccugcugaacaugauuggcaugacuaaugguggccaaggggcaaaugcuggaagagacggcauuguaagggucugggauguuaagaaugcagaacuguugaauaaucaauucgggacaaugccaagcuugaccuuggccuguuuaacaaaacaaggacagguggaccugaaugaugcuguccaagccuugacagauuuaggacugauuuauacugcaaaguacccaaacucaucugacuuagauaggcucucucagaaccaccccauacuaaacaugauugacaccaagaagagcucccucaacauaucugguuacaauuuuagucugggugccgcaguaaaggcgggggcuugcaugcuugaugguggcaacauguuggaaacaaucaagguuucaccacaaacuauggaugggauccuaaaaucaaucuugaaggucaaaaggagcuuggggauguuugugucagauacuccaggugagagaaauccauaugaaaauauacuguacaagaucugcuugucaggagauggauggccuuauguugcaucaagaaccucuaucauuggcagagcuugggaaaacacugugguagaucuggagucagacagcaagccucaaagaccugggagcaaggaauccaacagaucauugcagacggcugguuucccagcaggacuaaccuacucacagcucaugacucucaaggauucuauguugcaguuggauccuaaugcuaagaccuggauggacaucgaagggagaccagaugauccaguugagauugccuuauaucagccaagcucagguuguuacauucauuucuuuagagaaccaacugaucugaagcaauuuaaacaggaugcaaaauacucacacgggauugacauaggugaucuauuugcugcgcagcccggccugacaagugcaguaauagaagcacuuccacggaacaugguaaucaccugccaagggucagaggacaucaagagacuccuagagucucaggggaggaaagacauaagacugguagacauuucuuugaguaaggcagauucuagaaaguuugaaaaugcugucugggaucaauuuaaagaucuguguaacaugcauacaggugucguuguugagaagaagaagaaggguggcaaagaagaaauaacaccacacugugcacugauggacugcaucauguuugaugcagcugucaugggugggcucgaugcgaaagucuuaagagcugugcuacccaaagacauggucuucaggaccucaacacccagagucguccuguaa

SEQ ID NO: 7948 - RNA, 1710 nt, Artificial Sequence
  derived and/or modified CDS sequence (wt) from LASV(ONM-314;Clade III)__ANH09737__NP
augagcgcuucaaaggaagugaaaucauuccuauggacucaguccuugaggagagaguugucuggcuacugcuccaacauaaaguugcaaguggucaaggacgcucaagcccuccuacauggucuugauuuuucggaagucagcaauauacagcgauuaaugcgcaaagagaggagggaugauagugaccugaaacgccucagagacuuaaaucaggcagucaacaaccuugucgaacugaaauccacacagcaaaaaaguguucuuagagucgggacucucagcucugaugaucuguugacuuuagcugcugauuuagagaaguugaaaucuaaggugauucgcacugagaggccguuaagcucaggugucuauaugggaaauuugagcacccagcaacuagaccagaggagggcccugcugaacaugauuggcaugacuaaugguggccaaggggcaaaugcuggaagagacggcauuguaagggucugggauguuaagaaugcagaauuguugaauaaucaauucgggacaaugccaagcuugaccuuggccuguuuaacaaaacaaggacagguggaccugaaugaugcuguccaagccuugacagauuuaggacugauuuauacugcaaaguacccaaacucaucugacuuagauaggcucucucagaaccaccccauacuaaacaugauugacaccaagaagagcucccucaacauaucugguuacaauuuuagucugggugccgcaguaaaggcgggggcuugcaugcuugaugguggcaacauguuggaaacaaucaagguuucaccacaaacuauggaugggauccuaaaaucaaucuugaaggucaaaaggagcuuggggauguuugugucagauacuccaggugagagaaauccauaugaaaauauacuguacaagaucugcuugucaggagauggauggccuuauguugcaucaagaaccucuaucauuggcagagcuugggaaaacacugugguagaucuggagucagacagcaagccucaaagaccugggagcaaggaauccaacagaucauugcagacggcugguuucccagcaggacuaaccuacucacagcucaugacucucaaggauucuauguugcaguuggauccuaaugcuaagaccuggauggacaucgaagggagaccagaugauccaguugagauugccuuauaucagccaagcucagguuguuacauucauuucuucagagaaccaacugaucugaagcaauuuaaacaggaugcaaaauacucacacgggauugacaugggugaucuauuugcugcgcagcccggccugacaagcgcaguaauagaagcacuuccacggaacaugguaaucaccugccaagggucagaggacaucaagagacuccuagagucucaggggaggagagacauaagacugguagacauuucuuugaguaaggcagauucuagaaaguuugaaaaugcugucugggaucaauuuaaagaucuguguaacaugcauacaggugucguaguugagaagaagaagaaggguggcaaagaagaaauaacaccacacugugcacugauggacugcaucauguuugaugcagcugucaugggugggcucgaugcgaaagucuuaagagcugugcuacccaaagacauggucuucaggaccucaacacccagagucguccuguaa

SEQ ID NO: 7949 - RNA, 1710 nt, Artificial Sequence
  derived and/or modified CDS sequence (wt) from LASV(ONM-700;Clade III)__ANH09739__NP
augagcgcuucaaaggaagugaaaucauuccuauggacucaguccuugaggagagaguugucuggcuacugcuccaacauaaaguugcaaguggucaaggacgcucaagcccuccuacauggucuugauuuuucggaagucagcaacauacagcgauuaaugcgcaaagagaggagggaugauagugaccugaaacgccucagagacuuaaaucaggcagucaacaaccucgucgaacugaaauccacacagcaaaaaaguguucuuagagucgggacucucagcucugaugaucuguugacuuuagcugcugauuuagagaaguugaaaucuaaggugauucgcacugagaggccguuaagcucaggugucuauaugggaaacuugagcacccagcaacuagaccagaggagggcccugcuaaacaugauuggcaugacuagugguggccaaggggcaaaugcuggaagagacggcauuguaagggucugggauguuaagaaugcagaacuguugaauaaucaauucgggacaaugccaagcuugaccuuggccuguuuaacaaaacaaggacagguggaccugaaugaugcuguucaagccuugacagauuuaggacugauuuauacugcaaaguacccaaacucaucugacuuagauaggcucucucagaaccaccccauacuaaacaugauugacaccaagaagagcucccucaacauaucugguuacaauuuuagucugggugccgcaguaaaggcgggggcuugcaugcuugaugguggcaacauguuggaaacaaucaagguuucaccacaaacuauggaugggauccuaaaaucaaucuugaaggucaaaaggagcuuggggauguuugugucagauacuccaggugagagaaauccauaugaaaauauacuguacaagaucugcuugucaggagauggauggccuuauguugcaucaagaaccucaaucauuggcagagcuugggaaaacacugugguagaucuggagucagacagcaagccucaaagaccugggagcaaggaauccaacagaucauugcagacggcugguuucccagcaggacuaaccuacucacagcucaugacucucaaggauucuauguugcaguuggauccuaaugcuaagaccuggauggacaucgaagggagaccagaugauccaguugagauugccuuauaucagccaagcucagguuguuacauucauuucuuuagagaaccaacugaucugaagcaauuuaaacaggaugcaaaauacucacacgggauugacauaggugaucuauuugcugcgcagcccggccugacaagugcaguaauagaagcacuuccacggaacaugguaaucaccugccaagggucagaggacaucaagagacucuuagagucucaggggaggagagacauaagacugguagacauuucuuugaguaaggcagauucuagaaaguuugaaaaugcugucugggaucaauuuaaagaucuguguaacaugcauacaggugucguaguugagaagaagaagaaggguggcaaagaagaaauaacaccacacugugcacugauggacugcaucauguuugaugcagcugucaugggugggcucgaugcgaaagucuuaagagcugugcuaccuaaagacauggucuucaggacuucaacacccagagucguccuguaa

SEQ ID NO: 7950 - RNA, 1710 nt, Artificial Sequence
  derived and/or modified CDS sequence (wt) from LASV(Weller;Clade III)__AAT49009__NP
augagugcuuccaaggaagugaaaucauuccuguggacucagucucugagaagagaacugucuggcuauugcuccaacauaaaguugcagguggugaaagaugcucaggcucuucuucauggccuggacuucucugaagucagcaauguucaacgcuugaugcguaaacagaggagagaugauggugaucuaaaacggcugagagaccuuaaucaggcagucaacaaucuuguugagcuaaagucaacucagcaaaaaaguguguugagaguugggacccugaacucagaugaucugcugguccuagcugcugaccuagaaaagcuaaagucaaaggucauuagaacagagagacccuugagcucaggaaucuacauggggaaucuaaguucacagcaacuugaucaaagaagggcucuucuaaacaugauuggcaugacugguggaaacagagggggggguaccuccagugauggcauugugagagucugggacgucaaaaaugcagagcuacucaacaaccaguuugggacaaugccaagucugacccuggcaugccugaccaaacaaggacaaguagaucugaaugaugcuguucaagccuuaacggacuuaggacuaaucuacacagcaaaguaccccaauucaucugaucucgauaggcuggcccagagucauccgauauugaauaugauugauacuaagaaaagcucacucaacaucucugguuacaacuuuagcuugggagcugcugucaaggcaggggccugcaugcuugaugguggcaauauguuggagaccauaaagguuucaccucagaccauagauggcaucuugaaaacaaucuugaaagucaagaagagucugggaauguucaucucagauguaccaggugagaggaacccuuaugagaauauacuguacaaaauuugucucucaggggauggauggccuuacauugcaucaaggacuucgauugugggaagagcaugggaaaauacugugguugaucuggaaucagacaacaaaccacaaaaaaccggaaauggagguucaaacaagucauugcagucugcagguuuugcugcaggguuaacuuacucccaauuaaugacccucaaagacucaaugcuucaacuugaccccaauucaaaaaccuggauggauauugaggggagaccagaggauccagucgagauagcucuguaucaaccaaacucaggcuguuacauacacuuuuuuagggaaccaacagacuuaaaacaauucaaacaggaugcaaaguauucacaugguauugaugugacagauuuguuugcugcacagccaggguugacaagugcagugauagaggcucuccccagaaacauggucaucaccugucaggggucagaggacaucagaaaacuucuggagucacaaggaagaagggauauaaagcugaucgacauuucccucaauaaagcggacucaaggaaauuugaaaaugcugugugggaucaguucaaggacuuaugccacaugcauacugggguuguuguggagaagaagaagagaggaggcaaagaggaaauaacuccucauugugcauugauggacugcauuauguuugaugcagcagucucgggagggcucgaugcaaagguccuaagagcugugcuccccagggacaugguauucagaaccucaacaccuaaagucguccuguaa

SEQ ID NO: 7951 - RNA, 1710 nt, Artificial Sequence
  derived and/or modified CDS sequence (wt) from LASV(BA366;Clade IV)__ADI39452__NP
augaguguuucaaaagaggugaaauccuucuuauggacacaaucucugaggagggagcugucaggcuacugcuccaacaucaaauugcagguugugaaggaugcccaagcucuccugcauggacuugacuucucugagguaagcaauguccagcgucugaugcgcaaacaaaggagagaugauaaugauuugaagagacucagagaucugaaucaggcaguuaauaaucuuguugagcugaagucaacucaacaaaagagugucuuaagaguugggacccuaacuucagacgaucugcugauccuggcugccgaucuagagaaacugaagacaaaagucaccagaacagaaaggccacuaagugcaggugucuauauggggaaucugaguucacagcagcucgaacagagacgagcucucuuaaacaugauaggaaugaauggugguaaucaaggaguucaggcugggagagacggaguggugagagucugggauguaaagaacgcagagcuacuuaauaaccaguucgggacuaugccaagucugacgcuggcguguuugacgaagcaggggcagguugauuugaaugaugcgguucaggcacuuacagaccuugguuugauuuacacagcaaaguaccccaacaccucugacuuagacagauuggcucaaagccacccuauccugaauaugauugacaccaagaagagcucauugaacaucucggguuauaacuucagcuugggugccgcugugaaggcaggagccugcauguuggaugguggcaacaugcuagaaacaaucaaaguaucaccucaaacaauggaugguauucucaaaucuaucuugaaagugaaaaggacucuuggaauguuugucucagacacuccuggugaaagaaacccuuaugaaaacauacuuuacaaaauuugcuugucaggagauggauggccauacauugcaucgagaacaucaauaacaggaagagcuugggagaacaccauaguugauuuagaaucagacgggaaaccacagaagguugggaacaaugguuccaauaaaucuuuacaaucagcaggcuucacugcuggacucacauauucucaacucaugacucuuaaggaugcaaugcugcagcuugacccaaaugcaaagacuuggauggauauugagggaaggcccgaagauccuguagaaguugcucuuuaccaaccgagcucuggcugcuauauucacuucuuucgugagccuacugacuuaaagcaguucaaacaagaugccaaauauucucauggcauugaugucacagacuuguuugcugcacagccaggucugaccagugcaguuauagaagcacucccucgaaacauggucaucaccugccagggaucugaagauguaagaaagcuccuugaaucacagggaaggaaggacauaaaacugauugauauugcccucagcaaggcugacuccagaaaguaugaaaaugcagucugggaccaauacaaagaccugugucacaugcacacagguguuguuguugaaaagaagaaaagagguggcaaagaggagaugaccccucacugugcacugauggauugcaucauguuugaugcagcagugucgggaggauuaagcacacagguuuugagagcagugcugcccagagacauggucuuuagaacaucaacacccaaagucguccuguaa

SEQ ID NO: 7952 - RNA, 1710 nt, Artificial Sequence
  derived and/or modified CDS sequence (wt) from LASV(G1180-SLE-2010;Clade IV)__AIT17169__NP
augagugccucaaaggaaauaaaguccuuucuauggacacaaucauugaggagggaauuaucugguuacugcuccaacaucaaacuacagguggugaaagaugcccaggcucuauuacauggacuugacuucucagaagucaguaauguucaacgguugaugcgcaaggagagaagggaugacaaugauuugaaacgguugagggaccuaaaucaagcggucaacaaccucguugaguuaaaaucaacucaacaaaagagcauauugagaguugggacccuaaccucagaugacuuauuaaucuuagccgcugaucuagagaaguuaaaaucaaaggugaucaggacagaaaggccauugagugcaggugucuauaugggcaacuugagcucacagcagcuugaccaaagacgagcucuucugaguaugauaggaaugaguagugguaaucaaagggcucaggcugggagggauggaguggugagaguuugggauguaaaaaauguagaguugcuuaauaaucaguucggaaccaugccaagucuaacacuggcaugucugacaaaacaggggcagguugauuugaaugaugcagugcaagcacugacagauuugggucugaucuacacagcaaaguauccuaauacuucagaccuagauaggcugacucaaagucaccccaucuuaaacaugauugacaccaagaaaagcucuuugaauaucucugguuacaauuucagcuugggugcagcugugaaggcaggagcuugcaugcuggaugguggcaauauguuggagacaaucaaggugucaccucagacaauggaugguauccucaaauccaucuuaaaggucaagaaggcucuugggauguucaucucagacaccccuggugaaaggaaucccuaugaaaacauacucuacaagaucuguuugucaggagauggauggccauauauugcaucaagaaccucgauaacaggaagagccugggaaaacacugucguugacuuggaaucagaugggaagccacagaaagcuggcagcaacaauucuaauaaauccuugcagucaguaggguuuacugcugggcuuaccuauucucagcugaugacccucaaggaugcgaugcugcaacuugacccaaacgcuaagacuuggauggacaucgaaggaagaccugaagauccaguggaaauugcccucuaucagccaaguucaggcugcuacauacacuuuuuccgugaaccuacugauuuaaagcaguucaagcaggaugcuaaguacucacaugggauugaugucacagaccucuucgcugcacaaccgggcuugaccagugcuguuauagaugcacucccccggaacauggucauuaccugucagggguccgaugacauaaggaagcuccuugagucacaagguagaaaagacaucaaauuaauugauauugcccucagcaaaacugauuccaggaaguaugaaaaugcagucugggaucaguauaaagaccuaugccacaugcacacagguguuguuguugaaaagaagaaaagaggcgguaaagaggaaauaaccccucacugugcacuaauggacugcaucauguuugaugcagcagugucaggaggacugaacacaucuguuuugagagcagugcugccuagagauaugguauucagaacaucgacaccuagagucguccuguaa

SEQ ID NO: 7953 - RNA, 1710 nt, Artificial Sequence
  derived and/or modified CDS sequence (wt) from LASV(G1190-SLE-2010;Clade IV)__AIT17173__NP
augagugccucaaaggaaauaaaauccuuuuuguggacacaauccuugaggagggaauuaucugguuacugcuccaacaucaaacugcagguggugaaggaugcccaggcucuuuuacaugggcuugacuucucugaagucaguaauguucaacgguugaugcgcaaggagagaagggaugacaaugauuuaaaacgguugagggaccuaaaucaagcagucaacaaucuuguugaauuaaaaucaacucaacaaaagaguauacugagaguugggacucuaaccucagaugacuuauuaaucuuggccgcugaucuagagaaguugaaaucgaaggugaccagaacagaaaggccauugagugcaggugucuauaugggcaaccuaagcucacagcaacuugaccaaagaagagcucuucugaacaugauaggaaugagugguaguaaucaaggggcucgggcugggagagauggaguggucagaguuugggaugugaaaaaugcagaguugcucaauaaucaguucgggaccaugccaagucugacacuggcaugucugacaaaacaggggcagguugacuugaaugaugcaguacaagcauugacagauuuagguuugaucuacacagcgaaguaccccaauacuucagacuuggacaggcugacucaaagucaccccauccuaaauaugauugacaccaagaaaagcucuuugaacaucucagguuauaauuuuagcuugggugcagcugugaaggcaggagcuugcaugcuggaugguggcaauauguuggaaacaaucaaggugucaccucagacaauggaugguauucucaaauccauuuuaaaggucaagaaggcucuugggauguucauuucagaugccccuggugaaaggaauccuuaugaaaacauacucuacaagauuuguuugucaggagacggauggccauacauugcaucaagaaccucaauaacaggaagggccugggaaaacacuguuguugaucuggaaucagaugggaagccacagaaagcuggcaguaacgguuccaauaaaucucugcagucggcaggauuuaccgcugggcucaccuauucucagcugaugacccucaaggaugcaaugcugcaacuugacccaaaugcuaagaccuggauggacauugaaggaagaccugaagauccaguggaaaucgcccucuaucaaccaaguucagggugcuacauacacuucuuccgugaaccuacugauuuaaagcaguucaagcaggaugcuaaguacucacaugggauugaugucacggaccucuucgcugcacagccgggcuugaccagugcugucauugaugcacucccccggaauauggucaucaccugccagggaucugaugacauaaggaaacucuuugaaucacaaggaagaaaagacauuaagcuaauugacauugcccucagcaagacugauuccaggaaguaugaaaaugcagucugggaucaguauaaagacuuaugccacaugcauacagguauuguuguugagaagaagaaaagaggugguaaagaggaaauaaccccucacugugcacuaauggacugcaucauguuugaugcagcaguaucaggaggacugaacacaucaguuuugagagcagugcugcccagagacaugguguucagaacaucgacaccuagggucguccuguaa

SEQ ID NO: 7954 - RNA, 1710 nt, Artificial Sequence
  derived and/or modified CDS sequence (wt) from LASV(G1200-LIB-2010;Clade IV)__AIT17177__NP
augagugccucaaaagagauaaaguccuucuuguggacacagucucugaggagggaacugucaggcuauugcucuaacaucaaauuacagguugugaaagaugcccaagcccuucugcauggacuugacuucucugaggucagcaauguccaacgguugaugcgcaaacaaagaagggaugauaaugaccuaaaacgacugagagauuuaaaucaggcagucaacaaucuuguugaauuaaaaucaacucaacaaaagaguguacugcgaguugggacucugaccucggaugacuuguuaguuuuagcugcugaccuagagaaacuaaaaucaaaggugaucaggacagaaagaccauugagcgcaggcauuuauaugggcaacuugagcucacagcaacuugaccaaagacgagcucuccuaaacaugauaggaaugagugguggcaaucaaggggcucgggcuggaagggauggaguggugaggguuugggaugugaagaaugcagaucuacuuaauaaucaguuugggaccaugccaagccugacauuggcgugucugacaaaacaagggcagguugaccuaaaugauguaguacaagcgcugacagaucuaggcuugaucuacacagcaaaguaucccaauacuucggaccuggacaggcugacucaaagccaccccauccuaaagaugauugacgcuaauaagagcucucuaaacaucucaggcuauaauuuuagcuugggugcagcugugaaggcaggagccuguaugcuggacggugggaacauguuagagacaaucaaagugucaccccaaacaauggacggcauucucaaguccauucuaaaggucaaaaagagccuugggauguucauuucagacaccccuggcgagagaaacccuuaugagaauauacucuacaaaaucugucugucaggggauggauggccauauauugcaucaaggacuucaauaauaggaagggccugggaaaacacuguuguugauuuggaaucagaugggaaaccacagaagacuggaagcaacaacuccagcaagucccuacaaucagcaggguuugcugcugggcucacuuauucucagcucaugacccuuaaggaugcaaugcugcagcuugauccaaaugcuaagaccuggauggacauugaaggaagaccugaagauccgguggagauugcucucuaucagccaaguucagguugcuauauucauuucuuccgugaacccacugaccuaaaacaguuuaaacaagaugcuaaguauucacauggaauugaugucacagaccuuuuugcugcacagccaggacuaacuagugcuguaauagaagcacucccccggaacauggucaucaccugucaggguucugaugacauaagaaaacuucuugaaucacagggaagaaaagauaucaagcugauugauauugcucucagcaaaacugauucuaggaaguaugagaacgcagucugggaccaguacaaagacuuaugccacaugcacacagguauuguuguugagaagaaaaagagaggcggcaaagaagaaauaaccccucauugugccuuaauggacugcaucauguuugaugcagcagugucaggaggacugaacacacugguuuuaagggcagugcugcccagagauaugguguucagaacaucaacacccaaggucguccuguaa

SEQ ID NO: 7955 - RNA, 1710 nt, Artificial Sequence
  derived and/or modified CDS sequence (wt) from LASV(G1442-SLE-2011;Clade IV)__AIT17181__NP
augagugcuucaaaggagguaaaguccuucuuguggacacaaucccugaggagggagcuguccgguuauuguuccaauaucaaacuacagguagugaaagaugcccaagcccuuuugcauggacuugauuucucugaggucagcaauguccaacgguugaugcgcaaacagagaagggaugacaaugaccugaaacggcugagggaucuaaaucaagcagucaacaaccuuguugagcugaaaucuacccaacagaaaagugugcugagaguaggaacucuaaccucagaugaucuguugguuuuggcugcugaccuggagaagcugaaaucaaaagugaucaggacagaaaggccauugagcgcaggugucuauaugggcaacuugagcucacagcaacuagaccaaagacgggcucuccugaauaugauaggaaugagugguggcauucaagggacucguacugggagagauggagugguaagagucugggauguaaaaaaugcagaccuacuuaacaaucaguucggcacuaugccaagucugacauuggcauguuuaacaaaacaaggacagguugaccugaaugauguggugcaggcacugacagaucugggccugauuuauacagcaaaguacccuaaugccucagacuuagauagguugacucagagucaccccaucuuaaacaugauugauaccaaaaaaaguucccuaaauaucucagguuacaacuucagucugggugcagcugugaaggcaggagcuugcaugcuggauggugguaacauguuggagacaaucaaggugucaccucagacaauggauggcauccucaagucuauccuaaagguaaaaaagacucuugggauguucaucucagacaccccuggugaaaggaauccuuaugagaacauacuuuacaagauuugucugucaggagauggauggccauauauugcaucaagaacuucaauuacaggaagggccugggaaaacacugucguugaucuggaaucagaugggaagccacagaaggcugggagcaacaauucuaacaaaucccugcagucagcaggcuuugccgcugggcucacuuauucucagcuuaugacccucaaagaugcaaugcugcagcuugaucccaaugcuaaaaccuggauggacauugagggaagaccugaagacccaguggagauugcucucuaucagccaaguucagguugcuacauucacuucuuccgugaaccuacugauuuaaagcaguucaagcaagaugcuaaauauucacauggaauugaugucacagaccucuucgccgcacaaccaggcuugaccagugcugucauagaggcacuuccccggaacauggucaucaccugucagggaucugaugacauaaagaaacuccuugaaucacagggaagaaaggauaucaaacuaauugacaucgcccucaguaaaacugauuccaggaaguaugaaaacgcagucugggaucaauauaaggacuuaugccauaugcacacagguguuguuguugaaaagaagaaaagaggcggcaaggaggagauaacaccucacugugcuuugauggacugcauuauguuugacgcagcagugucaggaggauugaacacauuggucuugagagcgguucuaccuagagacaugguguuuagaacaucgacacccagagucguccuguaa

SEQ ID NO: 7956 - RNA, 1710 nt, Artificial Sequence
  derived and/or modified CDS sequence (wt) from LASV(G1529-SLE-2011;Clade IV)__AIT17185__NP
augagugccucaaaggagauaaaguccuucuuguggacacaaucuuugaggagggaacugucugguuauuguuccaauauuaaauuacaaguggugaaggaugcccaagcucuuuuacauggacuugauuucucugagguuagcaauguucagcgauugaugcgcaaacagagaagggaugauggugaucuaaaacgguuaagggaucuuaaucaagcagucaacaaccuuguugaguugaaaucaacucaacaaaagaguguguugaggguugggacuuugaccucagaugaccuguuaauuuuggcugcugaucuagagaagcugaaaucaaagguaaccaggacagaaaggccguugagugcagguguuuauauggguaaccugaguucacaacaacuugaccagagacgggcucucuuaaacaugauaggaaugaguggugguaaucgaggggcucggaccggaaaagauggaguggugagaauuugggaugugaaaaaugcggacuugcucaacaaucaguucgguaccaugccaaguuugacacuggcaugucuaacaaaacaagggcagguugaccugaaugauguugugcaagcgcuaacagauuuggguuugaucuacacagcaaaauaucccaacacuucggacuuggacaggcugacccagagccaccccauucuaaauaugauagacaccaacaagagcucccugaacaucucugguuacaauuuuagucugggugcagcuguuaaggcaggagcuugcaugcuagauggugguaauaugcuggagacaaucaaggugucaccucagacaauggauggcauccucaaguccauucuaaagguuaaaaagagucuugggauguucauaucagacaccccuggcgaaaggaauccuuaugaaaauauacucuauaaaauuugucugucaggagauggguggccguacauugcaucaagaacuucaauaacaggaagggccugggaaaacacugucguugaucuagaaucagaugagaagccacaaaaagcugggagcaacaauuccaacaaaucccuacagucaacaggguucacugccgggcuuaccuauucucagcuuaugacucucaaagaugcaauguugcagcuugauccaaaugcaaagaccuggauggacauugaagggagaccugaagauccgguggaaaucgcuuuguaucagccaaguucaggcugcuacauacacuucuuccgugagcccacugauuuaaagcaguucaagcaagaugcuaaguacucacaugggauugaugugacagaccucuuugcugcacaaccaggcuuaacuagugcugucauagacacacucccucggaacauggucauuaccugccaggggucugaugacauaaggaaacuccuugaaucacagggaagaaaagauaucaaacuaauugauauugcccucagcaaaacugauucaaggaaauaugaaaaugcagucugggaucaguauaaagauuuaugccauaugcacacagguguugucguugagaagaagaaaagaggugguaaagaggaaauaaccccucacugugcucuaauggacugcaucauguuugaugcagcaguuucaggaggacugaaugcgucgguucugagagcugugcuaccuagagauaugguguuuagaacaucgacaccuagagucguccuguaa

SEQ ID NO: 7957 - RNA, 1710 nt, Artificial Sequence
  derived and/or modified CDS sequence (wt) from LASV(G1618-SLE-2011;Clade IV)__AIT17189__NP
augagugccucaaaggaaauaaaguccuuucuguggacacaauccuugaggagggaacuaucugguuacugcuccaacaucaaacuucagguggugaaagaugcccaagcucuuuugcacggacuugacuucuccgaagucaguaauguucaacgguugaugcgcaaagagagaagggaugacaaugauuugaaacggcugagggaccuaaaucaagcggucaacaaucucguugaguuaaaaucaacucaacagaagaguguacugagaguugggacccuaaccucagaugacuuauuaaucuuagcugcugaucuagagaaguugaaaucaaaagugaccaggacagaaaggccauugagugcaggugucuauaugggcaauuugagcucacagcaacuugaccaaaggcgagcucuucugaguaugauagggaugagugguggcaaucaaggggcucggacugggagagaugguguggugagaguuugggauguaaaaaaugcagaguugcucaacaaucaguucgggaccaugccaagucugacacuggcauguuugacaaagcaaggacagguugacuuaaaugaugugguacaagcauugacagauuuggguuugaucuacacagcaaaguaucccaacacuucagacuuggauaggcugacucaaagucaccccauccuuaauaugauugacaccaagaaaagcucuuugaauaucucagguuauaauuuuagcuugggugcagcugugaaggcaggagcuugcaugcuggaugguggcaauauguuggagacaaucaaagugucgccucagacaauagauggcauccucaaauccauuuuaaaggucaaaaaggcucuugggauguucauuucagacaccccuggugagaggaaucccuacgaaaacauacucuacaagauuuguuugucaggggauggauggccauauauugcaucaaggaccucaauaacaggaagggccugggaaaacacugucguugaucuagaaucagaugggaagccacagaaagcuggcagcaacaauuccaacaaaucccugcagucggcaggguuuaccgcugggcuuacuuauucucagcucaugacccucaaggaugcaaugcugcaacuugauccaaaugcuaagaccuggauggacauugaaggaagaccugaagacccaguggaaauugcucucuaucaaccaaguucagguugcuacauacacuucuuccgugagccuacugauuuaaagcaguucaagcaagaugcuaaauacucacaugggauugaugucacagaccucuuugcugcacaaccgggcuuaaccagugcugucauagaugcacucccccggaauauggucaucacuugucagggguccgaugauauaaggaaacuccuugaaucacaagggaggaaggacaucaaauuaauugacauugcccucagcaaaacugauuccaggaaguaugagaaugcagucugggaucaguauaaagacuugugccacaugcacacaggugucguuguugaaaagaagaaaagaggcgguaaagaggaaauaaccccucacugugcacuaauggacugcaucauguuugaugcagcagugucaggaggacuuaacucguugguuuugagagcagugcugcccagagacaugguauucagaacaucgacaccuagagucguccuguaa

SEQ ID NO: 7958 - RNA, 1710 nt, Artificial Sequence
  derived and/or modified CDS sequence (wt) from LASV(G1646-SLE-2011;Clade IV)__AIT17193__NP
augagugccucaaaggaaauaaaguccuuucuguggacacaauccuugaggagggaacuaucugguuacugcuccaacaucaaacuucagguggugaaagaugcccaagcucuuuugcacggacuugacuucuccgaagucaguaauguucaacgguugaugcgcaaagagagaagggaugacaaugauuugaaacggcugagggaccuaaaucaagcggucaacaaccuuguugaguuaaaaucaacucaacagaagaguguacugagaguugggacccuaaccucagaugacuuauuaaucuuagcugcugaucuagagaaguugaaaucaaaagugaccaggacagaaaggccauugagugcaggugucuauaugggcaacuugagcucacagcaacuugaccaaaggcgagcucuucugaguaugauagggaugagugguggcaaucaaggggcucggacugggagagauggaguggugagaguuugggauguaaaaaaugcagaguugcucaacaaucaguucgggaccaugccaagucugacacuggcauguuugacaaaacaaggacagguugacuuaaaugaugcaguacaagcauugacagauuuggguuugaucuacacagcaaaguaucccaacacuucagacuuggauaggcugacucaaagucaccccauccuaaauaugauugacaccaagaaaagcucccugaauaucucagguuauaauuuuagcuugggugcagcugugaaggcaggagccugcaugcuggaugguggcaauauguuggagacaaucaaagugucaccucagacaauggauggcauccucaaauccauuuuaaaggucaaaaaggcucuugggauguucauuucagacaccccuggugagaggaaucccuacgaaaacauacucuacaagauuuguuugucaggggauggauggccauauauugcaucaagaaccucaauaacaggaagggccugggaaaacacugucguugaucuagaaucagaugggaagccacagaaagcuggcaacaacaauuccaacaaaucccugcagucggcaggguuuaccgcugggcuuacuuauucucagcucaugacccucaaggaugcaauguugcaacuugauccaaaugcuaagaccuggauggacauugaaggaagaccugaagacccaguggaaauugcucucuaucagccaaguucaggcugcuacauacacuucuuccgugaaccuacugauuuaaagcaguucaagcaagaugcuaaauacucacaugggauugaugucacagaccucuuugcugcacaaccgggcuuaaccagugcugucauagaugcacucccccggaauauggucaucaccugucagggguccgaugauauaaggaaacuccuugaaucacaaggaagaaaggacaucaaauuaauugacauugcccuuagcaaaacugauuccaggaaguaugagaaugcagucugggaucaguauaaagacuugugccacaugcacacaggugucguuguugaaaagaagaaaagaggcgguaaagaggaaauaaccccucacugugcacuaauggacugcaucauguuugaugcagcagugucaggaggacugaacucauugguuuugagagcagugcugcccagagacaugguauucagaacaucaacaccuagagucguccuguaa

SEQ ID NO: 7959 - RNA, 1710 nt, Artificial Sequence
  derived and/or modified CDS sequence (wt) from LASV(G1647-SLE-2011;Clade IV)__AIT17197__NP
augagugccucaaaggaaauaaaauccuuuuuguggacacaauccuugaggagggaauuaucugguuacugcuccaacaucaaacugcagguggugaaagaugcccaggcucuuuuacauggacuugacuucucugaagucaguaauguucaacgguugaugcgcaaggagagaagggaugacaaugacuugaaacgguuaagggacuugaaucaagcggucaacaaucuuguugaauuaaaaucaacucaacaaaagaguauacugagaguugggacucuaaccucagaugacuuauuaaucuuggccgcugaucuagagaaguugaagucgaaggugaucagaacagagaggccauugagugcaggugucuauaugggcaaccuaagcuuacagcaacuugaccaaagaagggcucuucugaauaugauaggaaugaguggcaguaaucaggggguucgggcugggagagauggaguggucagaguuugggaugugaaaaaugcagaguugcucaauaaucaguucgggaccaugccaagucugacacuggcaugucugacaaaacaggggcagguugacuugaaugaugcaguacaagcauugacagauuuagguuugaucuacacagcgaaguaucccaauacuucagacuuagacaggcugacucaaagucaccccauccuaaauaugauugacaccaaaaaaagcucuuugaacaucucagguuauaauuuuagcuugggugcagcugugaaggcaggagcuuguaugcuggaugguggcaauauguuggagacaaucaaggugucaccucagacaauggauggcauucucaaguccauuuuaaaggucaagaaggcucuugggauguucauuucagauaccccuggugaaaggaauccuuaugaaaacauacucuacaaaauuuguuugucaggagauggcuggccauacauugcaucaagaaccucaauaacaggaagggccugggaaaacacuguuguugaucuggaaucagaugggaagccacagaaagcuggcagcaacgguuccaauaaaucucugcagucggcaggauuuaccgcugggcuuaccuauucucagcugaugacccucaaggaugcaaugcugcaacuugacccaaaugcuaagaccuggauggauauugaaggaagaccugaagauccaguggaaaucgcccucuaucaaccaaguucaggaugcuacauacacuucuuccgugaaccuacugauuuaaagcaguucaagcaggaugccaaguacucacaugggauugaugucacggaccucuuugcugcacaaccgggcuugaccagugcagucauugaugcacucccccgaaacauggucaucacuugccaggggucugaugacauaaggaaacuccuugaaucacaaggaaggaaagacaucaagcuaauugacauugcccucagcaagacugauuccaggaaguaugaaaaugcagucugggaucaguauaaagacuuaugccacaugcacacagguauuguuguugagaagaagaaaagaggcgguaaagaggaaauaacuccucacugugcacuaauggacugcaucauguuugaugcagcagugucaggaggacugaacacaucgguuuugagagcagugcugcccagagauaugguguucagaacaucaacaccuagagucguccuguaa

SEQ ID NO: 7960 - RNA, 1710 nt, Artificial Sequence
  derived and/or modified CDS sequence (wt) from LASV(G1727-SLE-2011;Clade IV)__AIT17201__NP
augagugccucaaaggaaauaaaauccuuuuuguggacacaaucuuugaggagggaauuaucugguuacugcuccaacaucaagcugcagguggugaaggaugcccaggcucuuuuacaugggcuugacuucucugaagucaguaauguucaacgguugaugcgcaaggagagaagggaugacaaugauuugaaacgguugagggaccuaaaucaagcagucaacaaucuuguugaauuaaagucaacucaacaaaagaguauacugagaguugggacucuaaccucagaugacuuauuaaucuuggcugcugaucuagagaaguugaagucgaaggugaccagaacagaaaggccauugagugcaggugucuauaugggcaaccuaagcucacagcaacuugaucaaagaagagcucuucugaacaugauaggaaugagugguaguaaucaaggggcucgggcugggagagaugggguggucagaguaugggaugugaaaaaugcagaguugcucaauaaucaguucgggaccaugccaagucugacacuggcaugucugacaaaacaggggcagguugacuugaaugaugcaguacaagcauugacagauuuagguuugaucuacacagcgaaguaccccaauacuucagacuuagacaggcugacucaaagucaccccauccuaaauaugauugacaccaagaaaagcuccuugaacaucucagguuauaauuuuagcuugggugcagcugugaaggcaggagcuuguaugcuggaugguggcaauauguuggagacaaucaaggugucaccucagacaauggaugguauucucaaauccauuuuaaaggucaagaaggcucuugggauguucauuucagaugccccuggugaaaggaauccuuaugaaaacauacucuacaagauuuguuugucaggagacggauggccauacauugcaucaagaaccucaauaacaggaagggccugggaaaacacuguuguugaucuggaaucagaugggaagccacagaaagcuggcaguaacgguuccaauaaaucucugcagucggcaggauuuaccgcugggcucaccuauucucagcugaugacccucaaggaugcaaugcugcaacuugacccaaaugcuaagaccuggauggauauugaaggaagaccugaagauccaguggaaaucgcccucuaucaaccaaguucagggugcuacauacacuucuuccgugaaccuacugauuuaaagcaguucaagcaggaugcuaaguacucacaugggauugaugucacggaccucuucgcugcacaaccgggcuugaccagugcugucauugaugcacucccccggaauauggucaucaccugccaggggucugaugacauaaagaaacucuuugaaucacaaggaagaaaagacauuaaacuaauugacauugcccucagcaagacugauuccaggaaguaugaaaaugcagucugggaucaguauaaagacuuaugccacaugcauacagguauuguuguugagaagaagaaaagaggcgguaaagaggagauaaccccucacugugcacuaauggacugcaucauguuugaugcagcaguaucaggaggacugaacacaucaguuuugagagcagugcugcccagagacaugguguucagaacaucgacaccuagggucguccuguaa

SEQ ID NO: 7961 - RNA, 1710 nt, Artificial Sequence
  derived and/or modified CDS sequence (wt) from LASV(G1774-SLE-2011;Clade IV)__AIT17205__NP
augagugccucaaaggaaauaaaauccuuuuuguggacacaauccuugaggagggaacuauccgguuacugcuccaacaucaaacuacagguggugaaagaugcccaggcucuuuuacauggacuugacuucucugaagucaguaauguucaacgguugaugcgcaaggagagaagggaugacaaugauuugaaacgguugagggaucuaaaucaagcggucaacaaucuuguugaauuaaagucaacccaacaaaagaguauacugagaguugggacucuaaccucagaugacuuguuaaucuuggccgcugaucuagagaaguugaagucaaaggugaccagaacagaaaggccauugagugcaggugucuauaugggcaaccuaagcucacagcaacuugaccaaagaaaagcucuucugaacaugauaggaaugagugguaguaaucaaggggcucggauugggagagauggggugguuagaguuugggaugugaaaaaugcagaauugcucaauaaucaguucgggaccaugccaaguuugacacuggcaugucugacaaaacaggggcagguugacuugaaugaugcaguacaagcauugacagauuuagguuuaaucuacacagcgaaguauccuaacacuucagacuuagacaggcugacucaaagucaccccauccuaaauaugauugacaccaagaagagcucuuugaauaucucagguuauaauuuuagcuugggugcagcugugaaagcaggagcuugcaugcuggaugguggcaauauguuggagacaaucaaggugucaccucagacaauggaugguauucucaaauccauuuuaaagguuaagaaggcucuugggauguucauuucagauaccccuggugaaaggaauccuuaugaaaacauacucuacaagauuuguuugucaggagauggauggccauacauugcaucaagaaccucaauaacaggaagggccugggaaaacacugucguugaucuggaaucagaugggaagccacaaaaagcuggcagcaacaguuccaauaaaucucugcagucggcaggguuaaccgcuggacuuaccuauucucagcugaugacccucaaggaugcaaugcugcaacuugacccaaaugcuaagaccuggauggacauugaaggaagaccugaagauccaguggaaaucgcccucuaucaaccaaguucaggaugcuacauacacuucuuccgugaaccuacugauuuaaagcaguucaagcaggacgcuaaguacucacaugggauugauguuacggaccucuucgcugcacaaccgggccugaccagugcugucauugaugcacucccccguaauuuggucauuaccugccaggggucugaugacauaaggaaacuccuugaaucacaaggaagaaaagacaucaaacuaauugacauugcccucagcaaaacugauuccaggaaguaugaaaaugcagucugggaccaguauaaagacuugugccacaugcacacagguauuguuguugagaagaagaaaagaggcgguaaagaggaaauaaccccucacugugcacuaauggacuguaucauguuugaugcagcagugucaggaggacugaacgcaucaguuuugagagcagugcugcccagagauaugguguucagaacaucgacaccuagagucguccuguaa

SEQ ID NO: 7962 - RNA, 1710 nt, Artificial Sequence
  derived and/or modified CDS sequence (wt) from LASV(G1792-SLE-2011;Clade IV)__AIT17209__NP
augagugccucaaaggaaauaaaguccuuucuguggacacaaucauugagaagggaacuaucugguuacugcuccaacaucaaacuacagguugugaaagaugcccaagcucuuuuacauggacuugauuucuccgaagucagcaauguucaacggcugaugcgcaaggagagaagggaugacaaugaucugaaacgguugagggaccuaaaucaagcggucaacaaccuuguugaguuaaaaucaacucaacaaaagaguauacugagaguugggacucuaacaucagaugacuuauuaaucuuagccgcugaucuagagaaguugaaaucaaaggugaccaggacagaaaggccauugagugcaggugucuauaugggcaaccugagcucacagcaacuugaccagagacgagcucuucugaguaugauaggaaugaguggugguaaucaaggggcucgggcugggagagauggaguggugagaguuugggaugugaaaaaugcagaguugcuuaacaaucaguucgggaccaugccaaguuugacacuggcaugucugacaaagcaggggcagguugaccugaaugauguagugcaagcauugacagauuugggucugaucuacacagcuaaguaucccaauacuucagacuuagauaggcugacucagagucaccccauccuaaacaugauugacaccaagaaaagcucucugaauaucucaggcuauaauuucagccugggugcagcugugaaggcaggagcuugcaugcuagauggcggcaacaugcuagagacaauuaaggugucaccucagacgauggacggcauccucaaauccaucuuaaaggucaagaaggcucuugggauguucaucucagacaccccuggugaaaggaauccuuaugaaaacauacucuacaagaucuguuugucaggagauggauggccauauauugcaucaagaaccucaauaacaggaagggccugggaaaacacugucguugaucuggaaucagaugggaagcuacagaaaacuggcagcaacaauuccaacaaauccuugcagucggcaggguuuaccgcugggcuuaccuauucucagcuaaugacccucaaggaugcaauguugcaacuugacccaaaugccaagaucuggauggacauugaaggaagaccugaagauccaguggagauugcccucuaucaaccaaguucaggcugcuacauacacuucuuccgugagccuacugacuuaaagcaguucaagcaggaugcuaaguacucacaugggauugauguuacggaccucuucgcugcacagccggguuugaccagugcugucauugaugcacucccccggaauauggucauuaccugucagggguccgaugacauaaggaaacuccuugaaucacaagguagaaaagacaucaaacuaauugauauugcccucaacaaaacugauuccaggaaguaugaaaaugcagucugggaucaguauaaggacuuaugccacaugcacacaggugucguuguugaaaagaagaaaaagggcggcaaagaggaaauaaccccucacugugcacuaauggacugcaucauguuugaugcagcagugucaggaggacugaacacaucgguuuugagagcagugcugccuagagauaugguguucagaacaucgacaccuagagucguccuguaa

SEQ ID NO: 7963 - RNA, 1710 nt, Artificial Sequence
  derived and/or modified CDS sequence (wt) from LASV(G1897-SLE-2011;Clade IV)__AIT17211__NP
augagugccucaaaggaaauaaaauccuuuuuguggacacaauccuugaggagggaauuaucugguuacugcuccaacaucaaacuacagguggugaaagaugcccaggcucuuuuacauggacuugacuucucugaagucaguaauguucaacgauugaugcguaaagagagaagggaugacaaugauuugaaacgguugagggaccuaaaucaagcggucaacaaucuuguugaauuaaaaucaacucaacaaaagaguauacuaagaguugggacucuaaccucagaugacuuauugaucuuagccgcugaucuagagaaguugaagucaaaggugaccagaacagaaaggccacugagugcaggugucuauaugggcaacuuaagcucacagcagcuugaccaaagaagagcucuucugaacaugauaggaaugaguggugguaaucaaggggcucaggcugggagagauggaguaguuagagucugggaugugaaaaaugcagaguugcucaauaaucaguuugggaccaugccaagucugacacuggcaugucugacaaaacaggggcaaguugacuugaaugaugcaguacaagcauugacagauuuagguuugaucuacacagcgaaguaucccaauacuucagacuuagauaggcugacucaaagucaccccauccugaauaugauugacaccaagaagagcucuuugaauaucucagguuauaauuuuagcuugggugcagcugugaaggcaggagcuuguaugcuggaugguggcaacauguuggagacaaucaaggugucaccucagacaauggaugguauucucaaauccauuuuaaaggucaagaaggcucuugggauguucauuucagauaccccuggugaaaggaauccuuaugagaacauacucuacaagauuuguuugucaggagauggauggccauacauugcaucaagaaccucaauaacaggaagggccugggaaaacacugucguugauuuggaaucagaugggaagccacagaaagcuaacagcaacaguuccaauaaaucucugcagucggcaggguuuacugcugggcuuaccuauucucaguugaugacccucaaggaugcaaugcugcaacuugacccaaaugcuaagaccuggauggacauugaaggaagaccugaagauccaguggaaaucgcccucuaucaaccaaguucaggaugcuacauucacuucuuccgugaaccuacugaccuaaagcaguucaagcaggaugcuaaguacucacaugggauugaugucacggaccucuucgcugcacaaccggguuugaccagugcugucauugaugcacucccccggaauauggucaucaccugucaggggucugaugacauaaggaagcuccuugaaucacaaggaagaaaggacauuaaacuaauugacauugcccucagcaaaacugauuccaggaaguaugaaaaugcagucugggaucaguauaaagacuuaugccacaugcacacagguauuguuguugagaagaagaagagaggugguaaagaggaaauaaccccucacugugcacuaauggacugcaucauguuugaugcagcagugucaggaggacugaacacaucaguuuugagagcagugcugcccagagauaugguguucagaacaucgacaccuagagucguccuguaa

SEQ ID NO: 7964 - RNA, 1710 nt, Artificial Sequence
  derived and/or modified CDS sequence (wt) from LASV(G1932-SLE-2011;Clade IV)__AIT17213__NP
augagugccucaaaggaaauaaaauccuuuuuguggacacaauccuugaggagggaauuagcugguuacugcuccaacaucaaacugcagguggugaaagaugcccaggcucuuuuacauggacuugacuucucugaagucaguaauguucaacgguugaugcgcaaggagagaagggaugacaaugauuugaaacgguuaagggacuugaaucaagcagucaacaaucuuguugaauuaaaaucaacucaacaaaagaguguacugaggguugggacucuaaccucagaugacuuauuaauccuggccgcugaucuagagaaguugaagucgaaggugaucagaacagagaggccauugagugcaggugucuauaugggcaaccuaagcucacagcaacuugaccaaagaagggcucuucugaauaugauaggaaugaguggcaguaaucaagggguucgggcugggagggauggaguggucagaguuugggaugugaaaaaugcagaguugcucaauaaucaguucgggaccaugccaagucugacacuggcaugucugacaaaacaggggcagguugacuugaaugaugcaguacaagcauugacagaucuagguuugaucuacacagcgaaguaucccaauacuucagacuuagacaggcugacucaaagccaccccauccuaaauaugauugacacuaagaaaagcucuuugaacaucucagguuauaauuuuagcuugggugcagcugugaaggcaggggcuuguaugcuggaugguggcaauauguuggagacaaucaaggugucaccucagacaauggaugguauucucaaguccauuuuaaaggucaagaaggcucuugggauguucauuucagauaccccuggugaaaggaauccuuaugaaaacauacucuacaagauuuguuugucaggagauggcuggccauacauugcaucaagaaccucaauaacaggaagggcuugggaaaacacuguuguugaucuggaaucagaugggaagccacagaaagcuggcagcaacgguuccaacaaaucucugcagucggcaggauuuaccgcugggcuuacuuauucucagcugaugacccucaaggaugcaaugcugcaacuugacccaaaugcuaagaccuggauggauauugaaggaagaccugaagauccaguggaaaucgcccucuaucaaccaaguucaggaugcuacauacacuucuuccgugaaccuacugauuuaaagcaguucaagcaggaugccaaguacucacaugggauugaugucacggaccucuuugcugcacaaccgggcuugaccagugcagucauugaugcacucccccgaaauauggucaucaccugccaggggucugaugacauaaggaaacuccuugaaucacaaggaaggaaagacaucaaacuaauugacauugcccucagcaagacugauuccaggaaguaugaaaaugcagucugggaucaguauaaagacuuaugccacaugcacacagguauuguuguugagaagaagaaaagaggcgguaaagaggaaauaacuccucacugugcacuaauggacugcaucauguuugaugcagcagugucaggaggacugaacacaucgguuuugagagcagugcugcccagagauaugguguucagaacaucgacaccuagagucguccuguaa

SEQ ID NO: 7965 - RNA, 1710 nt, Artificial Sequence
  derived and/or modified CDS sequence (wt) from LASV(G1959-SLE-2011;Clade IV)__AIT17217__NP
augagugccucaaaggaaauaaaguccuuucuguggacacagucauugaggagggaauugucugguuauugcucuaacaucaaacuacagguggugaaagaugcgcaagcucuuuuacauggacuugacuucuccgaagucaguaauguucaacgguugaugcgcaaggagagaagggaugacaaugauuuaaaacgguugagggaccuaaaucaagcugucaacaaccuuguugaguuaaaaucaacucaacaaaaaaguauacugagaguugggacccuaaccucagaugacuuauuaauuuuagcugcugaucuagagaaguugaaaucaaaggugaccaggacagaaaggccauugagugcaggugucuauaugggcaaccugagcucacagcaacuugaccaaagacgagcucuucugaguaugauaggaaugaguagugguguucaaggggcucgggcugggagagauggaguggugagaguuugggauguaaaaaaugcagaguugcuuaauaaucaguucggaaccaugccgagucugacacuagcauguuugacaaaacaggggcagguugacuugaaugacguagugcaagcacugacagauuugggucuaaucuacacagcaaaguauccaaauacuucagauuuagauaggcugacucaaagucaccccauccugaacaugauugacaccaagaaaagcucucugaauaucucagguuauaauuuuagcuugggugcagcugugaaggcaggagcuugcaugcuggacgguggcaacauguuggagacaauuaaggugucaccucagacaauggauggcauccucaaguccaucuuaaaggucaagaaagcucuugggauguucaucucagagaccccuggugaaaggaacccuuaugagaacauacucuacaagauuugcuuaucaggagauggauggccauauauugcaucaagaaccucaauaacaggaagggcuugggaaaacacugucguugauuuggaaucagaugggaagccacagaaagcuggcagcaacaacuccaauaaaucccugcagucuacaggguuugcugcugggcuuaccuauucucagcugaugacccucaaagacgcaaugcugcaacuugacccaaaugcuaagaccuggauggacauugaaggaagaccugaagauccaguggagguugcccucuaucaaccaaguucaggcugcuacauacacuucuuccgugaacccacugauuuaaagcaguucaagcaggaugcuaaguacucacaugggauugauguuacagaccucuucgcugcgcaaccgggcuugaccagugcugucauagaugcacuuccccgaaauauggucauuaccugucaggggucugaugacauaaagaaacuccuugaaucacaagguagaaaagacaucaagcuaauugacauugcccucaguaaaacugauuccaggaaguaugaaaaugcagucugggaucaauauaaagacuuaugccacaugcacacagguguugucguugaaaagaagaaaagaggcgguaaagaggaaauaaccccucacugugcacuaauggacugcaucauguuugaugcagcaguaucaggaggacugaacacaucggucuugagagcagugcugcccagagauaugguguucagaacaucgacaccuagagucguccuguaa

SEQ ID NO: 7966 - RNA, 1710 nt, Artificial Sequence
  derived and/or modified CDS sequence (wt) from LASV(G2141-SLE-2011;Clade IV)__AIT17225__NP
augagugccucaaaggagauaaaguccuuccuguggacacaaucuuugaggagagaauugucugguuauugcuccaacaucaaacugcaaguggugaaggaugcucaagcucuucuacaugggcuugacuucucugaggucagcaauguccagcggcuaaugcgcaaacagagaagagacgauaaugauuugaagcgguugagggaucuaaaucaagcaguaaacaaccuuguugaguugaagucaacucaacaaaagagugugcugagaguugggacucugacuucagaugaccuauugguucuagcugcagacuuagagaagcuaaaaucaaaaguaacuagaacagaaaggccauugagcgcaggagucuacauggguaaccuaagcucgcaacaacuugaccagagacgagcucuccugaauaugauaggaaugaguggugguaaucagggggcccgggccgggaaugacggaguugugagaguuugggauguaaaaaaugcagacuuacuuaauaaccaguucggcaccaugccaagucugacacuggcauguuugacaaagcaagggcagguugaccuaaaugauguagugcaggcauuaacagaucugggucugaucuacacagcaaaguaccccaacacuucagacuuagacaggcuaacucagagccaccccauucugaacaugauagacaccaagaagagcuccuugaacaucucagguuacaauuuuagcuugggugccgcugugaaagcaggagccuguaugcuagauggugguaacauguuagaaacaaucaaggugucaccccagacaauggauggcauccuuaagucaauucuaaaaguuaaaaaggcucuagggauguucauuucagacaccccuggcgaaaggaauccuuaugaaaacauacucuacaagauuuguuugucaggggacggauggccauacauugcaucgaggacuucaauaacagggagggcuugggaaaacaccgucguugauuuagaaucagaugggaagccacagaaaacugggaacaacaguuccaauaaaucccuacagucggcaggguucacugcuggacucaccuauucucagcuuaugacccucaaagaugcaaugcugcaacuugauccaaaugcuaagaccuggauggacauugaagggagaccugaagauccgguggaaguugcccucuaucagccaaguucaggcugcuacauccauuucuuccgcgaaccuacugauuugaagcaguucaagcaggaugccaaguacucacauggaauugaugucacagaccucuuugcugcacagccaggcuugaccagugcugucauagaagcacuuccccggaacaugguuaucacuugucagggaucugacgauauaaggaaacuccuugaaucacaggggagaaaagacauuaaacuaauugacauugcccucagcaagauugauuccagaaaguaugaaaaugcaguuugggaucaauauaaggaccugugccacaugcacacgggugucguuguugaaaagaagaaaagagguggcaaagaggaaauaaccccucacugugcuuuaauggacugcaucauguuugaugcagcagugucaggaggauugaacacgcuaguucugagagcaguguugcccagagacaugguguuuagaacaucaacaccuaaggucguccuguaa

SEQ ID NO: 7967 - RNA, 1710 nt, Artificial Sequence
  derived and/or modified CDS sequence (wt) from LASV(G2147-SLE-2011;Clade IV)__AIT17229__NP
augagugccucaaaggaaauaaaguccuucuuguggacacaaucauugaggagggaauuaucugguuacugcuccaacaucaaacuacagguggugaaagaugcccaggcucuuuuacauggacuugacuucucugaagucaguaauguucaacgcuugaugcgcaaggagagaagggaugacaaugauuugaaacgauugagggaccuaaaucaagcggucaacaaccuuguugaguuaaaaucaacucaacaaaagaguguacugagaguugggacucuaaccucagaugacuuauuaaucuuagccgcugaucuagagaaguugaaaucaaaggugaucaggacagaaaggccauugagugcaggugucuauaugggcaacuugagcucacagcaacuugaccaaagacgagcucuucugagcaugauaggaaugaguggugguaaucaagggacucgggcugggagagauggaguggugagaguuugggauguaaaaaaugcagaguugcuuaacaaucaguucgggaccaugccaagucuaacacuggcaugucugacaaaacaggggcagguugacuugaaugaugcagugcaagcacugacagauuugggucuaaucuacacagcaaaguaucccaacacuucagacuuagauaggcugacucaaagucaccccaucuuaaacaugauugacaccaagaaaaguuccuugaauaucuccgguuauaacuuuagcuugggugcagcugugaaggcaggagcuugcaugcuggaugguggcaauauguuggagacaaucaaggugucaccucagacaauggauggcauccucaaauccaucuugaaggucaagaaggcucuugggauguucauaucagacaccccuggugaaaggaauccuuaugaaaacauacucuacaaaauuuguuugucaggagauggauggccauauauugcaucaaggaccucaauaacaggaagagccugggaaaacacugucguugacuuggaaucagaugggaagccacagaaagcuggcagcaacaacuccaauaaaucccuacagucggcaggguuuaccgcugggcuuaccuacucucagcugaugacccucaaggaugcgaugcugcaacuugacccaaacgcuaagacuuggauggacaucgaaggaaggccugaagauccgguggaaauugcccucuaucaaccaaguucaggcugcuacauacacuuuuuccgcgaaccuacugauuuaaagcaguucaagcaggaugcuaaguacucacaugggauugauguuacagaccucuucgcugcacaaccgggcuugaccagugcugucauagaugcacucccccggaauauggucauuaccugucaggggucugaugacauaaggaaacuccuugaaucacaaggcagaaaagacaucaaacuaauugacauugcccucagcaaagcugauuccaggaaguaugaaaaugcagucugggaucaguauaaagacuuaugccacaugcacacagguguugugguugaaaagaagaaaagaggcgguaaagaggaaauaaccccucauugugcacuaauggauugcauuauguuugaugcagcagucucaggaggacugaacacaucuguuuuaagagcagugcugccuagagacaugguauuuagaacaucaacaccuagagucguccuguaa

SEQ ID NO: 7968 - RNA, 1710 nt, Artificial Sequence
  derived and/or modified CDS sequence (wt) from LASV(G2165-SLE-2011;Clade IV)__AIT17233__NP
augagugcuucaaaggaaguaaaguccuuucuguggacacaaucauuaaggagggaauuaucugguuacuguuccaacaucaaacuacagguggugaaagaugcccaggcucuuuugcauggacuugacuucuccgaaguuagcaauguucaacgguugaugcgcaaggagagaagggaugacaaugauuuaaagcgguugagggaccuuaaucaagcggucaacaaucuuguugaguuaaaaucaacucaacaaaagaguauauugagaguugggaccuuaaccucagaugacuuauuagucuuagcugcugaucuagagaagcugaaaucaaaggugacuaggacagaaaggccauugagugcaggugucuacauggguaaccugagcucacagcagcuugaccagagacgagcucuucugagcaugauagggaugaguggugguaaucaaggggcucaggcugggagagauggaguggugagaguuugggaugugaaaaaugcagagcugcucaauaaucaguuugggaccaugccaagucuuacacuggcaugucugacaaaacagggacagguugacuugaaugaugcagugcaagcauugacagauuugggucugaucuacacggcaaaguaucccaauacuucagauuuggauaggcugacucaaagucaccccauccuaaacaugauugauaccaagaagagcucuuuaaacaucucagguuauaauuuuagcuugggugcagcugugaaggcaggagcuugcaugcuggaugguggcaacauguuggagacaaucaaggugucaccucagacaauggaugguauccucaaauccaucuugaaggucaagaaggcucuugggauguucaucucagacaccccuggugaaaggaauccuuaugaaaacauacucuacaagauuugccugucaggagacggguggccauacauugcaucaaggaccucaauaacaggaagggccugggaaaauacugucguugaucuggaaucagaugggaagccacagaaagcuggcagcaacaauuccaacaaaucucugcagucggcaggguuuacugcugggcuuaccuauucucagcugaugacccucaaggaugcaaugcugcaacuugauccaaaugcuaagaccuggauggauauugaaggaagaccugaagauccaguggaaguugcccucuaucaaccaaguucaggcuguuacauucacuucuuccgugaaccuacugauuugaagcaguucaaacaggacgcuaaguacucacaugggauugaugucacagaccucuucgcugcacaaccgggccugaccagugcugucauagaugcacucccucggaauaugguuauuaccugucagggguccgaugacauaagaaaacuccuugaaucacaagguaggaaagacaucaaacuaauugauauugcccucagcaaaacugauuccaggaaguaugaaaaugcagucugggaucaauauaaagacuuaugccacaugcacacaggugucguuguugagaagaagaaaaggggcgguaaagaggaaauaaccccucacugugcacuaauggacugcaucauguuugacgcagcagugucaggaggacugaacacaucgguuuugagagcagugcugcccagggauaugguguucagaacaucaacaccuagagucguccuguaa

SEQ ID NO: 7969 - RNA, 1710 nt, Artificial Sequence
  derived and/or modified CDS sequence (wt) from LASV(G2184-SLE-2011;Clade IV)__AIT17237__NP
augagugcuucaaaggaaauaaaguccuuucuguggacacaaucauuaaggagggaauuaucugguuacuguuccaacaucaaacuacagguggugaaagaugcccaggcucuuuugcaugggcuugacuucuccgaagucagcaauguucaacgguugaugcgcaaggagagaagggaugacaaugauuuaaagcgguugagggaccuuaaucaagcggucaacaaccuuguugaguuaaaaucaacucaacaaaagaguauauugagaguugggaccuuaaccucagaugacuuauugaucuuagcugcugaucuagagaagcugaaaucaaaggugacuaggacagaaaggccauugagugcaggugucuacauggguaaccugagcucacagcaacuugaccagagacgagcucuucugagcaugauagggaugaguggugguaaucaaggggcucgggcugggagagauggaguggugagaguuugggaugugaaaaaugcagaguugcucaauaaucaguucgggaccaugccaagucuuacacuggcauguuugacaaaacagggacagguugacuugaaugaugcagugcaagcauugacagauuugggucugaucuacacggcaaaguaucccaauacuucagacuuggauaggcugacucaaagucaccccauccuaaacaugauugacaccaagaagagcucuuuaaacaucucagguuauaauuuuagcuugggugcagcugugaaggcaggagcuugcaugcuggaugguggcaacauguuggagacaaucaaggugucaccucagacaauggaugguauccucaaauccaucuugaaggucaagaaggcucucgggauguucaucucagacaccccuggugaaaggaauccuuaugaaaacauacucuacaagauuugucugucaggagauggguggccauacauugcaucaaggaccucaauaacaggaagggccugggaaaacacugucguugaucuggaaucagaugggaagccacagaaagcuggcagcaacaauuccaacaaaucccugcagucggcaggguuuaccgcugggcuuaccuauucucagcuaaugacucucaaggaugcaaugcugcaacuugauccaaaugcuaagaccuggauggauauugaaggaagaccugaagauccaguggaaguugcccucuaucaaccaaguucaggcuguuacauucacuucuuccgugaaccuacugauuuaaagcaguucaaacaggaugcuaaguacucacaugggauugaugucacagaccucuucgcugcacaaccgggccugaccagugcugucauagaugcacucccucggaauauggucauuaccugucagggguccgaugacauaaggaaacuccuugaaucacaagguaggaaagacaucaaacuaauugacauugcccucagcaaaacugauuccaggaaguaugagaaugcagucugggaucaguauaaagacuuaugccacaugcacacaggugucguuguugagaagaagaaaagaggugguaaagaggaaauaaccccucacugugcacuaauggacugcaucauguuugacgcagcagugucaggaggacugaacacaucaguuuugagagcagugcugcccagggauaugguguucaggacaucaacaccuagagucguucuguaa

SEQ ID NO: 7970 - RNA, 1710 nt, Artificial Sequence
  derived and/or modified CDS sequence (wt) from LASV(G2197-SLE-2011;Clade IV)__AIT17241__NP
augagugccucaaaggaaauaaaguccuuuuuguggacacagucauugaggagggaauuaucugguuacugcucuaacaucaaauuacagguggugaaagaugcccaagcucuuuuacauggacuugacuucuccgaagucaguaauguucaacgacugaugcgcaaggagagaagggaugauaaugauuugaaacgacugagggaccuaaaucaagcggucaauaaccuuguugaguuaaaaucaacucaacaaaagaguauacugagaguugggacucuaacaucagaugauuuauuaaucuuagccgcugaucuagagaaguugaaaucaaaggugaccaggacagaaaggccauugagugcaggugucuauaugggcaaccugagcucacagcaacuugaccaaagacgagcucuucugaguaugauaggaaugaguggugguaaucaaggggcucgggcuggaagagauggaguggugagaguuugggauguaaaaaaugcagaguugcuuaacaaucaguucgggaccaugccaagucugacacuagcaugucugacaaagcaggggcagguugacuugaaugaugcggugcaagcauugacagauuugggucugaucuacacagcaaaguaucccaacacuucagacuuagauaggcugacucaaagucaccccauccuaaacaugauugacaccaagaaaagcucuuugaacaucucagguuacaauuuuagccugggugcagcugugaaggcaggagcuugcaugcuggaugguggcaauauguuggagacaaucaaggugucaccucagacgauggacgguauccucaaauccaucuuaaaggucaagaaggcucuugggauguucaucucagacaccccuggugaaaggaauccuuaugaaaacauacucuauaagauuuguuugucaggagacggauggccauauauugcaucaagaacuucaauaacaggaagggcuugggaaaacacugucguugaucuggaaucagaugggaagccacagaaagcuggcagcaacaauuccaauaaauccuugcagucggcaggguucaccgcugggcuuaccuauucucagcuaaugacccucaaggaugcaauguugcaacuugacccaaaugcuaagaccuggauggacauugaaggaagaccugaagauccaguggaaauugcccuuuaucaaccaaguucaggcugcuacauacacuucuuccgugaaccuacugauuuaaagcaguucaagcaggaugcuaaguauucacaugggauugauguuacagaccucuucgcugcacaaccgggcuugaccagugcugucauugaugcacucccccggaauauggucauuaccugucagggguccgaugacauacggaaacucuuugaaucgcaagguaggaaagacaucaaacugauugauauugcccuuagcaaaacugauuccaggaaguaugaaaaugcaguuugggaucaguauaaggacuuaugccacaugcacacaggugucguuguugaaaagaagaaaagaggcggaaaagaggaaauaaccccucacugugcacuaauggacugcaucauguuugaugcagcagugucagggggacugaacacaucgguucugagagcagugcugccuagagauaugguguucaggacaucgacaccuagagucguccuguaa

SEQ ID NO: 7971 - RNA, 1710 nt, Artificial Sequence
  derived and/or modified CDS sequence (wt) from LASV(G2222-SLE-2011;Clade IV)__AIT17245__NP
augagugccucaaaggaaauaaaguccuuuuuguggacacaauccuugaggagggaacuauccgguuacugcuccaacaucaaacuacagguggugaaagaugcccaggcucuuuuacauggacuugacuucucugaagucaguaauguucaacgguugaugcgcaaggagaggagggaugacaaugauuugaaacgguugagggaucuaaaucaagcggucaacaaucuuguugaauuaaagucaacucaacaaaagaguauacugagagucgggacucuaaccucagaugacuuguuaaucuuggccgcugaucuagagaaguugaagucaaaggugaccagaacagaaaggccauugagugcaggugucuauaugggcaaccuaagcucacagcaacuugaccaaagaagagcucuucugaacaugauaggaaugagugguaguaaucaaggggcucggacugggagagauggggugguuagaguuugggaugugaaaaaugcagaauugcucaauaaucaguucgggaccaugccaaguuugacacuagcaugucugacaaaacaggggcagguugacuugaaugaugcaguacaagcauugacagauuuagguuuaauuuacacagcgaaguauccuaacacuucagacuuagacagguugacucaaagucaccccauccuaaauaugauugacaccaagaagagcucuuugaauaucucagguuauaauuuuagcuugggugcagcugugaaggcaggagcuugcaugcuggaugguggcaauauguuggagacaaucaaggugucaccucagacaauggaugguauucucaaauccauuuuaaagguuaagaaggcucuugggauguuuauuucagauaccccuggugaaaggaauccuuaugaaaacauacucuacaagauuuguuugucaggagauggauggccauacauugcaucaagaaccucaauaacaggaagggccugggaaaacacugucguugaucuggaaucagaugggaagccacaaaaagcuggcagcaacaauuccaauaaaucucugcagucggcaggguuaaccgcugggcuuaccuauucucagcugaugacccucaaggaugcaaugcugcaacuugacccaaaugcuaagaccuggauggacauugaaggaagaccugaagauccaguggaaaucgcucucuaucaaccaaguucaggaugcuacauacacuucuuccgugaaccuacugauuuaaagcaguucaagcaggaugcuaaguacucacaugggauugauguugcggaccucuucgcugcacaaccgggucugaccagugcuguuauugaugcacucccccgaaauuuggucauuaccugccaggggucugaugacauaaggaaacuccuugaaucacaaggaagaaaagacaucaaacuuauugacauugcccuuagcaaaacugauuccaggaaguaugaaaaugcagucugggaccaguauaaagacuuaugccacaugcacacagguauuguuguugagaagaagaaaagaggcgguaaagaggaaauaaccccucacugugcacuaauggacugcaucauguuugaugcagcagugucaggaggacugaacgcaucaguuuugagagcagugcugcccagagauaugguguucagaacaucgacaccuagagucgucuuguaa

SEQ ID NO: 7972 - RNA, 1710 nt, Artificial Sequence
  derived and/or modified CDS sequence (wt) from LASV(G2230-SLE-2012;Clade IV)__AIT17247__NP
augagugccucaaaggagauaaaguccuucuuguggacacaaucuuugaggagggaguugucugguuacugcucuaacaucaaacuacaaguggugaaagaugcccaggcucuuuuacaugggcuugacuucucugaagucagcaauguucagcgguugaugcguaaacagaggagagaugacagugaucuaaaacgauugagggauuuaaaucaagccguuaacaaucuugucgagcugaaaucaacucaacagaagaguguacugagaguugggacucuaaccucagaugacuugcuaauuuuggcugccgacuuagagaagcugaaaucaaaagugauuagaacagaaagaccacugagcucagguguuuauaugggcaaccugaguucgcaacaacuugaccaaagacgagcucuccugaauaugauaggaaugagugguggcaaucagggggcucaagucgggagagauggaguggugagaguuugggauguaaagaaugcagaucugcucaacaaucaguuuggcaccaugccaagucugacacuggcauguuuaacaaaacaagggcagguugacuugaaugauguagugcaagcacuaacagauuuaggccugaucuacacagcaaaguauccuaacacuucagacuuggacagauuggcucagagccacccuauuuuaaacaugauagacaccaaaaaaagcucccugaacaucucagguuacaauuuuagcuugggcgcagcugugaaggcaggagccugcaugcuggaugguggcaacauguuagagacaaucaaggugucaccucaaacaauggauggcauccugaaguccaucuugaaagugaaaaaggcucuugggauguucauaucugaaaccccuggcgaaaggaauccuuaugagaacauacucuacaagauuugcuugucaggggauggguggccauauauugcaucaagaaccucaauaacagggagggcuugggaaaacacuaucguugaucuggaaucggaugggaagccacagaaagcugggagcaauaauuccaauaagucccugcagucggcaggauucaccgccgggcuuaccuauucucagcucaugacccucaaagauucaaugcugcagcuugauccaaaugcuaagaccuggauggacauugagggaagaccugaggauccgguggagguugcccuuuaucaaccaaguucaggcugcuacauucacuucuuucgugagccuacugacuugaagcaguuuaagcaagaugcuaaguauucacauggaauugaugucacagaccucuucgcugcacagccagguuugaccagugcuguuauagaggcgcuuccucggaacauggucaucaccugucagggaucugaugacauucgaaagcuccuugaaucacaagggagaaaagauaucaaacuaauugacauugcucucaacaaaacugauuccaggaaguaugagaaugcagucugggaucaguacaaagauuuaugccauaugcacacaggugucguuguugagaagaagaaaagaggugguaaagaggagauaaccccucacugugcccugauggacugcaucauguuugacgcagcagugucagguggacugaaaacacugguucugagagcagugcuacccagagacaugguguucagaacaucgacaccuaaagucguccuguaa

SEQ ID NO: 7973 - RNA, 1710 nt, Artificial Sequence
  derived and/or modified CDS sequence (wt) from LASV(G2259-SLE-2012;Clade IV)__AIT17251__NP
augagugccucaaaggagauaaaguccuucuuguggacacaaucuuugaggagggaauugucugguuacugcucuaacaucaaacuacagguggugaaagaugcccaggcucuuuuacaugggcuugacuucucugaggucagcaauguucagcgguugaugcguaaacagaggagagaugacagugaucuaaaacgauugagggauuuaaaucaagccguuaacaaucuugucgagcugaaaucaacucaacagaagaguguacugagaguugggacucuaaccucagaugaccugcuaauuuuggcugccgaccuagagaagcugaaaucaaaagugauuagaacagaaagaccacugagcucagguguuuauaugggcaaccugaguucgcaacaacuugaccaaagacgagcucuccugaauaugauaggaaugagugguggcaaucagggggcucaagucgggagagauggaguggugagaguuugggauguaaagaaugcagaucugcucaacaaucaguuuggcaccaugccaagucugacacuggcauguuuaacaaaacaagggcagguugacuugaaugauguagugcaagcacuaacagauuuaggccugaucuacacagcaaaguauccuaacacuucagacuuggacagauuggcucagagccacccuauuuuaaacaugauagacaccaaaaaaagcucccugaacaucucagguuacaauuuuagcuugggcgcagcugugaaggcaggagccugcaugcuggaugguggcaacauguuagagacaaucaaggugucaccucaaacaauggauggcauccugaaguccaucuugaaagugaaaaaggcucuugggauguucauaucugaaaccccuggcgaaaggaauccuuaugagaacauacucuacaagauuugcuugucaggggauggguggccauauauugcaucaagaaccucaauaacagggagggcuugggaaaacacuauuguugaucuggaaucggaugggaagccacagaaaacugggagcaauaauuccaauaagucccugcagucggcaggauucaccgccgggcuuaccuauucucagcucaugacccucaaagauucaaugcugcagcuugauccaaaugcuaagaccuggauggacauugagggaagaccugaggauccgguggagguugcccuuuaucaaccaaguucaggcugcuacauucacuucuuucgugagccuacugacuugaagcaguuuaagcaagaugcuaaguauucacauggaauugaugucacagaccucuucgcugcacagccagguuugaccagugcuguuauagaggcgcuuccucggaacauggucaucaccugucagggaucugaugacauucgaaagcuccuugaaucacaagggagaaaggauaucaaacuaauugauauugcucucaacaaaacugauucuaggaaguaugagaaugcagucugggaucaguacaaagauuuaugccauaugcacacaggugucguuguugagaagaagaaaagaggcgguaaagaggagauaaccccucacugugcccugauggacugcaucauguuugacgcagcagugucagguggauugaaaacacugguucugagagcagugcuacccagagacaugguguucagaacaucgacacccaaagucguccuguaa

SEQ ID NO: 7974 - RNA, 1710 nt, Artificial Sequence
  derived and/or modified CDS sequence (wt) from LASV(G2263-SLE-2012;Clade IV)__AIT17255__NP
augagugccucaaaggaaauaaaguccuuccuguggacacaaucuuugaggagggaauuaucugguuacugcuccaacauuaaacuacagguggugaaagaugcccaagcucuuuugcauggacuugacuucuccgaagucagcaauguucaacgguugaugcguaaagaaagaagggacgacaacgauuugaaacgauugagggaccuaaaucaagcggucaacaaccuuguugaguugaaaucaacucaacaaaagaguguacugagaguugggacucuaaccucagaugacuuauuaguuuuagcugcugaucuagagaaguugaaaucaaaggugaccaggacagaaaggccauugagugcaggugucuauaugggcaaccuaagcucacagcaacuugaccaaagacgagcucuccugaguaugauaggaaugaguggugguaaucaaagggcucaggcugggagagacggaguggugagaguuugggauguaaaaaaugcugaguugcuuaauaaucaguuugggaccaugccaagucuaacacuggcauguuugacaaaacaagggcagguugacuugaacgaugcagugcaagcauugacagauuugggucugaucuacacaguaaaguaucccaaugcuucagacuuggauaggcugacucaaagucacccuauccuaaauaugauugauaccaagaaaagcuccuugaauaucucggguuauaauuucaguuugggugcagcugugaaagcaggagcuugcaugcuagaugguggcaacauguuagagacaaucaaggugucaccucagacaauggauggcauccuuaaguccauuuuaaaggucaagaagacucuugggauguucauuucagauacaccuggugaaaggaauccuuaugaaaacauacucuacaaaauauguuugucaggggauggauggccauauauugcaucaagaaccucaauaacaggaagggcuugggaaaauacuguuguugaucuggaaucaaaugggaagccacagaaagcugacagcaacaguuccaauaaaucucuacagucagcaggguucaccgcugggcuuaccuauucucaacucaugacccucaaggaugcaaugcuacaacuugauccaaaugcuaaaaccuggauggacauugaaggaagaccugaagauccaguggaaauugccuucuaucaaccaaguucaggcuguuacauacacuucuuccgugaaccuacugauuuaaagcaguucaagcaggaugcuaaguauucacaugggauugauguuacagaccucuucgcugcacaaccgggcuugaccagugcuguaauagaugcacucccucggaauauggucauuaccugucagggguccgaugauauaaggaagcuucuugaaucacaaggaagaaaagacauaaaacuaauugauauugcccucagcaaaacugauuccaggaaguaugaaaaugcagucugggaucaguacaaggacuuaugucacaugcacacaggugucguuguugaaaagaagaaaagaggcgguaaagaggagauaaccccucacugugcacuaauggacugcaucauguuugaugcagcagugucaggaggacugaacacauugguuuugagagcagugcuacccagagacaugguguucagaacaucgacaccuagagucguccuguaa

SEQ ID NO: 7975 - RNA, 1710 nt, Artificial Sequence
  derived and/or modified CDS sequence (wt) from LASV(G2280-SLE-2012;Clade IV)__AIT17259__NP
augagugccucaaaggaaauaaaauccuuuuuguggacacaauccuugaggagggaauugucuaguuacugcuccaacaucaaacugcagguggugaaagaugcccaggcucuuuuacacggacuugacuucucugaggucaguaauguucaacgguugaugcgcaaggagagaagggaugacaaugauuugaaacgguugagggaccuaaaucaagcggucaacaaucuuguugaauuaaagucaacucaacaaaagaguauacugagaguugggacucuaaccucagaugacuuauuaaucuuggcugcugaucuagagaaguugaagucgaaagugacuagaacagaaaggccauugagugcaggugucuauaugggcaaccugagcucacagcaacuugaccaaaggagagcucuuuugaauauguuaggaaugagugguagcaaucagggggcucgggcuggaagagauggaguggucagaguuugggaugugaaaaaugcagaguugcucaauaaucaguucgggaccaugccaagucugacacuggcaugucugacaaaacaggggcagguugacuugaaugaugcaguacaagcauugacagauuuagguuugaucuacacagcgaaguaucccaauacuucggacuuagacagacugacucaaagucaccccauccuaaauaugauugacaccaagaaaagcuccuugaauaucucagguuauaauuuuagcuugggugcagcugugaaagcaggagcuuguaugcuggaugguggcaauauguuggagacaaucaaggugucaccucagacaauggaugguauucucaaauccauuuugaaggucaagaaagcucuugggauguucauuucagauaccccuggugaaaggaacccuuacgagaacauacucuacaagauuugcuugucaggagauggcuggccauacauugcaucaagaaccucaauaacaggaagggccugggaaaacacuguuguugaucuggaaucagaugggaagccacagaaagcuggcagcaacaguuccaacaaaucucugcagucggcaggauuuaccgcugggcuuaccuauucucagcugaugacccucaaggaugcaaugcugcaacuugacccaaaugccaagaccuggauggacaucgaaggaagaccugaagauccaguagaaaucgcccucuaucaaccaaguucggggugcuacauacauuucuuccgugaaccuacugaucuaaagcaguucaagcaggaugcuaaguacucacaugggauugaugucacggaucucuucgcugcacaaccgggcuugaccagugcugucauugaugcacucccccggaauauggucaucaccugccaggggucugaugacauaaggaaacuccuugaaucacaagggagaaaggacaucaaacuaauugacauugcccucagcaagacugauuccaggaaguaugaaaaugcagucugggaucaguauaaagacuuaugccacaugcacacagguauuguuguugagaagaagaaaagaggcgguaaagaggaaauaaccccucacugugcacuaauggauugcauuauguuugaugcagcagugucaggaggacugaacgcaucgguuuugagagcagugcugcccagagauaugguguucagaacaucgacaccuagagucguccuguaa

SEQ ID NO: 7976 - RNA, 1710 nt, Artificial Sequence
  derived and/or modified CDS sequence (wt) from LASV(G2295-SLE-2012;Clade IV)__AIT17263__NP
augagugccucaaaggaaauaaaauccuuuuuguggacacaauccuugaggagggaauuaucuggcuacugcuccaacaucaaacugcagguggucaaagaugcccaggcucuuuuacauggacuugacuucucugaaguuaguaauguucaacgguugaugcgcaaggagagaagggaugacaaugauuugaaacgguuaagggacuugaaucaagcggucaacaaucuugucgaauuaaaaucaacucaacaaaagaguguacugagaguugggacucuaaccucagaugacuuauuaaucuuggccgcugaucuagagaaguugaagucgaaggugaucagaacagaaaggccguugagugcaggugucuauauggguaaccugagcucacagcaacuugaccaaagaagggcucuucugaauaugauaggaaugggugguaguaaucaaggggcucgggcugggagagauggaguggucagaguuugggaugugaaaaaugcagaguugcucaauaaucaguucgggaccaugccaaguuugacacuggcaugucugacaaaacaggggcagguugacuugaaugaugcaguacaagcauugacagauuuagguuugaucuacacagcgaaguaucccaauacuucagacuuagacaggcugacucaaagucaccccauccuaaauaugauugacaccaagaaaagcucuuugaacaucucagguuauaauuuuagcuugggugcagcugugaaggcaggagccuguaugcuggaugguggcaauauguuggaaacaaucaaggugucaccucagacaauggaugguauucucaaguccauuuuaaaggucaagaaggcucuugggauguucauuucagauaccccuggugaaaggaauccuuaugaaaacauacucuacaagauuuguuugucaggagauggcuggccauacauugcaucaagaaccucaauaacaggaagggccugggaaaacacuguuguugaucuggaaucagaugggaagccacagaaagcuggcagcaaugguuccaauaaaucucugcagucggcaggauuuaccgcugggcuuaccuauucucagcugaugacccucaaggaugcaaugcugcaacuugacccaaauacuaagaccuggauggacauugaaggaagaccugaagacccaguggaagucgcccucuaucaaccaaguucaggaugcuauauacacuucuuccgugagccuacugauuuaaagcaguucaaacaagaugcuaaguacucacaugggauugaugucacggaccucuuugcugcacaaccggguuugaccagugcugucauugaugcacucccccggaacauggucaucaccugccaggggucugaugacauaaggaaacuccuugaaucacagggaaggaaagacaucaaacugauugacauugcccucagcaagacugauuccaggaaguaugaaaaugcagucugggaccaguauaaagacuuaugccacaugcacacagguauuguuguugagaagaagaaaagaggcgguaaagaggaaauaacuccucacugugcauuaauggacugcaucauguuugaugcagcagugucaggaggacugaacacaucgguuuugagagcagugcugccuagagauaugguguucagaacaucgacaccuagagucguccuguaa

SEQ ID NO: 7977 - RNA, 1710 nt, Artificial Sequence
  derived and/or modified CDS sequence (wt) from LASV(G2315-SLE-2012;Clade IV)__AIT17267__NP
augagugccucaaaggaaauaaaauccuuuuuguggacacaaucuuugaggagggaguuaucugguuacuguuccaacaucaaacuacagguggugaaagaugcucaggcccuuuugcauggacuugacuuuuccgaagucaguaauguucaacgguugaugcgcaaggagaggagggaugacaaugauuugaaacgguugagagaccugaaucaagcggugaacaaucuuguugaauuaaaaucaacucaacaaaagaguguacugaggguugggacucuaaccucagaugacuuguuaaucuuggccgcugaucuagagaaguugaagucaaaggugaccagaacagaaaggccacugagugcaggugucuauaugggcaaccuaagcucacagcaacuugaccaaagaagagcucuucugaauaugauagggaugagugguggcaaucaaggggcucgggcugggagagauggagugguaagaguuugggaugugaagaaugcagaguugcucaauaaucaguucggaaccaugccaagccugacacuggcaugucugacaaaacaggggcagguugacuugaaugaugcaguacaggcacugacagauuuggguuugaucuacacagcaaaguaucccaauacuucagacuuagacaggcugacucaaagucaccccauccuaaauaugauugacaccaagaaaagcucuuugaauaucucagguuauaauuuuagcuugggugcagcugugaaggcaggagccugcaugcuggaugguggcaacauguuggagacaaucaaagugucaccucagacaauggauaguauccucaaauccauuuuaaaagucaaaaaggcucuagggauguucauuucagacaccccuggugaaaggaauccuuaugaaaacauacucuacaagauuuguuuaucaggagauggauggccauauauugcaucaagaaccucaauaacaggaagggccugggaaaacacuguuguugaucuggaaucagaugggaagccacagaaagcuggcagcaacaauuccaauaaaucccugcagucggcgggguuugcagcugggcucaccuauucucagcugaugacccucaaggaugcaaugcugcaacuugacccaaaugcuaagaccuggauggacauugaaggaagaccugaagauccaguggaaauagcccucuaucaaccaaguucaggcugcuacauacacuucuuccgugaaccuacugauuuaaagcaguucaagcaggaugcuaaguacucacaugggauugaugucacagaccucuuugcugcacaaccuggccugaccagugcugucauugaugcacucccccggaauauggucauuaccugucagggaucugaugacauaagaaaacuccuugaaucacaaggaagaaaagacaucaaauuaauugauauugcccucagcaagacugauuccaggaaguaugaaaaugcagucugggaucaauauaaagaccuaugccacaugcacacagguguuguuguugagaagaagaaaagaggcgguaaagaggaaauaaccccucacugugcacuaauggacugcaucauguuugaugcagcagugucaggggggcugaacacaucaguuuugagagcagugcugcccagagauaugguguucagaacaacgacaccuagagucguccuguaa

SEQ ID NO: 7978 - RNA, 1710 nt, Artificial Sequence
  derived and/or modified CDS sequence (wt) from LASV(G2318-SLE-2012;Clade IV)__AIT17271__NP
augagugccucaaaggaaauaaagucuuuucuguggacacaaucauugaggagggaauuaucugguuauugcuccaacaucaaacuacagguggugaaagaugcccaagcucucuuacacggacuugacuucuccgaaguuaguaauguucaacgguugaugcgcaaggagagaagggaugacaaugacuugaaacgguugagggacuuaaaucaagcagucaacaaccuuguugagcuaaagucaacucaacaaaagagcauacugagaguugggacucuaacuucagaugacuuauuaaucuuagccgcugaccuggagaaguugaaaucaaaggugaccaggacagaaaggccacugagugcaggugucuauaugggcaaccuaagcucacagcaacuugaccaaagacgagcucuucugaauaugauaggaaugaguggugguaaucaaggggcucgggcuggaagagacggaguggugagaguuugggacgugaaaaaugcagaguugcuuaauaaucaguucggaaccaugccaaguuuaacacuggcaugucugacaaaacaggggcagguugacuugaaugaugcagugcaagcauugacagacuuggguuugaucuacacagcaaaguaucccaauacuucagacuuagacaggcugacucaaagucacccuauccuaaacaugauugacaccaagaaaagcucucugaauaucucagguuauaauuuuagcuugggugcagcuguaaaggcaggagcuugcaugcuggaugguggcaauauguuggagacaaucaagguuucaccucagacaauggaugguauccuaaaaaccauccuaaaggucaagaaggcucuugggauguucaucucagacaccccuggugaaaggaauccuuacgagaacauacucuacaagauuugccuaucaggagauggauggccauacauugcaucaagaaccucaauaacaggaagggccugggaaaacacugucguugaucuggaaucagaugggaaaccacagaaaacuggcagcaacaauuccaauaaaucccugcagucggcaggguuugccgcugggcuuacuuauucucagcugaugacccucaaggaugcaaugcugcaacuugacccaaaugcuaagaccuggauggauauugaaggaagaccugaggauccaguggaaauugcccuuuaucagccaaguucaggcugcuacauacacuucuuccgugaaccuacugacuuaaagcaguucaagcaggaugcuaaguacucacaugggauugauguuacagaccucuuugcugcacaaccgggcuuaaccagugcuguuauagaugcacucccucggaauauggucauuaccugucagggaucugaugacauaaggaaacuccuugaaucacaagguagaaaagacaucaaacuaauugauauugcccucagcaaggcugauuccaggaaguaugaaaaugcaguuugggaucaguauaaagacuuaugucacaugcacacagguguuguuguugaaaagaagaagcgaggugguaaagaggaaauaacuccccacugcgcacuaauggacugcaucauguaugaugcagcagugucaggaggacugagcacaucgguuuuaagagcaguacuacccagagauaugguguucagaacaucaacaccuagagucguccuguaa

SEQ ID NO: 7979 - RNA, 1710 nt, Artificial Sequence
  derived and/or modified CDS sequence (wt) from LASV(G2363-SLE-2012;Clade IV)__AIT17275__NP
augagcgccucaaaggagauaaaguccuucuuguggacacaaucuuugaggagggaacugucugguuauuguuccaauauuaaacuacagguggugaaggaugcccaagcucuuuuacauggacucgauuucucugagguuagcaauguucagcgauugaugcgcaaacagagaagggaugauggugaucuaaaaagguugagggaucuuaaucaagcagucaacaaccuuguugaguugaaaucaacucaacaaaaaaguguguugagaguugggacuuugaccucagaugaccugcugacuuuggcugcugaccuagagaaacuuaaaucaaaaguaaccaggacagaaaggccauugagugcaggaguuuauaugggcaacuugaguucacaacaacuugaccagagacgggcucuccuaaacaugauaggaaugagcggugguaaucaaggggcucggaccgggaaagauggaguggugagaauuugggauguaaaaaaugcggacuugcuuaacaaucaguucggcaccaugccaagucuaacacuggcauguuuaacaaaacaggggcagguugaccugaaugauguugugcaagcgcuaacagauuugggucugaucuacacagcaaaauaccccaacauuucagacuuagacagacuggcucagagccaccccauucuaaaaaugauagacaccagcaaaagcucccugaacauuucugguuacaauuuuagucugggugcagcuguaaaggcaggagcuugcaugcuagacggugguaacaugcuggagacagucaaggugucgccucagacaauggauggcauccucaaguccauucuaaaggucaaaaagagucuugggauguucauaucagacaccccuggcgaaaggaauccuuaugaaaauauacucuacaagaucugucugucaggagauggauggccguauauugcaucaagaacuucaauaacaggaagggccugggaaaacacugucguugauuuggagucagaugggaagccacaaaaaguugggagcaacaacuccaacaaaucccuacagucaacaggguuuacugccgggcuuaccuauucucagcuuaugacucuuaaagaugcaauguugcaacuugauccaaaugcuaagaccuggauggacauugaagggagaccugaagauccgguggaaauugcuuuguaucagccaaguucaggcugcuacauucacuucuuccgugagccuacugauuuaaagcaguuuaagcaagaugccaaguacucacauggaauugaugugacagaccucuucgcugcacaaccaggcuuaacuagugcuguuauagacacacucccccggaauauggucauuaccugucaggggucugaugacauagggaaacuccuugaaucacaaggaagaaaagauaucaaacuaauugacauugcccucaguaaaacugauucuaggaaauaugaaaaugcagucugggaccaguauaaagacuuaugccauaugcacacagguguugucguugagaagaagaaaagaggugguaaggaggaaauaaccccucacugugcucuaauggacuguauuauguuugaugcagcaguuucaggagggcugaacgcaucaguucugagagcugugcugccuagagacaugguguuuagaacaucgacaccaagagucguccuguaa

SEQ ID NO: 7980 - RNA, 1710 nt, Artificial Sequence
  derived and/or modified CDS sequence (wt) from LASV(G2384-SLE-2012;Clade IV)__AIT17277__NP
augagugcuucaaaggaaauaaaguccuuucuguggacacaaucauuaaggagggaauuaucuaguuacuguuccaacaucaaacuacagguggugaaagaugcccaggcucuuuugcaugggcuugacuucuccgaagucagcaauguucaacgguugaugcgcaaggagagaagggaugacaaugauuuaaagcgguugagggaccuuaaucaagcggucaacaaccuuguugaguuaaaaucaacucaacaaaagaguauauugagaguugggaccuuaaccucagaugacuuacuaaucuuagcugcugaucuagagaagcugaaaucaaaggugacuaggacagaaaggccauugagugcaggugucuacauggguaaccugagcucacagcaacuugaccagagacgagcucuucugagcaugauagggaugagugguaguaaucaaggggcucgggcugggagagauggaguggugagaguuugggaugugaaaaaugcagaguugcucaauaaucaguucgggaccaugccaagucuuacacuggcauguuugacaaaacaggggcagguugacuugaaugaugcagugcaagcauugacagauuugggucugaucuacacggcaaaguaucccaauacuucagaccuggauaggcugacucaaagucaccccauccuaaacaugauugacaccaagaagagcucuuuaaacaucucagguuauaauuuuagcuugggugcagcugugaaggcaggagcuugcaugcuggaugguggcaacauguuggagacaaucaaggugucaccucagacaauggaugguauccucaaauccaucuugaaggucaagaaggcucuugggauguucaucucagacaccccuggugaaaggaauccuuaugagaacauacucuauaagaucugucugucaggagauggguggccauacauugcaucaaggaccucaauaacaggaagggcuugggaaaacacugucguugaucuggaaucagaugggaagccacagaaagcuggcagcaacaauucuaacaaaucccugcagucggcaggguuuaccgcugggcuuaccuauucucagcuaaugacucucaaggaugcaaugcugcaacuugauccaaaugcuaagaccuggauggauauugaaggaagaccugaagauccaguggaaguugcccucuaucaaccaaguucaggcuguuacauucacuucuuccgugaaccuacugauuuaaagcaguucaaacaggaugcuaaguacucacaugggauugaugucacagaccucuucgcugcacaaccgggccugaccagugcugucauagaugcacucccucggaauauggucauuaccugucagggguccgaugacauaaggaaacuccuugaaucacaagguaggaaagacaucaaacuaauugauauugcccucagcaaaacugauuccaggaaguaugaaaaugcagucugggaucaguauaaagacuuaugccacaugcacacaggugucguuguugagaagaagaaaagaggugguaaagaggaaauaaccccucacugugcacuaauggacugcaucauguuugacgcagcagugucaggaggacugaacacaucgguuuugagagcagugcuacccagggauaugguguucagaacaucaacaccuagagucguucuguaa

SEQ ID NO: 7981 - RNA, 1710 nt, Artificial Sequence
  derived and/or modified CDS sequence (wt) from LASV(G2392-SLE-2012;Clade IV)__AIT17281__NP
augagugccucaaaagaaauaaaguccuuuuuguggacacaaucuuugaggagggaacuaucuggcuacugcucuaacaucaaacuucagguggugaaagaugcucaggcucuuuugcauggacuugacuucuccgaggucagcaauguucagcgguugaugcgcaaagagaggagggaugacagugaccugaaacgguugagggaccugaaccaagcggucaacaaccuuguugaguuaaaaucaacucaacaaaagagugugcugagaguugggacucuaaccucagaugacuuauuagucuuagcugcugaucuagagaagcugaaaucaaaggugaccagaacagaaaggccauugagcgcaggugucuauaugggcaaccugagcucacagcaacuugaccaaagacgagcucuucugagcaugauaggaaugaguggugguaaucaaggagcucgggcugggagagauggaguggugagaauuugggauguuaaaaaugcagaguugcuuaauaaucaguucgggaccaugccaagucugacacuggcauguuugacaaaacaagggcagguugacuuaaaugaugucgugcaagcauugacagauuuggguuugaucuacacagcaaaguaccccaacacuucagacuuggacaggcugacucaaagucaccccauccuaaauaugauugacaccaagaaaagcucuuugaauaucucagguuauaauuuuaguuugggugcagcugugaaggcaggagcuugcaugcuagaugguggcaauauguuggagacaaucaaggugucaccucagacaauggaugguauccucaaauccauuuuaaaggucaagaaggcucucgggauguucauuucagacacuccuggugagaggaauccuuaugaaaacauacucuauaagauuuguuugucaggggauggauggccauauauugcaucaagaacuucaauaacaggaagggccugggaaaacacuaucguugaucuggagucggaugggaagccacagaagacuaguaccaccaauuccaacaaaucccugcagucggcaggguuugccgcugggcuaacauauucucagcuuaugacccucaaggaugcaaugcugcaacuugacccaaaugccaagaccuggauggacauugaagggagacccgaagauccaguagaaauugcccucuaucaaccaaguucaggcugcuacauacacuucuuccgugagccuacugauuugaagcaguucaagcaggaugcuaaauacucacaugggauugaugucacagaccuuuuugcugcacaaccaggccugaccagugcuguuauagauacacucccccggaacauggucauuaccugucagggguccgaagacauuaggagacuccuugaaucacaaggaagaaaagacaucaaacuaauugauauugcccucagcaagacugauuccaggaaguaugagaaugcagucugggaucaguauaaagauuuaugccacaugcacacaggugucguuguugaaaagaagaagaagggcgguaaagaggaaauaacuccccacugugcacuaauggauugcaucauguuugacgcagcagugucaggaggacugaacacaucaguuuugagagcagugcuacccagagacaugguguucagaacaucaacaccuagagucguccuguaa

SEQ ID NO: 7982 - RNA, 1710 nt, Artificial Sequence
  derived and/or modified CDS sequence (wt) from LASV(G2405-SLE-2012;Clade IV)__AIT17285__NP
augagugccucaaaggaaauaaaauccuuuuuguggacacaaucuuugaggagggaauuaucugguuacugcuccaacauaaagcugcagguggugaaagaugcccaggcucuuuuacauggacuugauuucucugaagucagcaauguucaacggucgaugcgcaaggagaggagggaugacaaugauuugaaacgguugagggaucuaaaucaagcggucaacaaucuuguugaauuaaaaucaacccaacaaaagaguauacugagaguugggacucuaaccucagaugacuuacuaaucuuggccgcugauuuagagaaauugaagucgaaggugaccagaacagaaaggccauugagugcaggugucuauaugggcaaccuaagcucacagcaacuugaccaaagaagagcucuucugaacaugauaggaaugagugguaguaaucaaggggcucgggcugggagagauggaguggucagaguuugggaugugaaaaaugcagaguugcucaauaaucaguucgggaccaugccaagucugacacuggcaugucugacaaaacaggggcagguugaccugaaugauguaguacaagcauugacagauuuggguuugaucuacacagcaaaguauccaaaugcuucagacuuggacaggcugacucaaagucaccccauccuaaauaugauugacaccaaaaaaagcucuuugaauaucucagguuauaauuuuagcuugggugcagcugugaaggcaggagcuuguaugcuggaugguggcaauauguuggagacaaucaaggugucaccucagacaauggaugguauucucaaauccauuuuaaagguuaaaaaggcucuugggauguucauuucagacaccccuggugaacggaauccuuaugaaaacauacucuacaagauuugcuugucaggagauggauggccauacauugcaucaagaaccucaauaacaggaagggccugggaaaacacuauuguugaucuggagucagaugggaagccacagaaagcuggcaacaacgguuccaauaaaucucugcaaucggcaggauuuaccgcugggcuuaccuauucucagcugaugacccucaaggaugcaaugcugcaacuugacccaaaugcuaagaccuggauggacauugaaggaagaccugaagauccaguggagaucgcccucuaucaaccaaguucaggaugcuacauacacuucuuccgugaaccuacugacuuaaagcaauucaagcaagaugcuaaguacucacaugggauugaugucacagaucucuucgcugcacaaccgggcuugaccagugcugucauugaugcacucccccggaauuugguuaucaccugccaggggucugaugauauaaggaaacuccuugaaucacaaggaagaaaagacaucaaacuaauugacauugcccucagcaagacugauuccaggaaguaugaaaaugcagucugggaucaguacaaagaccuaugccacaugcacacagguauuguuguugagaagaagaaaagaggcggcaaagaggagauaaccccucacugugcacuaauggacugcaucauguuugaugcagcggugucaggaggacugaacacaucaguuuugagagcagugcugcccagagauaugguguuuagaacaucaacaccuagggucguccuguaa

SEQ ID NO: 7983 - RNA, 1710 nt, Artificial Sequence
  derived and/or modified CDS sequence (wt) from LASV(G2427-SLE-2012;Clade IV)__AIT17289__NP
augagugccucaaaagaaauaaaguccuuuuuguggacacaaucuuugaggagggaauuauccgguuacugcuccaacaucaaacuucagguggugaaagaugcucaggcucuuuugcaugggcuugacuucuccgaagucaguaauguucaacgguugaugcgcaaagagagaagggaugacagugaucugaaacgguugagggaccugaaccaagcggucaacaaccuuguugaguuaaaaucaacucaacaaaagaguguacugagaguugggacucuaaccucagaugacuuguuaguccuagcugcugaucuagaaaaguugaaaucaaaagugaccaggacagagaggccauugagcgcaggugucuauaugggcaaccuaagcucacagcaacuugaccaaagacgagcucuucugagcaugauaggaaugaguggugguaaucaaggaguccgggcugggagagauggaguaguaagaauuugggauguaaaaaaugcagaguugcucaauaaucaguucgggaccaugccaagucugacacuggcauguuugacaaaacaaggacagguugacuuaaaugauguagugcaagcauugacagauuuggguuugaucuacacagcaaaguaccccaacacuucagacuuggauaggcugacucaaagucaccccauccuaaauaugauugacaccaagaaaagcucucugaauaucucagguuauaauuuuaguuugggugcagcugugaaggcaggggcuugcaugcuggauggugguaacauguuggagacaaucaaggugucaccucagacaauggaugguauccucaaauccauuuuaaaggucaagaaggcucucgggauguucaucucagacacuccuggugagaggaauccuuaugaaaacauacucuauaagauuuguuugucaggggauggauggccauauauugcaucaagaaccucaauaacaggaagagccugggaaaacacuaucguugaucuagaaucagaugggaagccacagaaaacuggcagcaucaauuccaacaaaucccugcagucgacaggguuugcugcugggcuuaccuauucucagcuuaugacccucaaggaugcgaugcugcaacuugacccaaaugcuaagaccuggauggacauugaaggaagaccugaagauccaguagaaauugcccucuaccaaccaaguucaggcugcuauauacacuucuuccgugagccuacugauuuaaagcaguucaagcaggaugcuaaauacucacaugggauugaugucacagaccucuucgcugcacaaccgggcuugaccagugcuguuauagaugcacucccccggaauauggucauuaccugucagggguccgaugacauuaggaaacuccuugaaucacaaggaagaaaggacaucaaacuaauugauauugcccucagcaaaacugauuccaggaaguaugagaaugcagucugggaucaguauaaagacuuaugccauaugcacacaggcaucguuguugaaaagaagaaaaggggcggcaaagaggaaauaacuccucacugugcacuaauggauuguaucauguuugaugcagcagugucaggaggacugaacacaucaguuuugagagcagugcuacccagagacaugguguucagaacaucaacaccuagagucguccuguaa

SEQ ID NO: 7984 - RNA, 1710 nt, Artificial Sequence
  derived and/or modified CDS sequence (wt) from LASV(G2431-SLE-2012;Clade IV)__AIT17293__NP
augagugccucaaaagagauaaaguccuuccuguggacacaaucuuugaggagagaauugucugguuauugcuccaacaucaaacuacagguggugaaagaugcccaagcucuuuugcaugggcuugacuucucugaggucaguaauguucaacggcugaugcgcaaacagagaagagaugacaaugaucugaaacgauuaagggaucuaaaucaggcagucaacaaucuuguugagcugaaaucaacucaacagaagagugugcugagaguugggacucugacuucagaugacuuauuaguucuggcugcugaccuagagaaauugaagucaaaaguuaccagaacagagaggccauugagugcagguguuuauaugggcaacuuaagcacacaacagcuagaucagaggcgagcucuucugaacaugauagggaugaguggugguaaucaaggggcccgggcugguagagauggaguggugagagucugggaugugaaaaaugccgaccuacuuaauaaucaauuuggcaccaugccaagucugacacuggcauguuuaacgaagcaggggcagguugacuugaaugauguggugcaagcauugacagauuugggcuugaucuacacagcaaaguacccuaacaccuccgacuuagacaggcuaacucagagccaccccauccugaacaugauugacaccaauaaaaguuccuugaacaucucagguuauaauuuuagcuugggugcggcugugaaggcaggagcuugcauguuggauggugguaacaugcuggagacaaucaaggugucaccucagacaauggauggcauccucaaguccauucuaaaggucaagaaggcucuugggauguucaucucagacaccccuggugaaaggaacccuuaugaaaauauacuuuacaaaauuugcuugucaggggauggauggccguauauugcaucaagaacuucuauaacaggaagggccugggaaaacacugucguugauuuggaaucagacgggaaaccacagaaagcugggggcaacaacuccaacaaaucccuacagucggcaggguucacugcugggcucacuuauucucagcuuaugacccucaaagaugcaaugcugcaacuugauccaaaugccaagaccuggauggacauugagggaaggcccgaagauccaguggaaauugcccucuaucagccaaguucagguuguuacauucacuucuuccgugaacccacugauuuaaagcaguucaaacaagaugcuaaguauucacauggaauugauguuacagaccucuucgcugcacaaccagguuuaacuagugcugucauagaugcacucccccggaauauggucauuacuugucagggaucugaugacauaaggaaacuccuagaaucacagggaagaaaggauaucaaacucauugacauugcccucagcaaaacugauucuaggaaguaugaaaaugcagucugggaucaguauaaagaccuaugcaauaugcacacaggaaucguuguugaaaagaagaaaagaggugguaaagaggaaauaaccccucacugugcccuaauggacugcauuauguuugaugcagcagugucaggaggaaugaacacaucaguuuugagagcagugcuaccuagagacaugguguucagaacaucaacaccaagggucguccuguaa

SEQ ID NO: 7985 - RNA, 1710 nt, Artificial Sequence
  derived and/or modified CDS sequence (wt) from LASV(G2511-SLE-2012;Clade IV)__AIT17295__NP
augagugccucaaaggaaauaaaaucuuuuuuguggacacaauccuugaggagggaauuaucugguuacugcuccaacaucaaacugcagguggucaaagaugcccaggcucuuuuacauggacuugacuucucugaaguuaguaauguucaacgguugaugcgcaaggagagaagggaugacaaugauuugaaacgguugagggacuugaaucaagcggucaacaaucuuguugaauuaaaaucaacucaacaaaagaguguacugagaguugggacucuaaccucagaugacuuauuaaucuuggccgcugaucuagagaaguugaagucgaaggugaucagaacagaaaggccauugagugcaggugucuauaugggcaaccuaagcucacagcaacuugaccaaagaagggcucuucuaaauaugauaggaaugggugguaguaaucaaggggcucgggcugggagagauggaguggucagaguuugggaugugaaaaaugcagaguugcucaauaaucaguucgggaccaugccaaguuugacacuggcaugucugacaaaacaggggcagguugacuugaaugaugcaguacaagcauugacggauuuagguuugaucuacacagcgaaguaucccaauacuucagacuuagacaggcugacucaaagucaccccauccuaaauaugauugacaccaagaaaagcucuuugaacaucucagguuauaauuuuagcuugggugcagcugugaaggcaggagcuugcaugcuggaugguggcaauauguuggagacaaucaaggugucaccucagacaauggaugguauucucaaguccauuuuaaaggucaagaaggcucuugggauguucauuucagauaccccuggugaaaggaauccuuaugaaaacauacucuacaagauuuguuugucaggagauggcuggccauacauugcaucaagaaccucaauaacaggaagggccugggaaaacaccauuguugaucuggaaucagaugggaagccacagaaagcuggcagcaaugguuccaauaaaucucugcagucggcaggauuuaccgcugggcuuaccuauucucagcugaugacccucaaggaugcaaugcugcaacuugacccaaaugcuaagaccuggauggacauugaaggaagaccugaagacccaguggaaauugcccucuaucaaccaaguucaggaugcuauauacacuucuuccgugaaccuacugauuuaaagcaguucaagcaagaugcuaaguacucacaugggauugaugucacggaccucuuugcugcacaaccggguuugaccagugcuaucauugaugcacucccccggaacauggucaucaccugccaggggucugaugacauaaggaaacuccuugaaucacagggaaggaaagacaucaaacugauugacauugcccucagcaagacugauuccagaaaguaugaaaaugcagucugggaucaguauaaagacuuaugccacaugcacacagguauuguuguugagaagaagaaaagaggcgguaaagaggaaauaacuccucacugugcacuaauggacugcaucauguuugaugcagcaguaucaggaggacugaacacaucgguuuugagagcagugcuacccagagauaugguuuucagaacaucgacaccuagagucguccuguaa

SEQ ID NO: 7986 - RNA, 1710 nt, Artificial Sequence
  derived and/or modified CDS sequence (wt) from LASV(G2554-SLE-2012;Clade IV)__AIT17299__NP
augagugccucaaaggaaauaaaguccuuucuguggacacaauccuuaaggagagaacuaucugguuacugcuccaacaucaaacuucagguggugaaagaugcccaagcucuuuugcacggacuugacuucuccgaggucagcaauguccaacgguugaugcgcaaagagagaagggaugacaaugacuugaaacggcugagggaccuaaaucaagcggucaacaaccuuguugaguuaaaaucaacucaacagaagaguguacugagaguugggacccuaaccucagaugacuuauuaguguuagcugcugaucuagagaaguugaaaucaaaagugaccaggacagaaagaccauugagugcaggugucuauaugggcaacuugagcucacagcaacuugaccaaaggagagcucuucugaguaugauagggaugagugguggcaaccaaggggcucggacugggagagaugggguggugagaguuugggauguaaaaaaugcagaguugcucaauaaucaguucgggaccaugccaagucugacacuggcauguuuaacaaaacaagggcagguugacuuaaaugauguaguacaagcacugacagauuugggucugaucuacacagcaaaauaucccaacacuucagaccuggauaggcugacucaaagucaccccauccuaaauaugauugacaccaagaaaagcucuuugaauaucucagguuauaauuuuagcuugggugcagcugugaaagcaggagcuuguaugcuggaugguggcaauauguuggagacaaucaaagugucaccucagacaauggauggcauccuuaaauccauuuuaaaggucaagaaggcucuugggauguucaucucagacaccccuggugaaaggaaucccuacgagaauauacucuacaaaauuuguuugucaggggauggauggccauauauugcgucaagaaccucaauaacaggaagggccugggaaaacacugucguugaucuagaaucagaugggaagccacagaaagcuggcagcaacaauuccaacaaaucccugcaaucggcaggguuuaccgcugggcucacuuauucucagcuuaugacccucaaggaugcaaugcugcaacuugauccgaaugcuaagaccuggauggacauugaaggaagaccugaagauccaguugaaauugcccuuuaucaaccaaguucaggcugcuacauacacuucuuccgugagcccagugauuuaaagcaguucaagcaagaugcuaaauacucacaugggauugaugucacagaccucuucgcugcacaaccgggcuugacuagugcugucauagaugcacucccccggaauauggucauuaccugucagggguccgaugauauaaggaaacucuuugaaucacaaggaagaaaggacaucaaauuaauugauauugcccucagcaaaacugacuccaggaaguaugagaaugcagucugggaucaguauaaagacuuaugccacaugcacacaggugucguuguugaaaagaagaaaagaggcgguaaagaggaaauaaccccucacugugcacuaauggacugcaucauguuugaugcagcagugucaggaggacugaacucauugguuuugagagcagugcugcccagagacaugguguucagaacaucgacaccuagagucguccuguaa

SEQ ID NO: 7987 - RNA, 1710 nt, Artificial Sequence
  derived and/or modified CDS sequence (wt) from LASV(G2557-SLE-2012;Clade IV)__AIT17303__NP
augagugccucaaaggagauaaaguccuuccuguggacacaaucuuugaggagggaauugucugguuacuguuccaacaucaaauuacagguggugaaagaugcucaggcucuuuuacauggacuugacuucucugaagucagcaauguucagcgguugaugcguaaacagaggagagaugacagugaucuaaaacgauugagggauuuaaaucaagccguuaauaaucuugucgagcugaaaucaacucaacagaagaguguauugagaguugggacucuaaccucagaugacuuguuaguuuuggcugcugaccuagagaagcugaaaucaaaagugaucagaacagaaagaccacuaagcucagguguuuauaugggcaaccuaaguucgcaacaacucgaccaaagacgagcucuccugaauaugauaggaaugagugguggcaaucagggggcucaaguugggagagaugggguggugagaguuugggauguaaagaaugcagauuugcucaacaaucaguuuggcaccaugccaagucugacacuggcauguuuaacaaagcaagggcagguugacuugaaugauguagugcaagcacuaacagauuuaggccugaucuacacagcaaaguauccuaacacuucagacuuggacagauugguucagagccacccuauucugaacaugauagacaccaagaaaagcucccugaacaucucagguuacaauuuuagcuugggcgcagcugugaaggcaggggccugcaugcuagauggugguaacauguuagagacaaucaaggugucaccucaaacaauggauggcauccugaaguccaucuugaaagugaaaaaggcucuugggauguucauaucugaaaccccuggcgaaaggaauccuuaugagaacauacucuacaagauuuguuugucaggagauggguggccauauauugcaucaagaaccucaauaacagggagggcuugggaaaacacuauuguugaucuggaaucggaugggaagccacagaaagcugggagcaacaauuccaauaagucccugcaaucggcaggauucaccgccgggcucaccuauucucagcucaugacccucaaagauucaaugcugcagcuugauccaaaugcuaagaccuggauggacauugagggaagaccugaggauccgguggagguugcccuuuaucaaccaaguucaggcuguuacauucacuucuuucgugagccuacugacuugaagcaguuuaagcaagaugcuaaguauucacauggaauugaugucacagaccucuucgcugcacagccaggcuuaaccagugcuguuauagaggcgcuuccucggaacauggucaucaccugucagggaucugaugacauucgaaagcuccuugaaucacaagggaggaaggauaucaaacuaauugacauugcucucaacaagacugauucuaggaaguaugagaaugcagucugggaucaguacaaagacuuaugccauaugcacacaggugucguuguugagaagaagaaaagaggugguaaagaggagauaaccccucacugugcccugauggacugcaucauguuugacgcagcagugucagguggauugaaaacacugguucugagagcagugcuacccagagacaugguguuuagaacaucgacacccaaagucguccuguaa

SEQ ID NO: 7988 - RNA, 1710 nt, Artificial Sequence
  derived and/or modified CDS sequence (wt) from LASV(G2565-SLE-2012;Clade IV)__AIT17307__NP
augagugccucaaaggaaauaaaguccuuucucuggacacaaucauugagaagggaacuaucugguuacugcuccaacaucaaacuacagguugugaaagaugcccaagcucuuuuacauggacuugauuucuccgaagucagcaauguucaacggcugaugcgcaaggagagaagggaugacaaugaucugaaacgguugagggaccuaaaucaagcggucaacaaccuuguugaguuaaaaucaacucaacaaaagaguguacugagaguugggacucuaacaucagaugacuuauuaaucuuggccgcugaucuagagaaguugaaaucaaaggugaccaggacagaaaggccauugagugcaggugucuauaugggcaaccugagcucacagcaacuugaccagagacgagcucuucugaguaugauaggaaugaguggugguaaucaaggggcucggacugggagagauggaguggugagaguuugggaugugaaaaaugcagaguugcuuaacaaucaguucgggaccaugccaaguuugacacuggcaugucugacaaagcaggggcagguugaccugaaugauguagugcaagcauugacagauuugggucugaucuacacagcuaaguaucccaauacuucagacuuagauaggcugacucagagucaccccauccuaaacaugauugacaccaagaaaagcucucugaauaucucaggcuauaauuucagccugggugcagcugugaaggcaggagcuugcaugcuagauggcggcaacaugcuagagacaauuaaggugucaccucagacgauggacggcauccucaaauccaucuuaaaggucaagaaggcucuugggauguucaucucagacaccccuggugaaaggaauccuuaugaaaacauacucuacaagaucuguuugucaggagauggauggccauauauugcaucaagaaccucaauaacaggaagggccugggaaaacacugucguugaucuggaaucagaugggaagcuacagaaaacuggcagcaacaauuccaacaaauccuugcagucggcaggguuuaccgcugggcuuaccuauucucagcuaaugacccucaaggaugcaauguugcaacuugacccaaaugccaagaucuggauggacauugaaggaagaccugaagauccaguggagauugcccucuaucaaccaaguucaggcugcuacauacacuucuuccgugagccuacugacuuaaagcaguucaagcaggaugcuaaguacucacaugggauugauguuacggaccucuucgcugcacagccggguuugaccagugcugucauugaugcacucccccggaauauggucauuaccugucagggguccgaugacauaaggaaacuccuugaaucacaagguagaaaagacaucaaacuaauugauauugcccucaacaaaacugauuccaggaaguaugaaaaugcagucugggaucaguauaaggacuuaugccacaugcacacaggugucguuguugaaaagaagaaaaagggcggcaaagaggaaauaaccccucacugugcacuaauggacugcaucauguuugaugcagcagugucaggaggacugaacacaucgguuuugagagcagugcugccuagagauaugguguucagaacaucgacaccuagagucguccuguaa

SEQ ID NO: 7989 - RNA, 1710 nt, Artificial Sequence
  derived and/or modified CDS sequence (wt) from LASV(G2587-SLE-2012;Clade IV)__AIT17311__NP
augagugccucaaaggaaauaaaauccuuuuuguggacacaauccuugaggagggaauuaucuggcuacugcuccaacaucaaacugcagguggucaaagaugcccaggcucuuuuacauggacuugacuucucugaaguuaguaauguucaacgguugaugcgcaaggagagaagggaugacaaugauuugaaacgguuaagggacuugaaucaagcggucaacaaucuugucgaauuaaaaucaacucaacaaaagaguguacugagaguugggacucuaaccucagaugacuuauuaaucuuggccgcugaucuagagaaguugaagucgaaggugaucagaacagaaaggccguugagugcaggugucuauauggguaaccugagcucacagcaacuugaccaaagaagggcucuucugaauaugauaggaaugggugguaguaaucaaggggcucgggcugggagagauggaguggucagaguuugggaugugaaaaaugcagaguugcucaauaaucaguucgggaccaugccaaguuugacacuggcaugucugacaaaacaggggcagguugacuugaaugaugcaguacaagcauugacagauuuagguuugaucuacacagcgaaguaucccaauacuucagacuuagacaggcugacucaaagucaccccauccuaaauaugauugacaccaagaaaagcucuuugaacaucucagguuauaauuuuagcuugggugcagcugugaaggcaggagccuguaugcuggaugguggcaauauguuggaaacaaucaaggugucaccucagacaauggaugguauucucaaguccauuuuaaaggucaagaaggcucuugggauguucauuucagauaccccuggugaaaggaauccuuaugaaaacauacucuacaagauuuguuugucaggagauggcuggccauacauugcaucaagaaccucaauaacaggaagggccugggaaaacacuguuguugaucuggaaucagaugggaagccacagaaagcuggcagcaaugguuccaauaaaucucugcagucggcaggauuuaccgcugggcuuaccuauucucagcugaugacccucaaggaugcaaugcugcaacuugacccaaaugcuaagaccuggauggacauugaaggaagaccugaagacccaguggaagucgcccucuaucaaccaaguucaggaugcuauauacacuucuuccgugagccuacugauuuaaagcaguucaaacaagaugcuaaguacucacaugggauugaugucacggaccucuuugcugcacaaccggguuugaccagugcugucauugaugcacucccccggaacauggucaucaccugccaggggucugaugacauaaggaaacuccuugaaucacagggaaggaaagacaucaaacugauugacauugcccucagcaagacugauuccaggaaguaugaaaaugcagucugggaccaguauaaagacuuaugccacaugcacacagguauuguuguugagaagaagaaaagaggcgguaaagaggaaauaacuccucacugugcauuaauggacugcaucauguuugaugcagcagugucaggaggacugaacacaucgguuuugagagcagugcugccuagagauaugguguucagaacaucgacaccuagagucguccuguaa

SEQ ID NO: 7990 - RNA, 1710 nt, Artificial Sequence
  derived and/or modified CDS sequence (wt) from LASV(G2612-SLE-2012;Clade IV)__AIT17315__NP
augagugccucaaaggagauaaaauccuuuuuguggacacaauccuugaggagggaauugucuggauacugcuccaacaucaaacugcagguggugaaagaugcccaggcucuuuuacacggacuugacuucucugaagucaguaauguucaacgauugaugcgcaaggagagaagggaugacaaugauuugaaacgguugagggaccuaaaucaagcgguuaacaaucuuguugaauuaaaaucaacucaacaaaagaguguacugagaguugggacucuaaccucagaugacuuauuaaucuuggcugcugaucuagagaaguugaagucgaaggugaccagaacagaaaggccauugagugcaggugucuauaugggcaaccugagcucacagcaacuugaccaaagaagagcucuuuugaauaugauaggaaugagugguagcaaucaaggggcucgggcuggaagagauggaguggucagaguuugggaugugaaaaauguagagcugcucaauaaucaguucgggaccaugccaagucugacacuggcaugucugacaaaacaggggcagguugacuugaaugaugcaguacaagcauugacagauuuagguuugaucuacacagcgaaguaucccaauacuucggacuuagacaggcugacucaaagucaccccauccuaaauaugauugacaccaagaaaagcuccuugaauaucucagguuauaauuuuagcuugggugcagcugugaaggcaggagcuuguaugcuagaugguggcaauaugcuggaaacaaucaaggugucaccucagacaauggaugguauucucaaauccauuuugaaggucaagaaagcucuugggauguucauuucagauaccccuggugaaaggaacccuuaugaaaacauacucuacaagauuugcuugucaggagauggcuggccauacauugcaucaagaaccucaauaacaggaagggccugggaaaacacuguuguugaucuggaaucagaugggaagccacagaaagcuggcagcaacaguuccaacaaaucucuacagucggcaggauucaccgcugggcuuaccuauucucagcugaugacccucaaggaugcaaugcugcaacuugacccaaaugcuaagaccuggauggacaucgaaggaagaccugaagauccaguagaaaucgcccucuaucaaccaaguucggggugcuacauacacuucuuccgugaacccacugaucuaaagcaguucaagcaggaugcuaaguacucacaugggauugaugucacggaucucuucgcugcacaaccgggcuugaccagugcugucauugaugcacucccccggaauauggucaucaccugccaggggucugaugacauaaggaaacuccuugaaucacaaggaagaaaagacaucaaacuaauugacauugcccucagcaagacugauuccaggaaguaugaaaaugcagucugggaucaguauaaagacuuaugccacaugcacacagguauuguuguugagaagaagaaaaaaggcaguaaagaggaaauaaccccucacugugcacuaauggauugcauuauguuugaugcagcagugucaggaggacugaacgcaucgguuuugagagcagugcugcccagagauaugguguucagaacaucgacaccuagagucguccuguaa

SEQ ID NO: 7991 - RNA, 1710 nt, Artificial Sequence
  derived and/or modified CDS sequence (wt) from LASV(G2615-SLE-2012;Clade IV)__AIT17319__NP
augagugccucaaaggagauaaaguccuucuuguggacacaaucuuugaggagggaauugucugguuacugcucuaacaucaaacuacagguggugaaagaugcccaggcucuuuuacauggacuugacuucucugaagucagcaauguucagcgguugaugcgcaaacagaggagagaugacagugaucuaaaacgauugagggauuuaaaucaagccguuaacaaucuugucgagcugaaaucaacucaacagaagaguguacugagaguugggacucuaaccucagaugacuuguuaguuuuggcugcugaucuagagaagcugaaaucgaaggugauuagaacagaaaggccacuaagcucagguguuuauaugggcaaccugaguucacaacaacuugaccaaagacgagcucuccugaauaugauaggaaugagugguggcaaucagggggcucaagucgggagagauggaguggugagagucugggauguaaagaaugcagauaugcucaacaaucaguuuggcaccaugccaagucuaacacuggcauguuuaacaaaacaagggcagguugaccugaaugauguagugcaagcacuaacagauuuaggccugaucuacacagcaaaguauccuaacacuucagacuuggacagauuggcucagagccacccuauucuaaacaugauagacaccaaaaaaagcucccugaacaucucagguuacaauuuuagcuugggugcagcugugaaagcaggagccugcaugcuggauggugguaacauguuagagacaaucaaggugucaccucaaacaauggauggcauccugaaguccaucuuaaaagugaaaaaggcucuugggauguucauaucugaaaccccuggugaaaggaauccuuaugagaacauacucuacaagauuuguuugucaggggauggguggccauauauugcaucaagaaccucaauaacagggagggcuugggaaaacacuaucguugaucuagaaucggaugggaagccacagaaagcugggagcaauaauuccaauaagucccugcagucggcaggauucaccgccgggcuuaccuauucccagcucaugacccucaaggacucaaugcugcagcuugauccaaaugccaagaccuggauggacauugagggaagaccugaggauccgguggagguugcccuuuaucaaccaaguucaggcugcuauauucacuucuuucgugagccuacugauuugaagcaguuuaagcaagaugccaaguauucacauggaauugaugucacagaccucuucgcugcacagccagguuugaccagugcuguuauagaggcacuuccucggaacauggucaucaccugucagggaucugaugacauucgaaagcuccuugaaucacaggggagaaaggauaucaaacugauugacauuguucucaacaaaacugauucuaggaaguaugagaaugcagucugggaucaguacaaagacuuaugccauaugcacacaggugucguuguugagaagaagaaaagaggugguaaagaggagauaaccccucacugugcccugauggacugcaucauguuugacgcagcagugucagguggauugaaaacaaugguucugagagcagugcuacccagagacaugguguucagaacaucgacacccaaagucguccuguaa

SEQ ID NO: 7992 - RNA, 1710 nt, Artificial Sequence
  derived and/or modified CDS sequence (wt) from LASV(G2723-SLE-2012;Clade IV)__AIT17323__NP
augagugccucaaaggagauaaaguccuuccuguggacacaaucuuugaggagggaauugucugguuacugcucuaacaucaaacuacagguggugaaagaugcccaggcucuuuuacauggacuugacuucucugaggucagcaauguucagcgguugaugcguaaacagaggagagaugacagugaucuaaaacgauugagggauuuaaaucaagccguuaauaaucuugucgagcugaaaucaacucaacagaagaguguacugagaguuggaacucugaccucagaugacuuguuaguuuuggcugccgaccuagagaagcugaaaucaaaagugauuagaacagaaagaccacuaagcucagguguuuauaugggcaaccugaguucgcaacaacuugaccagagacgagcucuccugaauaugauaggaaugagugguggcaaucagggggcucaagucgggagagauggaguggugagaguuugggaugugaagaaugcagauuugcucaacaaucaguuuggcaccaugccaagucugacacuggcauguuuaacaaaacaagggcagguugacuugaaugauguagugcaagcacuaacagauuuaggccugaucuacacagcaaaguauccuaacacuucagacuuggacagguuggcucagagccacccuauucuaaacaugauagacaccaaaaagagcucccugaacaucucagguuacaauuuuagcuugggcgcagcugugaaggcaggagccugcaugcuggauggugguaacauguuagagacaaucaaggugucaccucaaacaauggauggcauccugaaguccaucuugaaagugaaaaaggcucuugggauguucauaucugaaaccccuggcgaaaggaauccuuaugagaacauacucuacaagauuuguuugucaggggauggguggccauauauugcaucaagaaccucaauaacagggagggcuugggaaaacaccaucguugaucuggaaucggaugggaaaccacagaaagcugggagcaauaauuccaauaagucucugcagucggcaggauucaccgccgggcuuaccuauucucagcucaugacccucaaagauucaaugcugcagcuugauccaaaugcuaagaccuggauggacauugagggaagaccugaggauccgguggaaguugcccuuuaucaaccaaguucaggcugcuacauucacuucuuucgugagccuacugacuugaagcaguucaagcaagaugcuaaguauucacauggaauugaugucacagaccucuucgcugcacagccagguuugaccagugcuguuauagaggcgcuuccucggaacauggucaucaccugucaaggaucugaugacauucgaaagcuccuugaaucacaagggagaaaggauaucaaacuaauugacauugcucucaacaaaacugauucuaggaaguaugagaaugcagucugggaucaguacaaagacuuaugccacaugcacacaggugucguuguugagaagaagaaaagaggugguaaagaggagauaaccccucacugugcccugauggauugcaucauguuugaugcagcagugucagguggauugaagacacugguucugagagcagugcuacccagagacaugguguucagaacaucuacacccaaagucguccuguaa

SEQ ID NO: 7993 - RNA, 1710 nt, Artificial Sequence
  derived and/or modified CDS sequence (wt) from LASV(G2789-SLE-2012;Clade IV)__AIT17325__NP
augagugccucaaaggagauaaaguccuuccuauggacacaauccuugaggagagaauuaucuggcuauuguuccaacaucaaacuacagguggugaaggaugcccaggcucuuuuacauggacuugacuucucugaaguaagcaauguccagcgguugaugcgcaaacaaaggagggaugauaaugaucuaaaacgguugagggauuuaaaccaagcagugaacaaccuuguugagcugaaaucuacucagcaaaagaguguacugaggguugggacucugaccucagaugacuugcuaguucuagcugcugaccuugagaaacuaaaaucaaaagugaccagaacagaaaggccuuugagcgcagguguuuacaugggcaaccugagcucacagcaacuugaccaaagacgagcucuucuaaauaugauaggaaugacugguggcagucgaggggcucaggcugggggagauggaguggugagaguuugggaugugaagaacgcagaccugcuuaacaaucaguucggcaccaugccaagucugacauuggcauguuuaacaaaacaaggacaaguugacuugaaugauguaguacaggcacuaacagauuugggucugaucuacacagcaaaguaccccaacaccucagacuuagacaggcugacucagagccaccccauccuaaacaugauagacaccaagaaaaguucccugaacaucucaggcuacaauuuuagcuugggugcagcugugaaagcaggagccuguaugcuagaugguggcaacaugcuggagacaaucaagguaucaccucagacaauggauggcauccucaagucuauacugaaggucaaaaagagucuuggaauguucauuucagacacccccggugaaaggaacccuuaugaaaauauacucuacaaaauuuguuugucaggggauggauggccauauauugcaucaagaacuucaauaacaggaagagccugggaaaacacugucguugaccuggaaucagauggaaaaccacagaaagcugggggcaacaauuccaacaaaucccuccagucagcaggguucacugcugggcucacuuauucucaacucaugacucucaaggauacaaugcugcagcuugauccaaaugccaagacuuggauggauauugagggaagaccugaagauccgguggaggucgcucucuaucagccaaguucagguuguuacauucacuucuuccgugaaccuacugauuuaaaacaauucaaacaagaugcuaaguauucacauggaauugauguuacagaccucuucgcugcacagccaggcuugaccagugcuguuauagaagcacuuccccggaacauggucaucaccugucagggaucugaugacauaagaaagcuucuugaaucacaaggaagaaaagauauuaaacuaauugacauugcccucagcaaaguugacucuagaaaguaugaaaaugcaguuugggaccaauauaaagauuuaugccauaugcauacaggaguuguuguugaaaagaagaaaagagguggcaaagaggaaauaaccccacacugugcucuaauggauugcauuauguuugaugcagcagugucaggaggauugaacacauugguucugagggcagugcuaccuagagacaugguguuuagaacaucuacacccaaggucguccuguaa

SEQ ID NO: 7994 - RNA, 1710 nt, Artificial Sequence
  derived and/or modified CDS sequence (wt) from LASV(G2868-SLE-2012;Clade IV)__AIT17329__NP
augagugccucaaaggaaaucaaauccuuuuuguggacacaaucuuugaggagagaacuaucugguuacugcuccaacaucaaacuacagguggugaaagaugcccaggcucuuuuacauggacuugacuucucugaggucagcaauguucaacgguugaugcgcaaggagagaagggaugacagugauuugaaacgauugagagaccuaaaucaaacagucaacaaucuuguugaauuaaaaucaacucaacagaagaguauacugagaguugggacucuaaccucagaugacuuauuaaucuuagccgcugauuuagagaaguugaagucaaaggugaucagaacagaaaggccauugagugcaggugucuauaugggcaaucugagcucacagcaacuugaccaaagaagagcucuucugaauaugauaggaaugaguagugguaaucaaggggcucaggcugggagagauggagugguaagaguuugggaugugaaaaaugcagaguugcucaauaaucaguucgggaccaugccaagucugacacuggcaugucugacaaaacaggggcagguugacuugaaugaugcaguacaagcauuaacagauuuggguuugaucuacacagcaaaguaucccaacacuucagacuuagacaggcugacucaaagccaccccauccuaaauaugauugacaccaagaaaagcuccuuaaauaucucagguuacaauuuuagcuugggugcagcuguaaaggcaggagcuugcaugcuggaugguggcaauauguuggaaacaaucaaggugucaccucagacaauggaugguauccucaaauccaucuuaaaggucaagaaggcucuuggaauguucauuucagacaccccuggcgagaggaauccuuaugaaaacauacucuacaagauuuguuugucaggggauggauggccauauauugcaucaagaacuucaauaacaggaagggccugggaaaacacugucguugauuuggaaucagaugggaugccacagaaggcugguagcagcaguuccaauaaaucccugcagucggcaggguuugucgcugggcuuaccuauucucagcugaugacccucaaagaugcaaugcugcaacuugacccaaaugcuaagaccuggauggauauugagggaagaccugaagauccaguggaaauugcccucuaucaaccaaguucaggcugcuacauacacuucuuccgugaaccuacugauuuaaagcaguucaaacaagaugcuaaguacucacaugguauugauguuacagaccucuucgcugcacaaccgggcuugaccagugcuguuauugaugcacucccccggaauauggucauuaccugucagggguccgaugacauaaggaaacuucuugaaucacaaggaagaaaggauaucaaacuaauugauauugcccucagcaaagcugauuccaggaaguaugaaaaugcagucugggaucaguauaaagaccuaugccacaugcacacagguguuguuguugaaaagaagaaaagaggcggcaaggaggaaauaaccccucacugugcacuaauggacugcaucauguaugaugcagcagugucaggaggacugaacacaucaguuuugagagcagugcugcccagagauaugguguucagaacaucgacacccagagucguccuguaa

SEQ ID NO: 7995 - RNA, 1710 nt, Artificial Sequence
  derived and/or modified CDS sequence (wt) from LASV(G2903-SLE-2012;Clade IV)__AIT17333__NP
augagugccucaaaggagauaaaauccuuuuuguggacacagucuuugaggagggaguuaucugguuacugcuccaacaucaaacuacagguggugaaagaugcucaagcccuuuuacauggacuugacuuuuccgaagucaguaauguucaacgguugaugcgcaaggagaggagggaugacaaugauuugaaacgguugagagaccugaaucaagcgguaaacaaucuuguugaauuaaaaucaacucaacaaaagaguguacugaggguugggacucuaaccucagaugacuuguuaauccuggccgcugaucuagagaaguugaagucaaaggugaccagaacagaaaggccacugagugccggugucuauaugggcaaccuaagcucacagcaacuugaccaaagaagagcucuucugaauaugauaggaaugagugguggcaaucaaggggcucgggcugggagagauggagugguaagaguuugggaugugaaaaaugcagaguugcucaauaaucaguucggaaccaugccaagccugacacuggcaugucugacuaaacaggggcagguugacuugaaugaugcaguacaggcacugacagauuuggguuugaucuacacagcaaaguaucccaauacuucagacuuagacaggcugacucaaagucaccccauucuaaauaugauugacaccaagaaaagcucuuugaauaucucagguuauaacuuuagcuugggugcagcugugaaggcaggagccugcaugcuggaugguggcaacauguuggagacaaucaaggugucaccucagacaauggauagcauccuuaaauccauuuuaaaagucaaaaaggcucuagggauguuuauuucagacaccccuggugaaaggaauccuuaugaaaacauacucuacaagauuuguuugucaggagauggauggccauauauugcaucaagaaccucaauaacaggaagggcuugggaaaacacugucguugaucuggaaucagaugggaagccacagaaagcuggcagcaacaauuccaacaaaucccuacagucggcaggguuugcagcugggcucaccuauucucagcugaugacccucaaagaugcaaugcugcaacuugacccaaaugcuaagacuuggauggacauugaaggaagacccgaagacccaguggaaauagcccucuaucaaccaaguucagguugcuacauacacuucuuucgugaaccuacugauuuaaagcaguucaagcaggaugcuaaguacucacaugggauugaugucacagaccucuuugcugcacaaccuggcuugaccagugcuguuauugaugcacucccccggaauauggucaucaccugucagggguccgaugacauaaggaaacuccuugaaucacaaggaaggaaagacaucaaauuaauugauauugcccucagcaagacugauuccaggaaguaugaaaaugcagucugggaucaauauaaagaccuaugucacaugcacacagguauuguuguugagaagaagaaaagaggcgguaaagaggaaauaacuccucacugugcacuaauggacugcaucauguuugaugcagcagugucaggagggcugaacacaucaguuuugagagcagugcugcccagagauaugguguucagaacaucgacaccuagagucguccuguaa

SEQ ID NO: 7996 - RNA, 1710 nt, Artificial Sequence
  derived and/or modified CDS sequence (wt) from LASV(G2906-SLE-2012;Clade IV)__AIT17335__NP
augagugccucaaaggaaauaaaguccuuucuguggacacagucauugaggagggaauugucugguuauugcucuaacaucaaacuacagguggugaaagaugcgcaagcucuuuuacauggacuugacuucuccgaagucaguaauguucaacgguugaugcgcaaggagagaagagaugacagugauuugaaacgguugagggaccuaaaucaagcugucaacaaccuuguugaguuaaaaucaacucaacaaaaaaguauacugagaguugggacccuaaccucagaugacuuauuaauuuuagcugcugaucuagagaaguugaaaucaaaggugaccaggacagaaaggccauugagugcaggugucuauaugggcaaccugagcucacagcaacuugaccaaagacgagcucuucugaguaugauaggaaugaguagugguguucaaggggcucgggcugggagagauggaguggugagaguuugggauguaaaaaaugcagaguugcuuaauaaucaguucggaaccaugccgagucugacacuagcauguuugacaaaacaggggcagguugacuugaaugacguagugcaagcacugacagauuugggucuaaucuacacagcaaaguauccaaauacuucagauuuagauaggcugacucaaagucaccccauccugaacaugauugacaccaagaaaagcucucugaauaucucagguuauaauuuuagcuugggugcagcugugaaggcaggagcuugcaugcuggacgguggcaacauguuggagacaauuaaggugucaccucagacaauggauggcauccucaaguccaucuuaaaggucaagaaagcucuugggauguucaucucagagaccccuggugaaaggaacccuuaugagaacauacucuacaagauuugcuuaucaggagauggauggccauauauugcaucaagaaccucaauaacaggaagggcuugggaaaacacugucguugauuuggaaucagaugggaagccacagaaagcuggcagcaacaacuccaauaaaucucugcaguccacaggguuugcugcugggcuuaccuauucucagcugaugacccucaaagacgcaaugcugcaacuugacccaaaugcuaagaccuggauggacauugaaggaagaccugaagauccaguggagguugcccucuaucaaccaaguucaggcugcuacauacacuucuuccgugaacccacugauuuaaagcaguucaagcaggaugcuaaguacucacaugggauugauguuacagaccucuucgcugcgcaaccgggcuugaccagugcugucauagaugcacuuccccgaaauauggucauuaccugucaggggucugaugacauaaagaaacuccuugaaucacaagguagaaaagacaucaagcuaauugacauugcccucaguaaaacugauuccaggaaguaugaaaaugcagucugggaucaauauaaagacuuaugccacaugcacacagguguugucguugaaaagaagaaaagaggcgguaaagaggaaauaaccccucacugugcacuaauggacugcaucauguuugaugcagcaguaucaggaggacugaacacaucggucuugagagcagugcugcccagagauaugguguucagaacaucgacaccuagagucguccuguaa

SEQ ID NO: 7997 - RNA, 1710 nt, Artificial Sequence
  derived and/or modified CDS sequence (wt) from LASV(G2944-SLE-2012;Clade IV)__AIT17341__NP
augagugccucaaaggaaauaaaauccuuuuuguggacacaaucuuugaggagggaauuaucugguuacugcuccaacaucaaacugcagguggugaaggaugcccaggcucuuuuacaugggcuugacuucucugaagucaguaauguucaacgguugaugcgcaaggagagaagggaugacaaugauuuaaaacgguugagggaccuaaaucaagcagucaacaaucuuguugaauuaaaaucaacucaacaaaagagcauacugagaguugggacucuaaccucagaugacuuauuaauccuggccgcugaucuagagaaguugaagucgaaggugaccagaacagaaaggccauugagugcaggugucuauaugggcaaccuaagcucacagcaacuugaccaaagaagagcucuucugaacaugauaggaaugaguggugguaaucaaggggcucgggcugggagagauggaguggucagaguuugggaugugaaaaaugcagaguugcucaauaaucaguucgggaccaugccaagucugacacuggcaugucugacaaaacaggggcagguugacuugaaugaugcaguacaagcauugacagauuuagguuugaucuacacagcgaaguaccccaauacuucagacuuggacaggcugacucaaagucaccccauccuaaauaugauugacaccaagaaaagcucuuugaacaucucagguuauaauuuuagcuugggugcagcugugaaggcaggagcuuguaugcuggaugguggcaauauguuggaaacaaucaaggugucaccucagacaauggaugguauucucaaauccauuuuaaaggucaagaaggcucuugggauguucauaucagaugccccuggugaaaggaauccuuaugaaaacauacucuacaagauuuguuugucaggagacggauggccauacauugcaucaagaaccucaauaacaggaagggccugggaaaacacuguuguugaucuagaaucagaugggaagccacagaaagcuggcaguaacgguuccaauaaaucucugcagucggcaggguuuaccgcugggcucaccuauucucagcugaugacccucaaggaugcaaugcugcaacuugacccaaaugcuaagaccuggauggacauugaaggaagaccugaagauccaguggaaaucgcccucuaucaaccaaguucagggugcuacauacacuucuuccgugaaccuacugauuuaaagcaguucaagcaggaugcuaaguacucacaugggauugaugucacggaccucuucgcugcacagccgggcuugaccagugcugucauugaugcacucccccggaauauggucaucaccugccagggaucugaugacauaaggaaacucuuugaaucacaaggaagaaaagacauuaaacuaauugacauugcccucagcaaggcugauuccaggaaguaugaaaaugcagucugggaucaguauaaagacuuaugccacaugcauacagguguuguuguugagaagaagaaaagaggugguaaagaggaaauaaccccucacugugcacuaauggacugcauuauguuugaugcagcaguaucaggaggacugaacacaucaguuuugagagcagugcugcccagagacaugguguucagaacaucgacaccuagggucguccuguaa

SEQ ID NO: 7998 - RNA, 1710 nt, Artificial Sequence
  derived and/or modified CDS sequence (wt) from LASV(G3010-SLE-2013;Clade IV)__AIT17345__NP
augagugccucaaaggaaauaaaguccuuucuguggacacagucauugaggagggaauugucugguuauuguucuaacaucaaacuacagguggugaaagaugcgcaagcucuuuuacauggacuugacuucuccgaagucaguaauguucaacgguugaugcgcaaggagagaagggaugacaaugauuugaaacgguugagggaccuaaaucaagcugucaacaaccuuguugaguuaaaaucaacucaacaaaaaaguauacugagaguugggacccuaaccucagaugacuuguuaaucuuggcugcugaucuagagaaguugaaaucaaaggugaccaggacagaaaggccauugagugcaggugucuauaugggcaaccugagcucacagcaacuugaccaaagacgagcucuucugaguaugauaggaaugaguagugguguucaaggggcucgggcugggagagauggaguggugagaguuugggauguaaaaaaugcagaguugcuuaauaaucaguucggaaccaugccaagucugacacuagcauguuugacaaaacaggggcagguugacuugaaugauguagugcaagcauugacagauuuggguuugaucuacacagcaaaguacccaaauacuucagauuuagauaggcugacucaaagucaccccauccugaacaugauugacaccaagaaaagcucuuugaauaucucagguuauaauuucagcuugggugcagcuguaaaggcaggagcuugcaugcuggaugguggcaacauguuggagacaaucaaggugucaccucagacaauggauggcauccucaaguccaucuuaaaggucaagaaagcucuugggauguucaucucagagaccccuggugaaaggaauccuuaugagaacauacucuacaagaucugucuaucaggagauggauggccauauauugcaucaagaaccucaauaacaggaagggccugggaaaacacugucguugaucuggaaucagaugggaagccacaaaaagcuggcagcaacaauuccaauaaaucccugcagucggcaggguuuaccgcugggcuuaccuauucucagcugaugacccucaaagacgcaaugcugcaacuugacccaaaugcuaagaccuggauggacauugaaggaaggccugaagauccaguggagguugcccucuaucaaccaaguucaggcugcuacauacacuucuuccgugaacccacugauuugaagcaguucaagcaggaugcuaaguacucacaugggauugauguuacagaccucuucgcugcgcaaccaggcuugaccagugcugucauagaugcacuuccccggaauauggucauuaccugucaggggucugaugacauaaagaaacuccuugaaucacaagguaggaaagacaucaagcuaauugauauugcccucaguaaaacugauuccaggaaguaugaaaaugcagucugggaccaguauaaagacuuaugccacaugcacacagguguugucguugaaaagaagaaaagaggcgguaaagaggaaauaaccccucacugugcacuaauggacugcaucauguuugaugcagcaguaucaggaggacugaacacaucggucuuaagagcagugcugcccagagauaugguguucagaacaucgacaccuagagucguucuguaa

SEQ ID NO: 7999 - RNA, 1710 nt, Artificial Sequence
  derived and/or modified CDS sequence (wt) from LASV(G3016-SLE-2013;Clade IV)__AIT17349__NP
augagugccucaaaggaaauaaaauccuuuuuguggacacaauccuugaggagggaauugucugguuacugcuccaacaucaaacugcagguggugaaagaugcccaggcucuuuuacacggacucgacuucucugaagucaguaauguucaacgguugaugcgcaaggagagaagggaugacagugauuugaaacgguugagggacuuaaaucaagcggucaacaaucuuguugaauuaaaaucaacucaacaaaagaguauacugagagucgggacucuaaccucagaugacuuauuaauccuggcugcugaucuagagaaguugaagucgaaggugaccaggacagaaaggccauugagugcaggugucuauaugggcaaccugagcucacagcaacuugaccagagaagagcucuuuugaacauguuaggaaugagugguagcaaucaaggggcucgggcuggaagagauggaguggucagaguuugggaugugaaaaaugcagaguugcucaauaaucaguucgggacuaugccaagucugacacuggcaugccugacaaaacaggggcagguugaccugaaugaugcaguacaagcauugacagauuuagguuugaucuacacagcgaaguaucccaauacuucggacuuagacaggcugacucaaagucaccccauccuaaauaugauugacaccaagaaaagcuccuugaauaucucagguuauaauuuuagcuugggugcagcugugaaggcaggagcuuguaugcuggaugguggcaauauguuggagacaaucaaggugucaccucagacaauggaugguauucucaaauccauuuugaaggucaaaaaagcucuugggauguucauuucagauaccccuggugaaaggaacccuuacgagaacauacucuacaagauuugcuugucaggagauggcuggccauacauugcgucaagaaccucaauaacaggaagggccugggaaaacacuguuguugaucuggaaucagacgagaagccacagaaagcuggcagcaacaguuccaacaaaucucugcagucggcaggauuuaccgcugggcuuaccuauucucagcugaugacccucaaggaugcaaugcugcaacuugacccaaaugcuaagaccuggauggacaucgaaggaagaccugaagauccaguggaaaucgcccucuaucaaccaaguucggggugcuacauacacuucuuccgugaaccuacugaucuaaagcaguucaagcaggaugcuaaguacucacaugggauugaugucacggaucuuuucgcugcacaaccgggcuugaccagugcugucauugaugcacucccccggaauauggucaucaccugccaggggucugaugacauaaggaaacuccuugaaucacaaggaagaaaagacaucaaacuaauugacauugcccucagcaagacugauuccaggaaguaugaaaaugcagucugggaucaguauaaagacuuaugccacaugcacacaggcauuguuguugagaaaaagaaaagaggcgguaaagaggaaauaaccccucacugugcacuaauggauugcauuauguuugaugcagcagugucaggaggacugaacgcaucgguuuugagagcagugcugcccagagauaugguguucagaacaucgacaccuagagucguccuguaa

SEQ ID NO: 8000 - RNA, 1710 nt, Artificial Sequence
  derived and/or modified CDS sequence (wt) from LASV(G3034-SLE-2013;Clade IV)__AIT17351__NP
augagugccucaaaggagauaaaguccuucuuguggacacaaucuuugaggagggaacuuucugguuauuguuccaauauuaaauuacagguggugaaagacgcccaagcucucuuacauggacuugauuucucugaagucagcaauguucagcgauugaugcgcaaacagagaagggaugauggugaucuaaaacgguugagggaucucaaucaagcaguuaacaaccuuguugaguugaaaucaacucaacaaaagaguguguugagaguugggacuuugaccucagaugaccugcuaaucuuggcugcugaccuagagaaacugaaaucaaaaguaauuaggacagaaaggccguugagugcagguguuuauauggguaaccugaguucacaacaacuugaacagagacgggcucucuuaaacaugauaggaaugagcaguggcaaucaaggggcucggaccgggaaagauggaguggugagaauuugggaugugaagaaugcggacuugcuuaacaaucaguuugguaccaugccaagucuaacacuggcauguuugacaaaacaggggcagguugaccuaaaugauguugugcaggcgcuaacagauuugggucugauuuacacagcaaaauacccuaacacuucagacuuagacaggcugacucagagccaccccauucuaaauaugguagacaccagcaaaagcuccuugaacaucucagguuauaauuuuagucugggugcagcuguaaaagcaggagcuugcaugcuagauggugguaacauguuggagacaaucaaggugucaccucagacaauggauggcauccucaaguccauuuuaaagguuaaaaagagucuugggauguucguaucagacaccccuggcgaaaggaauccuuaugaaaauauacucuacaaaauuugucugucaggggauggguggccguacauugcaucaagaacuucaauaacaggaagggccugggaaaacacugucguugauuuggaaucaaaugggaagccacaaaaagcugggagcaacaauuccaacaaaucucuacagucaacaggauucacugcagggcucaccuauucucagcucaugacucucaaagaugcaaugcugcagcuugauccaaaugcuaagacuuggauggacauugaagggagaccugaagauccgguggaaauugcuuuguaucagccaaguucaggcugcuacauucacuucuuccgugagccuacugacuuaaagcaguuuaagcaagaugcuaaguacucacaugguauugaugugacagaccucuucgcugcacaaccuggcuugaccagugcuguuauagacacacucccucggaauaugguuaucaccugccaggggucugaugacauaaggaaacuccuugaaucacagggaagaaaagacaucaaacuaauugacauugcccucaguaaaauugauucuaggaaguaugaaaaugcagucugggaucaguauaaagacuuaugccauaugcacacagguguugucguugagaagaagaaaagagguggcaaagaggaaauaaccccucacugugcucuaauggacugcaucauguuugaugcagcaguuucaggaggacugaaugcaucaguucugagagcuguguuaccuagagauaugguguuuagaacaucgacaccuagagucguccuguaa

SEQ ID NO: 8001 - RNA, 1710 nt, Artificial Sequence
  derived and/or modified CDS sequence (wt) from LASV(G3110-SLE-2013;Clade IV)__AIT17361__NP
augagugccucaaaagaaauaaaguccuuuuuguggacacaaucuuugaggagggaauuaucuggcuacugcuccaacaucaaacuucagguggugaaagaugcucaggcucuuuugcauggacuugacuucuccgaagucagcaauguucaacgguugaugcgcaaagagagaagggaugacagugauuugaaacgguugagggaccugaaccaagcggucaacaaccuuguugaguuaaaaucaacucaacaaaagaguguacugagaguugggacucuaaccucagaugacuuauuagucuuagcugcugaucuagagaagcugaaaucaaaggugaccaggacagaaaggccauugagcgcaggugucuauaugggcaaccugagcucacagcaacuugaccaaagacgagcucuucugaacaugauaggaaugaguggugguaaucaaggagcucgggcugggagagauggaguggugagaauuugggaugucaaaaaugcagaguugcuuaauaaucaguucgggaccaugccaagucugacacuggcauguuugacaaaacaagggcagguugacuuaaaugaugucgugcaagcauugacagauuuggguuugaucuacacagcaaaguaccccaacacuucagacuuggacaggcugacucaaagucacccuauccuaaauaugauugacaccaagaaaagcucuuugaauaucucagguuacaauuuuaguuugggugcagcugugaaggcaggagcuugcaugcuagaugguggcaauauguuggagacaaucaaggugucaccucagacaauggaugguauccucaaauccauuuuaaaggucaagaaggcucucgggauguucauuucagacacuccuggugagaggaauccuuaugaaaacauacucuauaagauuuguuugucaggggauggauggccauauauugcaucaagaacuucaauaacaggaagggccugggaaaacacuaucguugaucuggagucggaugggaagccacagaagacuaauaacaccaauuccaacaaaucccugcagucggcaggguuugccgcugggcuaacauauucucagcuuaugacccucaaggaugcaaugcugcaacuugacccaaaugccaagaccuggauggacauugaagggagacccgaagauccaguagaaauugcccucuaucaaccaaguucaggcugcuacauacacuucuuccgugagccuacugauuuaaagcaguucaagcaggaugcuaaauacucacaugggauugaugucacagaccucuuugcugcacaaccaggccugaccagugcuguuauagauacacucccccggaacaugguuauuaccugucagggguccgaagacauuaggagacuccuugaaucacaaggaagaaaagacaucaaacuaauugauauugcccucagcaagacugauuccaggaaguaugagaaugcagucugggaucaguauaaagauuuaugccacaugcacacaggugucguuguugaaaagaagaagaagggcgguaaagaggaaauaacuccccacugugcacuaauggauuguaucauguuugaugcagcagugucaggaggacugaacacaucaguuuugagagcagugcuacccagagacaugguguucagaacaucaacaccuagagucguccuguaa

SEQ ID NO: 8002 - RNA, 1710 nt, Artificial Sequence
  derived and/or modified CDS sequence (wt) from LASV(G3148-SLE-2013;Clade IV)__AIT17365__NP
augagugccucaaaggaaauaaaauccuuuuuguggacacaauccuugaggagggaauuaucugguuacugcuccaacaucaaacugcagguggugaaggaugcccaggcucuuuuacaugggcuugacuucucugaagucaguaauguucaacgguugaugcgcaaggagagaagggaugacaaugauuugaagcgguugagggaccuaaaucaagcagucaacaaucuuguugaauuaaaaucaacucaacaaaagaguauacugagaguugggacucuaaccucagaugacuuauuaaucuuggccgcugaucuagagaaguugaagucgaaggugaccagaacagaaaggccauugagugcaggugucuauaugggcaaccuaagcucacagcaacuugaccaaagaagagcccuucugaacaugauaggaaugagugguaguaaucaaggggcucaggcugggagagauggaguggucaggguuugggaugugaaaaaugcagaguugcucaauaaucaguucgggaccaugccaaguuugacacuggcaugucuaacaaaacaggggcagguugacuugaaugaugcaguacaagcauugacagauuuagguuugaucuacacagcgaaguaccccaauacuucagacuuggacaggcugacucaaagucaccccauccuaaauaugauugauacuaagaaaagcucuuugaacaucucagguuauaauuuuagcuugggugcagcugugaaggcaggagcuuguaugcuggaugguggcaauauguuggagacaaucaaggugucaccucagacaauggaugguauucucaaauccauuuuaaaggucaaaaaggcucuugggauguucauuucagaugccccuggugaaaggaauccuuaugaaaacauacucuacaagauuuguuugucaggagacggauggccauacauugcaucaagaaccucaauaacaggaagggccugggaaaacacuguuguugaucuggaaucagaugggaagccacagaaagcuggcaguaacgguuccaauaaaucucugcagucggcaggauuuaccgcugggcucaccuauucucagcugaugacccucaaggaugcaaugcugcaacuugacccaaaugcuaagaccuggauggacauugaaggaagaccugaagauccaguggaaaucgcccucuaucaaccaaguucagggugcuacauacacuucuuccgugaaccuacugauuuaaagcaguucaagcaggaugcuaaguacucacaugggauugaugucacggaccucuucgccgcacaaccgggcuugaccagugcugucauugaugcacucccccggaauauggucaucaccugccaggggucugaugacauaaggaaacucuuugaaucacaaggaagaaaagacauuaaacuaauugacauugcccucagcaagacugauuccaggaaguaugaaaaugcagucugggaucaguauaaagacuuaugccacaugcauacagguauuguuguugagaagaagaaaagaggcggcaaagaggaaauaaccccucacugugcacugauggacugcaucauguuugaugcagcaguaucaggaggacugaacacaucaguuuugagagcagugcugcccagagacaugguguucagaacaucgacaccuagggucguccuguaa

SEQ ID NO: 8003 - RNA, 1710 nt, Artificial Sequence
  derived and/or modified CDS sequence (wt) from LASV(G3151-SLE-2013;Clade IV)__AIT17369__NP
augagugccucaaaagaaauaaaguccuuuuuguggacacaaucuuugaggagggaauuaucuggcuacugcuccaacaucaaacuucagguggugaaagaugcucaggcucuuuugcauggacuugacuucuccgaagucagcaauguucaacgguugaugcguaaagagagaagggaugacagugauuugaaacgguugagggaccugaaccaagcggucaacaaccuuguugaguuaaaaucaacucaacaaaagagugugcugagaguugggacucuaaccucagaugacuuauuagucuuagcugcugaucuagagaagcugaaaucaaaggugaccaggacagaaaggccauugagcgcaggugucuauaugggcaaccugagcucacagcaacuugaccaaagacgagcucuucugagcaugauaggaaugaguggugguaaucaaggagcucgggcugggagagauggaguggugagaauuugggauguuaaaaaugcagaguugcuuaauaaucaguucgggaccaugccaagucugacacuggcauguuugacaaaacaagggcagguugacuuaaaugaugucgugcaagcauuaacagauuuggguuugaucuacacagcaaaguaccccaacacuucagacuuggacaggcugacucaaagucacccuauucuaaauaugauugacaccaagaaaagcucuuugaacaucucagguuauaauuuuaguuugggugcagcugugaaggcaggagcuugcaugcuagaugguggcaauauguuggagacaauuaaggugucaccucagacaauggaugguauccucaaauccauuuuaaaggucaagaaggcucucgggauguucauuucagacacuccuggugagaggaauccuuaugaaaacauacucuauaagaucuguuugucgggggauggauggccauauauugcaucaagaacuucaauaacaggaagggccugggaaaacacuaucguugaucuggagucggaugggaagccacagaagacuaguaacaccaauuccaacaaaucccuacagucggcaggguuugcugcugggcuaacauauucucagcuuaugacccucaaggaugcaaugcugcaacuugacccaaaugccaagaccuggauggacauugaagggagacccgaagauccaguagaaauugcccucuaucaaccaaguucaggcugcuacauacacuucuuccgugagccuacugauuuaaagcaguucaagcaggaugcuaaauacucacaugggauugaugucacagaccucuuugcugcacaaccaggccugaccagugcuguuauagaugcacucccccggaacaugguuauuaccugucagggguccgaagacauuaggaaacuccuugaaucacaaggaagaaaagacaucaaacuaauugauauugcccucagcaaaacugauuccaggaaguaugagaaugcagucugggaccaguauaaagauuugugccacaugcauacaggugucguuguugaaaagaagaagaagggcgguaaagaggaaauaacuccccacugugcacuaauggauuguaucauguuugaugcagcagugucaggaggacugaacacaucaguuuugagagcagugcuacccagagacaugguguucagaacaucaacaccuagagucguccuguaa

SEQ ID NO: 8004 - RNA, 1710 nt, Artificial Sequence
  derived and/or modified CDS sequence (wt) from LASV(G3157-SLE-2013;Clade IV)__AIT17371__NP
augagugccucaaaggaaauaaaauccuuuuuguggacacaauccuugaggagggaauuaucugguuacugcuccaacaucaaacugcagguggugaaggaugcccaggcucuuuuacaugggcuugacuucucugaagucaguaauguucaacgguugaugcgcaaggagagaagggaugacaaugauuugaagcgguugagggaccuaaaucaagcagucaacaaucuuguugaauuaaaaucaacucaacaaaagaguauacugagaguugggacucuaaccucagaugacuuauuaaucuuggccgcugaucuagagaaguugaagucgaaggugaccagaacagaaaggccauugagugcaggugucuauaugggcaaccuaagcucacagcaacuugaccaaagaagagcccuucugaacaugauaggaaugagugguaguaaucaaggggcucaggcugggagagauggaguggucaggguuugggaugugaaaaaugcagaguugcucaauaaucaguucgggaccaugccaaguuugacacuggcaugucuaacaaaacaggggcagguugacuugaaugaugcaguacaagcauugacagauuuagguuugaucuacacagcgaaguaccccaauacuucagacuuggacaggcugacucaaagucaccccauccuaaauaugauugauacuaagaaaagcucuuugaacaucucagguuauaauuuuagcuugggugcagcugugaaggcaggagcuuguaugcuggaugguggcaauauguuggagacaaucaaggugucaccucagacaauggaugguauucucaaauccauuuuaaaggucaagaaggcucuugggauguucauuucagaugccccuggugaaaggaauccuuaugaaaacauacucuacaagauuuguuugucaggagacggauggccauacauugcaucaagaaccucaauaacaggaagggccugggaaaacacuguuguugaucuggaaucagaugggaagccacagaaagcuggcaguaacaguuccaauaaaucucugcagucggcaggauuuaccgcugggcucaccuauucucagcugaugacccucaaggaugcaaugcugcaacuugacccaaaugcuaagaccuggauggacauugaaggaagaccugaagauccaguggaaaucgcccucuaucaaccaaguucagggugcuacauacacuucuuccgugaaccuacugauuuaaagcaguucaagcaggaugcuaaguacucacaugggauugaugucacggaccucuucgccgcacaaccgggcuugaccagugcugucauugaugcacucccccggaauauggucaucaccugccaggggucugaugacauaaggaaacucuuugaaucacaaggaagaaaagacauuaaacuaauugacauugcccucagcaagacugauuccaggaaguaugaaaaugcagucugggaucaguauaaagacuuaugccacaugcauacagguauuguuguugagaagaagaaaagaggcggcaaagaggaaauaaccccucacugugcacugauggacugcaucauguuugaugcagcaguaucaggaggacugaacacaucaguuuugagagcagugcugcccagagacaugguguucagaacaucgacaccuagggucguccuguaa

SEQ ID NO: 8005 - RNA, 1710 nt, Artificial Sequence
  derived and/or modified CDS sequence (wt) from LASV(G3206-SLE-2013;Clade IV)__AIT17379__NP
augagugccucaaaggaaauaaaauccuuuuuguggacacaaucuuugaggagggaguuaucugguuacugcuccaacaucaaacuacagguggugaaagaugcccaagcccuccuacauggacuugacuuuuccgaagucaguaauguucaacgguugaugcgcaaggagaggagggaugauagugauuugaaacgguugagagaccugaaucaagcggucaacaaucuuguugaauuaaaaucaacucaacaaaaaaguguacugaggguggggacucuaaccucagaugacuugcuaaucuuggccgcugaucuagagaaguuaaagucaaaggugaccaggacagaaaggccauuaagugcagguguuuauaugggcaaccuaagcucacagcaacuugaccaaagaagagcucuucugaauaugauaggaaugaguaguggcaaccgaggggcucaggcugggagagacggagugguaagaguuugggaugugaaaaaugcagaguugcucaauaaucaguucgggaccaugccaagcuugacacuggcaugucugacaaaacaggggcagguugacuugaaugaugcaguacaagcauugacagauuuggguuugaucuacacagcaaaguaucccaacacuucagacuuagacaggcugacucaaagccaccccauccuaaacaugguugacacuaagaaaagcucuuugaauaucucagguuauaauuuuagcuugggugcggcugugaaggcaggagccugcaugcuggaugguggcaacauguuggagacaaucaaggugucaccucagacaauggaugguauccucaaguccauuuuaaaggucaaaaaggcucuagggauguucauuucagacaccccuggugaaagaaacccuuaugaaaacauacuuuauaaaauuuguuugucaggagauggauggccauauauugcaucaagaaccucaauaacaggaagggccugggaaaacacugucguugaucuagaaucagaugggaagccacagaaggcuggcagcaacaauuccaauaaaucucuacagucggcaggguuugcagcugggcucaccuauucucagcugaugacccucaaggaugcaaugcugcaacuugacccaaaugcuaagaccuggauggacauugaaggaagaccugaagauccaguggaaauugcccucuaucaaccaaguucagguuguuacauacacuucuuccgugaaccuacugauuugaagcaguucaagcaggaugcuaaguacucacaugggauugaugucacagaucucuucgcugcacaaccgggcuugaccagugcuguuaucgaugcacucccccggaauauggucauuaccugucagggguccgaugacauaaggaaacuccuugaaucacaaggaagaaaagacaucaaacuaauugauauugcccucagcaagacugauuccaggaaguaugaaaaugcagucugggaucaauacaaagacuuaugccacaugcacacagguauuguuguagaaaagaagaaaagaggcgguaaagaggaaauaaccccucacugugcacuaauggauugcaucauguuugaugcagcagugucaggagggcugaacacaucgguuuugagagcagugcugcccagagauaugguguucagaacaucaacaccuagagucguccuguaa

SEQ ID NO: 8006 - RNA, 1710 nt, Artificial Sequence
  derived and/or modified CDS sequence (wt) from LASV(G3234-SLE-2013;Clade IV)__AIT17389__NP
augagugccucaaaggagauaaaguccuucuuguggacacaaucuuugaggagggaacugucugguuauuguuccaauauuaaauuacagguggugaaggaugcccaagcucuuuuacauggacuugauuucucugagguuagcaauguucaacgauugaugcguaaacagagaagggaugauggugaucuaaaacgguugagggaucuuaaucaagcagucaacaaccuuguugaguugaaaucaacucaacaaaagaguguguugagaguugggacuuugaccucagaugacuuguuaauuuuggcugcugaccuagagaagcugaaaucaaaaguaaccagaacagaaaggccguugagcgcagguguuuauauggguaaccugaguucacaacaacuugaccagagacgggcucuccuaaacaugauaggaaugaguggugguaaucaaggggcucggaccgggaaagauggaguggugagaauuugggaugugaaaaaugcggacuugcuuaacaaucaguucgguaccaugccaaguuuaacacuggcaugucuaacaaaacaagggcagguugaccugaaugauguugugcaagcguuaacagauuuggguuugaucuacacagcgaaauaccccaacacuucagacuuagacagguugacucagagccacccuauucuaaauaugauagacaccagcaagagcucccugaacaucucugguuacaauuuuagucugggugcagcuguuaaggcaggggcuugcaugcuagauggugguaacaugcuggagacaaucaagguaucaccucagacaauggauggcauccuuaaguccauucuaaagguuaaaaagagucuugggauguucauaucagacaccccuggcgaaaggaauccuuaugaaaauauacucuauaaaauuugucugucaggagauggguggccguacauugcaucaagaacuucaauaacaggaagggccugggaaaacacugucguugaucuagaaucagaugggaagccacaaaaagcugggagcaacaauuccaacaaaucccuacagucaacaggguucacugccgggcuuaccuauucucagcuuaugacucucaaagaugcaauguugcaacuugauccaaaugcaaagaccuggauggacauugaagggagaccugaggauccgguggaaaucgccuuguaucagccaaguucaggcugcuacauucacuucuuccgugagcccacugauuuaaagcaguucaagcaagaugcuaaguacucacauggaaucgaugugacagaccucuuugcugcacaaccaggcuuaacuagugcugucauagacacacucccucggaacauggucauuaccugccaggggucugaugacauaaggaaacuccuugaaucacagggaagaaaagauaucaaacuaauugacauugcccucaguaaaacugacucaaggaaauaugaaaaugcagucugggaucaguauaaagauuuaugccauaugcacacagguguugucguugagaagaagaaaagaggugguaaagaggaaauaaccccucacugugcucuaauggacugcaucauguuugaugcagcaguuucaggaggacugaaugugucgguucugagagcugugcuaccuagagauaugguguuuagaacaucgacaccuagagucguccuguaa

SEQ ID NO: 8007 - RNA, 1710 nt, Artificial Sequence
  derived and/or modified CDS sequence (wt) from LASV(G3278-SLE-2013;Clade IV)__AIT17399__NP
augagugccucaaaggagauaaaguccuuccuguggacacaaucuuugaggagggaauugucugguuacugcuccaacaucaaauuacagguggugaaggaugcccaggcucuuuuacauggacuugacuucucugaagucagcaauguucagcgguuaaugcguaaacagaggagagaugacagugaucuaaaacgauugagggauuuaaaucaagccguuaacaaucuugucgagcugaaaucaacucaacagaagagugugcugagaguugggacucuaaccucagaugacuuguuaguuuuggcugccgaccuagagaagcugaaaucaaaagugauuagaacagaaagaccacuaagcucagguguuuauaugggcaaccugaguucgcaacaacuugaccaaagacgagcucuccugaacaugauaggaaugagugguggcaaucagggggcucaagucgggagagauggaguggugagaguuugggauguaaagaaugcagaucugcucaacaaucaguuuggcaccaugccaagucugacacuggcauguuuaacaaaacaagggcagguugacuugaaugauguagugcaagcacuaacagauuuaggccugaucuacacagcaaaguauccuaacacuucagacuuggacagauuggcucagagccacccuauucuaaacaugauagacaccaaaaaaagcucccuaaacaucucagguuacaauuuuagcuugggcgcagcugugaaagcaggagccugcaugcuggaugguggaaacauguuagagacaaucaaggugacaccucaaacaauggauggcauccugaaguccaucuugaaaguaaaaaaggcccuugggauguucauaucugaaaccccuggcgaaaggaauccuuaugagaauauacucuacaagauuuguuugucaggggauggguggccauauauugcaucaagaaccucaauaacagggagggcuugggaaaacacugucguugaucuggaaucggaugggaaaccacagaaagcugggaacaauaauuccaauaagucccugcagucggcaggauucaccgccgggcuuaccuacucucagcucaugacccucaaggauucaaugcugcagcuugauccaaaugcuaagaccuggauggacauugagggaagacccgaggauccgguggagguugcccuuuaucaaccaaguucaggcugcuacauucacuucuuucgugagccuacugacuugaagcaguuuaagcaagaugcuaaguauucacauggaauugaugucacagaccucuucgcuacacagccagguuugacuagugcuguuauagaggcgcuuccucggaacauggucaucaccugucagggaucugaugacauucgaaagcuccuugaaucacaagggagaaaggauaucaaacuaauugacauugcucucaacaaaacugauucuaggaaguaugagaaugcagucugggaucaguacaaagaccuaugccacaugcacacaggugucguuguugagaagaagaaaagaggugguaaagaggagauaaccccucacugugcccugauggacugcaucauguuugacgcagcagugucagguggauugaaaacacuggcucugagagcagugcuacccagagacaugguguucagaacaucgacaccuaaagucguccuguaa

SEQ ID NO: 8008 - RNA, 1710 nt, Artificial Sequence
  derived and/or modified CDS sequence (wt) from LASV(G502-SLE-2009;Clade IV)__AIT17127__NP
augagugccucaaaggaaauaaaguccuuucuguggacacaaucauugaggagggaauugucugguuacugcuccaacaucaaacuacaggugguaaaagaugcccaggcucuucugcauggucuugacuucuccgaagucaguaauguucaacgguuaaugcgcaaggagagaagggaugacaaugacuugaaacgguugagggaccuaaaucaagcggucaacaaccuuguugaguuaaaaucaacucaacaaaagaguauacugagaguugggacucuaaccucagaugacuuauuaaucuuagcugcugaucuagagaaguugaaaucaaaggugaucaggacagaaaggccauugagugcaggugucuauaugggcaacuugagcucacagcaacuugaccaaagacgggcucuucugaguaugauaggaaugaguggugguaaucaagggguucgggcugggaaggauggaguggugagaguuugggaugugaaaaaugcagaguugcuuaauaaucaguuugggacuaugccaagucuaacacuggcaugucugacaaaacaggggcagguugacuugaaugaugcagugcaagcacugacagauuugggucugaucuacacagcaaaguaucccaauacuucagacuuagauaggcugacucaaagucaccccaucuuaaacaugauugacaccaagaagaguuccuugaauaucucugguuauaauuuuagcuugggugcagcugugaaagcaggagcuugcaugcuggaugguggcaauauguuggagacaaucaaagugucaccucagacaauggaugguauccucaaauccaucuuaaaggucaagaaggcucuugggauguucaucucagacaccccuggugaaaggaauccuuaugaaaacauacucuacaagauuuguuugucaggagauggauggccauauauugcaucaagaacuucaauaacaggaagagccugggaaaacacugucguugaccuagaaucagaugggaagccacagaaagcuggcagcaacaauuccaauaaaucccugcagucggcaggguuuaccgcugggcuuaccuauucucagcugaugacccucaaggaugcgaugcugcagcuugacccaaacacuaagacuuggauggacaucgaaggaagaccugaagacccaguggaaauugcccucuaucagccaaguucaggcugcuacauacacuuuuuccgugaaccuacugauuuaaagcaguucaagcaggaugcuaaguacucacaugggauugauguuacagaccucuucgcugcacaaccgggcuugaccagugcugucauagaugcacucccccggaauauggucauuaccugucagggguccgaugacauaaggaaacuccuugaaucacaagguagaaaagacaucaaacuaauugauauugcccucaacaaaacugauuccaggaaguaugaaaaugcagucugggaucaguauaaggacuugugccacaugcacacaggugucguuguugaaaagaagaaaagaggcgguaaagaggaaauaaccccucacugugcacuaauggacugcaucauguuugaugcagcagugucaggaggacugaacacaucuguuuugagagcagugcugccuagagauaugguauucagaacaucaacacccagagucguccuguaa

SEQ ID NO: 8009 - RNA, 1710 nt, Artificial Sequence
  derived and/or modified CDS sequence (wt) from LASV(G503-SLE-2009;Clade IV)__AIT17131__NP
augagugccucaaaggaaauaaaauccuuucuguggacacaaucacuaaggagggaauuaucugguuacugcuccaacaucaaacuacagguggugaaggaugcccaggcucuuuuacauggacuugacuucuccgaggucaguaauguccaacgguugaugcgcaaggagagaagggaugacaaugauuugaaacggcugagggaccuaaaucaagcggucaacaaccuuguugaguugaaaucaacucaacaaaagagcauacugagaguugggacucuaagcucagaugacuuauuggucuuagccgcugaucuagagaagcugaaaucaaaggugaccaggacagaaaggccauugagugcgggugucuauaugggcaaccugagcucacagcaacuugaccaaagacgagcucuucugaauaugauaggaaugaguggugguaaucaaggggcucgggcugggagagauggaguggugagaguuugggauguaaaaaaugcagaauugcuuaauaaucaguucgggaccaugccaagucuuacacuggcaugucugacaaaacaggggcagguugacuugaaugaugugguucaagcauugacagauuugggucuaaucuacacagcaaaguaucccaauacuucagacuuagauaggcugacucaaagucaccccauccuaaacaugguugacaccaagaaaagcucuuugaauauuucagguuauaacuuuagcuugggugcagcugugaaggcaggagcuugcaugcuggaugguggcaauauguuggagacaaucaaggugucaccucagacaauagaugguauccucaaauccaucuuaaaagucaagaaggcucuugggauguucaucucggacaccccuggugaaaggaauccuuaugagaacauacucuacaagauuuguuugucaggagauggauggccauauauugcaucaagaaccucaauaacaggaagggccugggaaaacacugucguugaucuagaaucagaugggaagccacagaaagcuggaagcaacaauuccaauaaaucccugcagucggcaggguucaccgcugggcuuaccuauucucaacugaugacccucaaggaugcuaugcugcaacuugacccaaaugcuaagaucuggauggacauugaagggagaccugaagauccaguggaaauugcccucuaucaaccaaguucaggcugcuacauacacuucuuccgugaaccuacugacuuaaagcaguucaagcaggaugcuaaguacucacaugggauugauguuacagaccucuuugcugcacaaccgggcuugaccagugcugucauagaugcacucccucggaauauggucauuaccugucagggggcugaugacauaaggaaacuccuugaaucacaagguagaaaagacaucaaacuaauugauauugcccucaacaaggcugauucuaggaaguaugaaaaugcagucugggaucaguacaaagacuuaugccacaugcacacagguguuguuguugaaaagaagaaaagaggcgguaaagaggagauaaccccucacugugcacuaauggacugcaucauguuugacgcagcagugucaggaggacugaacacaucaguuuugagggcagugcugccuagagauaugguguucagaacaucaacaccuagagucguucuguaa

SEQ ID NO: 8010 - RNA, 1710 nt, Artificial Sequence
  derived and/or modified CDS sequence (wt) from LASV(G610-SLE-2009;Clade IV)__AIT17135__NP
augagugccucaaaggaaauaaaguccuuucuguggacacaaucauugagaagggaacuaucugguuacugcuccaacaucaaacuacagguugugaaagaugcccaagcucuuuuacauggacuugauuucuccgaagucagcaauguucaacggcugaugcgcaaggagagaagggaugacaaugaucugaaacgguugagggaccuaaaucaagcggucaacaaccuuguugaguuaaaaucaacucaacaaaagaguauacugagaguugggacucuaacaucagaugacuuauuaaucuuagccgcugaucuagagaaguugaaaucaaaggugaccaggacagaaaggccauugagugcaggugucuauaugggcaaccugagcucacagcaacuugaccagagacgagcucuucugaguaugauaggaaugaguggugguaaucaaggggcucgggcugggagagauggaguggugagaguuugggaugugaaaaaugcagaguugcuuaacaaucaguucgggaccaugccaaguuugacacuggcaugucugacaaagcaggggcagguugaccugaaugauguagugcaagcauugacagauuugggucugauuuacacagcuaaguaucccaauacuucagacuuagauaggcugacucagagucaccccauccuaaacaugauugacaccaagaaaagcucucugaauaucucaggcuauaauuucagccugggugcagcugugaaggcaggagcuugcaugcuagauggcggcaacaugcuggagacaauuaaggugucaccucagacgauggacggcauccucaaauccaucuuaaaggucaagaaggcucuugggauguucaucucagacaccccuggugaaaggaauccuuaugaaaacauacucuacaagauuuguuugucaggagauggauggccauauauugcaucaagaaccucaauaacaggaagggccugggaaaacacugucguugaucuggaaucagaugggaagcuacagaaagcuggcagcaacaauuccaacaaauccuugcagucggcaggguuuaccgcugggcuuaccuauucucagcuaaugacccucaaggaugcaauguugcaacuugacccaaaugccaagaccuggauggacauugaaggaagaccugaagauccaguggagauugcccucuaucaaccaaguucaggcugcuacauacacuucuuccgugagccuacugacuuaaagcaguucaagcaggaugcuaaguacucacaugggauugauguuacggaccucuucgcugcacagccggguuugaccagugcugucauugaugcacucccccggaauauggucauuaccugucagggguccgaugacauaaggaaacuccuugaaucacaagguagaaaagacaucaaacuaauugauauugcccucaacaaaacugauuccaggaaguaugaaaaugcagucugggaucaguauaaggacuuaugccacaugcacacaggugucguuguugaaaagaagaaaaagggcggcaaagaggaaauaaccccucacugugcacuaauggacugcaucauguuugaugcagcagugucaggaggacugaacacaucgguuuugagagcagugcugccuagagauaugguguucagaacaucgacaccuagagucguccuguaa

SEQ ID NO: 8011 - RNA, 1710 nt, Artificial Sequence
  derived and/or modified CDS sequence (wt) from LASV(G636-SLE-2009;Clade IV)__AIT17139__NP
augagugccucaaaggaaauaaaauccuuuuuguggacacaaucuuugaggagggaguuaucugguuacuguuccaacaucaaacuacagguggugaaagaugcucaggcccuuuuacauggacuugacuuuuccgaagucaguaauguucaacgguugaugcgcaaggagaggagggaugacaaugauuugaaacgguugagagaccugaaucaagcggugaacaaucuuguugaauuaaaaucaacucaacaaaagaguguacugaggguugggacucuaaccucagaugacuuguugaucuuggccgcugaucuagagaaguugaagucaaaggugaccagaacagaaaggccacugagugcaggugucuauaugggcaaccuaagcucacagcaacuugaccaaagaagagcucuucugaauaugauagggaugagugguggcaaucaaggggcucgggcugggagagauggagugguaagaguuugggaugugaagaaugcagaguugcucaauaaucaguucggaaccaugccaagccugacacuggcaugucugacaaaacaggggcagguugacuugaaugaugcaguacaggcacugacagauuuggguuugaucuacacagcaaaguaucccaauacuucagacuuagacaggcugacucaaagucaccccauccuaaauaugauugacaccaagaaaagcucuuugaauaucucagguuauaauuuuagcuugggugcagcugugaaggcaggagccugcaugcuggaugguggcaacauguuggagacaaucaaagugucaccucagacaauggauaguauccucaaauccauuuuaaaagucaaaaaggcucuagggauguucauuucagacaccccuggugaaaggaauccuuaugaaaacauacucuacaagauuuguuuaucaggagauggauggccauauauugcaucaagaaccucaauaacaggaagggccugggaaaacacuguuguugaucuggaaucagaugggaagccacagaaagcuggcagcaacaauuccaauaaaucccugcagucggcgggguuugcagcugggcucaccuauucucagcugaugacccucaaggaugcaaugcugcaacuugacccaaaugcuaagaccuggauggacauugaaggaagaccugaagauccaguggaaauagcccucuaucaaccaaguucagguugcuacauacacuucuuccgugaaccuacugauuuaaagcaguucaagcaggaugcuaaguacucacaugggauugaugucacagaccucuuugcugcacaaccuggcuugaccagugcuguuauugaugcacucccccggaauauggucauuaccugucagggaucugaugacauaagaaaacuccuugaaucacaaggaagaaaagacaucaaauuaauugauauugcccucagcaagacugauuccaggaaguaugaaaaugcagucugggaucaauauaaagaccuaugccacaugcacacagguauuguuguugagaagaagaaaagaggcgguaaagaggaaauaaccccucacugugcacuaauggacugcaucauguuugaugcagcagugucaggggggcugaacacaucaguuuugagagcagugcugcccagagauaugguguucagaacaacgacaccuagagucguccuguaa

SEQ ID NO: 8012 - RNA, 1710 nt, Artificial Sequence
  derived and/or modified CDS sequence (wt) from LASV(G676-SLE-2009;Clade IV)__AIT17143__NP
augagugccucaaaggaaauaaaauccuuuuuguggacacaaucuuugaggagggaauuaucugguuacugcuccaacauaaagcugcagguggugaaagaugcccaggcucuuuuacauggacuugacuucucugaagucagcaauguucaacgguugaugcgcaaggagaggagggaugacaaugauuugaaacgguugagggaucuaaaucaagcggucaacaaucuuguugaauuaaaaucaacccaacaaaagaguauacugagaguugggacucuaaccucagaugacuuacuaaucuuggccgcugauuuagagaaauugaagucgaaggugaccagaacagaaaggccauugagugcaggugucuauaugggcaaccuaagcucacagcaacuugaccaaagaagagcucuucugaacaugauaggaaugagugguaguaaucaaggggcucgggcugggagagauggaguggucagaguuugggaugugaaaaaugcagaguugcucaauaaucaguucgggaccaugccaagucugacacuggcaugucugacaaaacaggggcagguugacuugaaugaugcaguacaagcauugacagauuuggguuugaucuacacagcaaaguauccaaauacuucagacuuggacaggcugacucaaagucaccccauccuaaauaugauugacaccaaaaaaagcucuuugaauaucucagguuauaauuuuagcuugggugcagcugugaaggcaggagcuuguaugcuggaugguggcaauauguuggagacaaucaaggugucaccucagacaauggaugguauucucaaauccauuuuaaagguuaaaaaggcucuugggauguucauuucagacaccccuggugaacggaauccuuaugaaaacauacucuacaagauuugcuugucaggagauggauggccauacauugcaucaagaaccucaauaacaggaagggccugggaaaacacuguuguugaucuggagucagaugggaagccacagaaagcuggcaacaacgguuccaauaaaucucugcagucggcaggauuuaccgcugggcuuaccuauucucagcugaugacccucaaggaugcaaugcugcaacuugacccaaaugcuaagaccuggauggacauugaaggaagaccugaagauccaguggagaucgcccucuaucaaccaaguucaggaugcuacauacacuucuuccgugaaccuacugacuuaaagcaauucaagcaggaugcuaaguacucacaugggauugaugucacagaucucuucgcugcacaaccgggcuugaccagugcugucauugaugcacucccccggaauuuggucaucaccugccaggggucugaugauauaaggaaacuccuugaaucacaaggaagaaaagacaucaaacuaauugacauugcccucagcaagacugauuccaggaaguaugaaaaugcagucugggaucaguacaaagaccuaugccacaugcacacagguauuguuguugagaagaagaaaagaggcggcaaagaggagauaaccccucacugugcacuaauggacugcaucauguuugaugcagcggugucaggaggacugaacacaucaguuuugagagcagugcugcccagagauaugguguuuagaacaucaacaccuagggucguccuguaa

SEQ ID NO: 8013 - RNA, 1710 nt, Artificial Sequence
  derived and/or modified CDS sequence (wt) from LASV(G692-SLE-2009;Clade IV)__AIT17147__NP
augagugccucaaaggaaauaaaauccuuuuuguggacacaauccuugaggagggaauuaucugguuacugcucuaacaucaaacuacagguggugaaagaugcucaggcucuuuuacauggacuugacuucucugaagucaguaauguucaacgguugaugcgcaaggagagaagggaugacaaugauuuaaaacgguugagggaccuaaaucaagcggucaacaaucuuguugaauuaaaaucaacucaacaaaaaaguguacugagaguugggacucuaaccucagaugacuuauuaaucuuggccgcugaucuagaaaaguugaaaucaaaggugaccagaacagagaggccacugagugcaggugucuauaugggcaaccuaagcucacagcaacuugagcaaagaagagcucuucugaacaugauaggaaugagugguagcaaucaaggggcucaggcugggagagauggagugguuagaguuugggaugugaaaaaugcagaguugcucaauaaucaguucgggaccaugccaagucugacauuggcaugucugacaaaacaggggcagguugacuugaaugaugcaguacaagcauugacagauuuagguuugaucuacacaguaaaguaucccaauacuucagacuuagauaggcugacucaaagucaccccauccuaaauaugauugacaccaagaaaagcucuuugaauaucucagguuauaauuucagcuugggugcagcugugaaggcaggagcuuguaugcuggaugguggcaacauguuggagacaaucaaggugucaccucagacaauggaugguauucucaaauccauuuuaaaggucaagaaggcucuugggauguucauuucagauaccccuggugaaaggaauccuuaugagaacauacucuacaagauuuguuugucaggagauggauggccauacauugcaucaaggaccucaauaacaggaagggccugggaaaacacuguuguugauuuggagucagaugggaagccacagaaagcugacagcaacaguuccaauaaaucucugcagucagcaggguuuaccgcugggcuuaccuauucucagcugaugacccucaaggaugcaaugcugcaacuugacccaaaugcuaagaccuggauggacauugaaggaagaccugaagauccaguggaagucgcccucuaucaaccaaguucaggauguuacauacacuucuuccgugaaccuacugauuuaaagcaguucaagcaggaugcuaaguacucacaugggauugaugucacggaccucuucgcugcacaaccggguuugaccagugcagucauugaugcacucccccggaauauggucaucaccugucaggggucugaugacauaaggaaacuccuugaaucacaaggaagaaaggacauuaaacuaauugacauugcccucagcaaaacugauuccaggaaguaugaaaaugcagucugggaucaguauaaagacuuaugccacaugcacacagguguuguuguugagaagaagaaaagaggcggcaaagaggaaauaaccccucacugugcacuaauggacugcaucauguuugaugcagcagugucaggaggacugaacacaucaguuuugagagcagugcugccuagagauaugguguucagaacaucgacaccuagagucguccuguaa

SEQ ID NO: 8014 - RNA, 1710 nt, Artificial Sequence
  derived and/or modified CDS sequence (wt) from LASV(G733-SLE-2010;Clade IV)__AIT17155__NP
augagugccucaaaggaaauaaagucuuuucuguggacacaaucccugaggagggaacugucugguuacugcuccaacaucaaacuucaggugguaaaagaugcccaagcucuuuugcacggacuugacuucuccgaagucaguaauguucaacgguugaugcgcaaagagagaagggaugacaaugauuugaaacggcugagggaccuaaaucaagcggucaacaaccuuguugaguuaaaaucaacucaacagaagaguguacugagaguugggacccuaaccucagaugaguuauuagucuuggcugcugaucuagagaaauuaaaaucaaaagugaucaggacagaaaggccauugagugcaggugucuauaugggcaaccugagcucacagcaacuugaccaaaggcgagcucuucugaguaugauagggaugagugguggcaaucaaggggcucggacugggagagaugggguggugagaguuugggauguaaaaaaugcagaauugcucaauaaucaguucgggaccaugccaagucugacacuggcaugucugacaaaacaagggcagguugacuuaaaugaugcagugcaagcauugacagauuuggguuugaucuacacagcaaaguauccuaacacuucagacuuggauaggcugacucaaagucaccccauccuaaauaugauugacaccaagaaaagcucuuugaacaucucagguuauaauuuuagcuugggugcagcugugaaggcaggagcuuguaugcuggaugguggcaauauguuggagacaaucaaagugucaccucagacaauggauggcauccucaaauccauuuuaaaggucaagaaggcucuugggauguucauuucagacaccccuggugaaaggaaucccuacgaaaacauacucuacaagauuuguuugucaggggauggauggccauauauugcaucaagaaccucaauaacaggaagggccugggaaaacacugucguugaucuagagucagaugggaagccacagaaagcuggcagcaacaauuccaacaaaucccugcagucggcaggguuuacugcugggcuuacuuauucucagcuuaugacccucaaggaugcaaugcugcaacuugauccaaaugcuaagacuuggauggacauugaaggaagaccugaagauccaguggaaauugcccucuaucaaccaaguucaggcugcuacauacacuucuuccgugagccuacugauuuaaagcaguucaagcaagaugcuaaauacucacaugggauugaugucacagaccucuucgcugcacaaccgggcuuaacuagugcugucauagaugcacucccccggaauaugguuaucaccugucagggguccgaugauauaaggaaacuccuugaaucacaaggaagaaaggacaucaaauuaauugacauugcccucagcaaaauugauuccaggaaguaugaaaaugcagucugggaucaguauaaagacuuaugccacaugcacacaggugucguuguugaaaagaagaaaagaggcgguaaagaggaaauaaccccucacugugcacuaauggacugcaucauguuugaugcagcagugucaggaggacugaacucauuaguuuugagagcagugcugcccagagacaugguauucagaacaucgacaccaagagucguccuguaa

SEQ ID NO: 8015 - RNA, 1710 nt, Artificial Sequence
  derived and/or modified CDS sequence (wt) from LASV(G806-SLE-2010;Clade IV)__AIT17161__NP
augagugccucaaaggaaauaaaauccuuuuuguggacacaauccuugaggagggaacuauccgguuacugcuccaacaucaaacuacagguggugaaagaugcccaggcucuuuuacauggacuugacuucucugaagucaguaauguucaacgguugaugcgcaaggagagaagggaugacaaugauuugaaacgguugagggaucuaaaucaagcggucaacaaucuuguugaauuaaagucaacucaacaaaagaguauacugagaguugggacucuaaccucagaugacuuguuaaucuuggccgcugaucuagagaaguugaagucaaaggugaccagaacagaaaggccauugagugcaggugucuauaugggcaaucuaagcucacagcaacuugaccaaagaagagcucuucugaacaugauaggaaugagugguaguaaucaaggggcucggacugggagagauggggugguuagaguuugggaugugaaaaaugcagaauugcucaauaaucaguucgggaccaugccaaguuugacacuggcaugucugacaaaacaggggcagguugacuugaaugaugcaguacaagcauugacagauuuagguuuaaucuacacagcgaaguauccuaacacuucagacuuagacaggcugacucaaagucaccccauccuaaauaugauugacaccaagaagagcucuuugaauaucucagguuauaauuuuagcuugggugcagcugugaaggcaggagcuugcaugcuggaugguggcaauauguuggagacaaucaaggugucaccucagacaauggaugguauucucaaauccauuuuaaagguuaagaaggcccuugggauguucauuucagauaccccuggugaaaggaauccuuaugaaaacauacucuacaagauuuguuugucaggagauggauggccauacauugcaucaagaaccucaauaacaggaagggccugggaaaacacugucguugaucuggaaucagaugggaagccacaaaaagcuggcagcaacaguuccaauaaaucucugcagucggcaggguuaaccgcugggcuuaccuauucucagcugaugacccucaaggaugcaaugcugcaacuugacccaaaugcuaagaccuggauggacauugaaggaagaccugaagauccaguggaaaucgcccucuaucaaccaaguucaggaugcuacauacacuucuuccgugaaccuacugauuuaaagcaguucaagcaggaugcuaaguacucacacgggauugauguuacggaccucuucgcugcacaaccgggccugaccagcgcuguuauugaugcacucccccgaaauuuggucauuaccugccaggggucugaugacauaaggaaacuccuugaaucacaaggaagaaaagacaucaaacuaauugacauugcccucagcaaaacugauuccaggaaguaugaaaaugcagucugggaccaguauaaagacuuaugccacaugcacacagguauuguuguugagaagaagaaaagaggcgguaaagaggaaauaaccccucacugugcacuaauggacugcaucauguuugaugcagcagugucaggaggacugaacgcaucaguuuugagagcagugcugcccagagauaugguguucagaacaucgacaccuagagucgucuuguaa

SEQ ID NO: 8016 - RNA, 1710 nt, Artificial Sequence
  derived and/or modified CDS sequence (wt) from LASV(G808-SLE-2010;Clade IV)__AIT17165__NP
augagugccucaaaggaaauuaaauccuuuuuguggacacagucuuugaggagggaacuaucugguuacugcuccaacaucaaacuacagguugugaaagaugcccaagcucuuuuacauggacuugacuucuccgaggucaacaauguucaacgguugaugcgcaaggagagacgggacgacaaugacuugaaacgguugagggaccuaaaucaagcagucaauaaucuuguugaauuaaaaucaacucaacaaaagaguauacugagaguugggacucuaaccucagaugacuuauuaaucuuagccgcugaucuggagaaguugaagucaaaggugaccagaacagaaaggccauugagugcaggugucuacaugggcaaccuaagcucacagcaacuugaccagagaagagcucuccugaacaugauaggaaugaguaaugguaaucagggaacccgggcugggagagauggaguggugagaguuugggaugugaaaaaugcagaguugcucaauaaucaauucgggaccaugccaagucugacacuggcaugucugacaaaacaggggcagguugacuugaaugauguagugcaagcauugacagauuuggguuugaucuacacagcaaaguaucccaacacuucagacuuagacaggcugacucaaagucaccccauccuaaacaugauugacacuaagaaaagcucuuugaauaucuccgguuacaauuuuagcuugggugcagcugugaaggcaggagcuugcaugcuggauggugguaauauguuggagacaaucaaggugucaccucagacaauggaugguauccucaaauccaucuugaaggucaagaaggcucuugggauguuuauuucagauaccccuggugagaggaauccuuaugaaaacauacucuacaagauuuguuugucaggagauggauggccauauauugcaucgagaaccucaauaacaggaagggccugggagaacaccguuguugauuuggaaucagaugggaagccacagaaagcugacagcagcaauuccaacaaaucucugcagucggcaggguuuaccgcugggcucaccuauucucaacugaugacccucaaggaugcaaugcuacaacuugauccaaaugcuaagaccuggauggacauugaaggaagaccugaggauccaguggaaguugcccucuaucaaccaaguucaggcugcuacauacacuucuuccgugagccuacugauuuaaagcaguucaagcaggaugccaaguacucacaugggauugaugucacagaccucuucgcugcacaaccggguuugaccagugcugucauugacgcacucccccggaauauggucauuaccugucagggguccgaugacauaaggaaacuccuugaaucacaaggaagaaaggauaucaaacuaauugauauugcccucagcaaagcggauuccaggaaguaugaaaaugcagucugggaucagcauaaagacuuaugccacaugcacacagguguuguuguugaaaagaagaaaagaggcgguaaagaagaaauaaccccucacugugcacuaauggacugcaucauguaugaugcagcagugucuggaggauugaacacaucgguuuugagagcaguacugcccagagauaugguguucagaacaucgacaccuagagucguccuguaa

SEQ ID NO: 8017 - RNA, 1710 nt, Artificial Sequence
  derived and/or modified CDS sequence (wt) from LASV(Guinea Faranah;Clade IV)__AMZ00380__NP
augagugucucaaaagaagugaaauccuuccuauggacacaaucucugaggagggaguugucagguuacugcuccaacaucaaguugcaaguuguaaaggaugcccaagcucuccuacauggacuugacuucucugagguaagcaauguccaacgucugaugcgcaagcaaaggagagaugacagugauuugaagagacucagagaucugaaucaagcagucaacaaccuuguugaacugaaaucaacucaacaaaagagugucuugagaguugggacccuaacuucagaugaucugcugaucuuggcugcugaucuagagaaacugaaaucaaaagucaccagaacggaaaggccacugagugcaggugucuacaugggaaaucuaaguucacagcagcucgaucagagacgggcucuucugaacaugauagggaugaauggugguaaucagggaguucaagcugggagagacgggguagugagaguuugggaugugaaaaacgcagaguugcucaacaaccaauucgggacuaugccaaguuugacacuagcaugucugacgaagcaggggcaaguugacuuaaaugacgcaguucaggcacugacagaccuugguuuaaucuacacagcaaaauaucccaacaccucugauuuagacagguuggcucaaagccacccuauucugaauaugauugacaccaagaagagcucauugaacaucucuggcuacaacuucagucugggugcugcugugaaggcaggagccuguauguuggaugguggcaacaugcuagagacaaucaaaguaucaccccaaacaauggaugguauccucaaagcuaucuuaaaaguaaaaaggacucuuggaauguuuguuucagauacuccuggugaaaggaacccuuaugaaaacauacuuuauaaaaucugccuaucaggggauggauggccauacauugcaucgagaacaucaauaacaggaagagcuugggagaauacuguaguagauuuagaaucagacgggaagccacagaaaguuggaaauaaugguuccaacaaaucuuugcaaucagcaggcuucucugcuggacuuacauauucucaacucaugacucucaaagaugcaaugcugcagcuugacccaaauacaaagaccuggauggauauugagggaaggcccgaagauccaguggaaguugcucuuuaccaaccgagcucugguuguuauauucacuucuuucgugagccuacugacuuaaagcaguuuaaacaagaugccaaauauucacaugggauugaugucacagaccuguuugcugcacagccaggucugaccagugcaguuaucgaagcacucccucgaaacauggucaucaccugccaagggucugaagacauaagaaagcuccuugaaucacagggaaggaaggauauaaaacugauugacauugcccucagcaaggccgacuccaggaaguaugaaaaugcagucugggaccaaugcaaagacuugugccacaugcacacagguauuguuguugagaagaagaagagagguggcaaagaggagauaaccccucacugcgcacugauggauugcaucauguuugaugcagcagugucaggaggauuaaacacacagguuuugagggcagugcugcccagagacaugguuuuuaggacaucaacacccaaagucgucuuguaa

SEQ ID NO: 8018 - RNA, 1710 nt, Artificial Sequence
  derived and/or modified CDS sequence (wt) from LASV(GUINEA Z-185a;Clade IV)__AMZ00376__NP
augagugucucaaaggagauaaaauccuuucuguggacacagucucugaggagggaguugucggguuacugcucuaacauaaaguuacaagugguuaaagaugcucaagcucuucugcauggacucgacuucucugaggucagcaauguccagcgguugaugcgcaagcaaagaagggacgacaacgaccugaaacgacugagagaccuaaaccaggcaguuaacaaucuuguugagcugaaaucaacucaacaaaagagugugcugagaguugggacauuaacuucagaugacuuguuaauuuuagcugcugaccuggagaagcugaagucaaaggugaccaggacagaaaggccauugagcgcugguguuuacauggguaaucuaagcucacaacaacuugaucaacgacgagcucuuuugaauaugauagggaugaguggugggaaucaaggggcucagacugggagagacggaguggugaggauuugggaugugaaaaaugcagagcugcuuaacaaccaguuugggaccaugccgaguuugacacuagcuuguuuaacaaaacagggacaaguugaucugaacgauguuguucaggcauugacagaccugggcuugaucuacacagcaaaguaucccaacaccucagaccuggauagacuaacccagagccacccuauucuaaacaugauugacaccaagaaaagcucucugaauaucucagguuauaacuucagcuuaggugcagcugugaaagcaggagcuuguauguuggaugguggcaacauguuagagacaaucaaagugucaccccaaacaauggaugguauucucaaguccaucuuaaaggucaagaaagcucuugggauguuuauuucagauacucccggugagagaaacccuuaugagaacauacuuuacaagaucuguuugucaggggauggguggccauacauugcaucuaggacuucaauaacaggaagggcaugggaaaacacuguuguugauuuggaaucaggcgagaagccacaaaaaauugggagcaacaacuccaacaaaugcuuacagucugcaggguucacugcugggcuuuccuauucucagcucaugacucucaaagaugcaaugcuacagcuugacccaaaugcuaagaccuggauggacauugaggggagaccugaagauccaguagaaauugcccuauaucagccaaguucaggcuguuacauucacuucuuccgugaacccacugaccuaaaacaguucaagcaagaugcuaaguauucacacggaauugauguuacagaccuuuuugcugcacagccagguuugaccagugcuguuauagaggcacucccccgaaacauggucaugaccugucaggggucugaugacauaagaaagcuccuugagucacaaggaaggaaggauaucaaguugauugauauugcucucagcaagacagauucuagaaaauaugagaaugcagucugggaucaauacaaagauuuaugccacaugcauacagguguuguuguugaaaagaagaagaaggguggcaaagaggaaauaaccccucacugugcccuaauggacuguaucauguuugaugcagcagugucaggaggauugaacacaucaguucugagagcagugcuacccagagacaugguguuuagaacaucaacgcccaaagucguccuguaa

SEQ ID NO: 8019 - RNA, 1710 nt, Artificial Sequence
  derived and/or modified CDS sequence (wt) from MOPV/LASV reassortant(IGS-1;Clade IV)__AFY05578__NP
augagugccucaaaggaaauaaaauccuuuuuguggacacaaucuuugaggagggaauuaucugguuacugcuccaacaucaaacuacagguggugaaagaugcccaggcucuuuuacauggacuugacuucuccgaagucaguaauguucaacgguugaugcgcaaggagagaagggaugacaaugauuugaaacgguugagggaccuaaaucaagcggucaacaaucuuguugaauuaaaaucaacucaacaaaagaguauacugagaguugggacucuaaccucagaugacuuauuaaucuuagccgcugaucuagagaaguuaaggucaaaggugaucagaacagaaaggccauuaagugcaggugucuauaugggcaaccuaagcucacagcaacuugaccaaagaagagcucuccugaauaugauaggaaugaguggugguaaucaaggggcucgggcugggagagauggaguggugagaguuugggaugugaaaaaugcagaguugcucaguaaucaguucgggaccaugccaagucugacacuggcaugucugacaaaacaggggcagguugacuugaaugaugcaguacaagcauugacagauuuggguuugaucuacacagcaaaguaucccaacacuucagacuuagacaggcugacucaaagucaucccauccuaaauaugauugacaccaagaaaagcucuuugaauaucucagguuauaauuuuagcuugggugcagcugugaaggcaggagcuugcaugcuggaugguggcaauauguuggagacaaucaaggugucaccucagacaauggaugguauccucaaauccauuuuaaaggucaagaaggcucuuggaauguucauuucagacaccccuggugaaaggaauccuuaugaaaacauacucuacaagauuuguuugucaggagauggauggccauauauugcaucaagaaccucaauaacaggaagggccugggaaaacacugucguugaucuggaaucagaugggaagccacagaaagcugacagcaacaauuccaguaaaucccugcagucggcaggguuuaccgcugggcuuaccuauucucagcugaugacccucaaggaugcaaugcugcaacuugacccaaaugcuaagaccuggauggacauugaaggaagaccugaagauccaguggaaauugcccucuaucaaccaaguucaggcugcuacauacacuucuuccgugaaccuacugauuuaaagcaguucaagcaggaugcuaaguacucacaugggauugaugucacagaccucuucgcuacacaaccgggcuugaccagugcugucauugaugcacucccccggaauauggucauuaccugucagggguccgaugacauaaggaaacuccuugaaucacaaggaagaaaagacauuaaacuaauugauauugaccucaguaaaacugauuccaggaaguaugaaaaugcagucugggaccaguauaaagacuuaugccacaugcacacaggugucguuguugaaaagaagaaaagaggcgguaaagaggaaauaaccccucacugugcacuaauggacugcaucauguuugaugcagcagugucaggaggacugaacacaucgguuuugagagcagugcugcccagagauaugguguucagaacaucgacaccuagagucguucuguaa

SEQ ID NO: 8020 - RNA, 1710 nt, Artificial Sequence
  derived and/or modified CDS sequence (wt) from MOPV/LASV reassortant(IGS-11;Clade IV)__AFY05589__NP
augagugccucaaaggaaauaaaauccuuuuuguggacacaaucuuugaggagggaauuaucugguuacugcuccaacaucaaacuacagguggugaaagaugcccaggcucuuuuacauggacuugacuucuccgaagucaguaauguucaacgguugaugcgcaaggagagaagggaugacaaugauuugaaacgguugagggaccuaaaucaagcggucaacaaucuuguugaauuaaaaucaacucaacaaaagaguauacugagaguugggacucuaaccucagaugacuuauuaaucuuagccgcugaucuagagaaguuaaagucaaaggugaucagaacagaaaggccauuaagugcaggugucuauaugggcaaccuaagcucacagcaacuugaccaaagaagagcucuccugaauaugauaggaaugaguggugguaaucaaggggcucgggcugggagagauggaguggugagaguuugggaugugaaaaaugcagaguugcucaguaaucaguucgggaccaugccaagucugacacuggcaugucugacaaaacaggggcagguugacuugaaugaugcaguacaagcauugacagauuuggguuugaucuacacagcaaaguaucccaacacuucagacuuagacaggcugacucaaagucaucccauccuaaauaugauugacaccaagaaaagcucuuugaauaucucagguuauaauuuuagcuugggugcagcugugaaggcaggagcuugcaugcuggaugguggcaauauguuggagacaaucaaggugucaccucagacaauggaugguauccucaaauccauuuuaaaggucaagaaggcucuuggaauguucauuucagacaccccuggugaaaggaauccuuaugaaaacauacucuacaagauuuguuugucaggagauggauggccauauauugcaucaagaaccucaauaacaggaagggccugggaaaacacugucguugaucuggaaucagaugggaagccacagaaagcugacagcaacaauuccaguaaaucccugcagucggcaggguuuaccgcugggcuuaccuauucucagcugaugacccucaaggaugcaaugcugcaacuugacccaaaugcuaagaccuggauggacauugaaggaagaccugaagauccaguggaaauugcccucuaucaaccaaguucaggcugcuacauacacuucuuccgugaaccuacugauuuaaagcaguucaagcaggaugcuaaguacucacaugggauugaugucacagaccucuucgcuacacaaccgggcuugaccagugcugucauugaugcacucccccggaauauggucauuaccugucagggguccgaugacauaaggaaacuccuugaaucacaaggaagaaaagacauuaaacuaauugauauugaccucaguaaaacugauuccaggaaguaugaaaaugcagucugggaccaguauaaagacuuaugccacaugcacacaggugucguuguugaaaagaagaaaagaggcgguaaagaggaaauaaccccucacugugcacuaauggacugcaucauguuugaugcagcagugucaggaggacugaacacaucgguuuugagagcagugcugcccagagauaugguguucagaacaucgacaccuagagucguucuguaa

SEQ ID NO: 8021 - RNA, 1710 nt, Artificial Sequence
  derived and/or modified CDS sequence (wt) from MOPV/LASV reassortant(IGS-12;Clade IV)__AFY05591__NP
augagugccucaaaggaaauaaaauccuuuuuguggacacaaucuuugaggagggaauuaucugguuacugcuccaacaucaaacuacagguggugaaagaugcccaggcucuuuuacauggacuugacuucuccgaagucaguaauguucaacgguugaugcgcaaggagagaagagaugacaaugauuugaaacgguugagggaccuaaaucaagcggucaacaaucuuguugaauuaaaaucaacucaacaaaagaguauacugagaguugggacucuaaccucagaugacuuauuaaucuuagccgcugaucuagagaaguuaaagucaaaggugaucagaacagaaaggccauuaagugcaggugucuauaugggcaaccuaagcucacagcaacuugaccaaagaagagcucuccugaauaugauaggaaugaguggugguaaucaaggggcucgggcugggagagauggaguggugagaguuugggaugugaaaaauguagaguugcucaguaaucaguucgggaccaugccaagucugacacuggcaugucugacaaaacaggggcagguugacuugaaugaugcaguacaagcauugacagauuuggguuugaucuacacagcaaaguaucccaacacuucagacuuagacaggcuggcucaaagucaucccauccuaaauaugauugacaccaagaaaagcucuuugaauaucucagguuauaauuuuagcuugggugcagcugugaaggcaggagcuugcaugcuggaugguggcaauauguuggagacaaucaaggugucaccucagacaauggaugguauccucaaauccauuuuaaaggucaagaaggcucuuggaauguucauuucagacaccccuggugaaaggaauccuuaugaaaacauacucuacaagauuuguuugucaggagauggauggccauauauugcaucaagaaccucaauaacaggaagggccugggaaaacacuguuguugaucuggaaucagaugggaagccacagaaagcugacagcaacaauuccaguaaaucccugcagucggcaggguuuaccgcugggcuuaccuauucucagcugaugacccucaaggaugcaaugcugcaacuugacccaaaugcuaagaccuggauggacauugaaggaagaccugaagauccaguggaaauugcccucuaucaaccaaguucaggcugcuacauacacuucuuccgugaaccuacugauuuaaagcaguucaagcaggaugcuaaguacucacaugggauugaugucacagaccucuucgcuacacaaccgggcuugaccagugcugucauugaugcacucccccggaauauggucauuaccugucagggguccgaugacauaaggaaacuccuugaaucacaaggaagaaaagacauuaaacuaauugauauugaccucaguaaaacugauuccaggaaguaugaaaaugcagucugggaccaguauaaagacuuaugccacaugcacacaggugucguuguugaaaagaagaaaagaggcgguaaagaggaaauaaccccucacugugcacuaauggacugcaucauguuugaugcagcagugucaggaggacugaacacaucgguuuugagagcagugcugcccagagauaugguguucagaacaucgacaccuagagucguucuguaa

SEQ ID NO: 8022 - RNA, 1710 nt, Artificial Sequence
  derived and/or modified CDS sequence (wt) from MOPV/LASV reassortant(IGS-14;Clade IV)__AFY05595__NP
augagugccucaaaggaaauaaaauccuuuuuguggacacaaucuuugaggagggaauuaucugguuacugcuccaacaucaaacuacagguggugaaagaugcccaggcucuuuuacauggacuugacuucuccgaagucaguaauguucaacgguugaugcgcaaggagagaagagaugacaaugauuugaaacgguugagggaccuaaaucaagcggucaacaaucuuguugaauuaaaaucaacucaacaaaagaguauacugagaguugggacucuaaccucagaugacuuauuaaucuuagccgcugaucuagagaaguuaaagucaaaggugaucagaacagaaaggccauuaagugcaggugucuauaugggcaaccuaagcucacagcaacuugaccaaagaagagcucuccugaauaugauaggaaugaguggugguaaucaaggggcucgggcugggagagauggaguggugagaguuugggaugugaaaaaugcagaguugcucaguaaucaguucgggaccaugccaagucugacacuggcaugucugacaaaacaggggcagguugacuugaaugaugcaguacaagcauugacagauuuggguuugaucuacacagcaaaguaucccaacacuucagacuuagacaggcuggcucaaagucaucccauccuaaauaugauugacaccaagaaaagcucuuugaauaucucagguuauaauuuuagcuugggugcagcugugaaggcaggagcuugcaugcuggaugguggcaauauguuggagacaaucaaggugucaccucagacaauggaugguauccucaaauccauuuuaaaggucaagaaggcucuuggaauguucauuucagacaccccuggugaaaggaauccuuaugaaaacauacucuacaagauuuguuugucaggagauggauggccauauauugcaucaagaaccucaauaacaggaagggccugggaaaacacugucguugaucuggaaucagaugggaagccacagaaagcugacagcaacaauuccaguaaaucccugcagucggcaggguuuaccgcugggcuuaccuauucucagcugaugacccucaaggaugcaaugcugcaacuugacccaaaugcuaagaccuggauggacauugaaggaagaccugaagauccaguggaaauugcccucuaucaaccaaguucaggcugcuacauacacuucuuccgugaaccuacugauuuaaagcaguucaagcaggaugcuaaguacucacaugggauugaugucacagaccucuucgcuacacaaccgggcuugaccagugcugucauugaugcacucccccggaauauggucauuaccugucagggguccgaugacauaaggaaacuccuugaaucacaaggaagaaaagacauuaaacuaauugauauugaccucaguaaaacugauuccaggaaguaugaaaaugcagucugggaccaguauaaagacuuaugccacaugcacacaggugucguuguugaaaagaagaaaagaggcgguaaagaggaaauaaccccucacugugcacuaauggacugcaucauguuugaugcagcagugucaggaggacugaacacaucgguuuugagagcagugcugcccagagauaugguguucagaacaucgacaccuagagucguucuguaa

SEQ ID NO: 8023 - RNA, 1710 nt, Artificial Sequence
  derived and/or modified CDS sequence (wt) from MOPV/LASV reassortant(IGS-23;Clade IV)__AFY05610__NP
augagugccucaaaggaaauaaaauccuuuuuguggacacaaucuuugaggagggaauuaucugguuacugcuccaacaucaaacuacagguggugaaagaugcccaggcucuuuuacauggacuugacuucuccgaagucaguaauguucaacgguugaugcgcaaggagagaagggaugacaaugauuugaaacgguugagggaccuaaaucaagcggucaacaaucuuguugaauuaaaaucaacucaacaaaagaguauacugagaguugggacucuaaccucagaugacuuauuaaucuuagccgcugaucuagagaaguuaaagucaaaggugaucagaacagaaaggccauuaagugcaggugucuauaugggcaaccugagcucacagcaacuugaccaaagaagagcucuccugaauaugauaggaaugaguggugguaaucaaggggcucgggcugggagagauggaguggugagaguuugggaugugaaaaaugcagaguugcucaguaaucaguucgggaccaugccaagucugacacuggcaugucugacaaaacaggggcagguugacuugaaugaugcaguacaagcauugacagauuuggguuugaucuacacagcaaaguaucccaacacuucagacuuagacaggcugacucaaagucaucccauccuaaauaugauugacaccaagaaaagcucuuugaauaucucagguuauaauuuuagcuugggugcagcugugaaggcaggagcuugcaugcuggaugguggcaauauguuggagacaaucaaggugucaccucagacaauggaugguauccucaaauccauuuuaaaggucaagaaggcucuuggaauguucauuucagacaccccuggugaaaggaauccuuaugaaaacauacucuacaagauuuguuugucaggagauggauggccauauauugcaucaagaaccucaauaacaggaagggccugggaaaacacugucguugaucuggaaucagaugggaagccacagaaagcugacagcaacaauuccaguaaaucccugcagucggcaggguuuaccgcugggcuuaccuauucucagcugaugacccucaaggaugcaaugcugcaacuugacccaaauacuaagaccuggauggacauugaaggaagaccugaagauccaguggaaauugcccucuaucaaccaaguucaggcugcuacauacacuucuuccgugaaccuacugauuuaaagcaguucaagcaggaugcuaaguacucacaugggauugaugucacagaccucuucgcuacacaaccgggcuugaccagugcugucauugaugcacucccccggaauauggucauuaccugucagggguccgaugacauaaggaaacuccuugaaucacaaggaagaaaagacauuaaacuaauugauauugaccucaguaaaacugauuccaggaaguaugaaaaugcagucugggaccaguauaaagacuuaugccacaugcacacaggugucguuguugaaaagaagaaaagaggcgguaaagaggaaauaaccccucacugugcacuaauggacugcaucauguuugaugcagcagugucaggaggacugaacacaucgguuuugagagcagugcugcccagagauaugguguucagaacaucgacaccuagagucguucuguaa

SEQ ID NO: 8024 - RNA, 1716 nt, Artificial Sequence
  derived and/or modified CDS sequence (wt) from MOPV/LASV reassortant(IGS-27;Clade IV)__AFY05618__NP
augagugccucaaaggaaauaaaauccuuuuuguggacacaaucuuugaggagggaauuaucugguuacugcuccaacaucaaacuacagguggugaaagaugcccaggcucuuuuacauggacuugacuucuccgaagucaguaauguucaacgguugaugcgcaaggagagaagggaugacaaugauuugaaacgguugagggaccuaaaucaagcggucaacaaucuuguugaauuaaaaucaacucaacaaaagaguauacugagaguugggacucuaaccucagaugacuuauuaaucuuagccgcugaucuagagaaguuaaggucaaaggugaucagaacagaaaggccauuaagugcaggugucuauaugggcaaccuaagcucacagcaacuugaccaaagaagagcucuccugaauaugauaggaaugaguggugguaaucaaggggcucgggcugggagagauggaguggugagaguuugggaugugaaaaaugcagaguugcucaguaaucaguucgggaccaugccaagucugacacuggcaugucugacaaaacaggggcagguugacuugaaugaugcaguacaagcauugacagauuuggguuugaucuacacagcaaaguaucccaacacuucagacuuagacaggcugacucaaagucaucccauccuaaauaugauugacaccaagaaaagcucuuugaauaucucagguuauaauuuuagcuugggugcagcugugaaggcaggagcuugcaugcuggaugguggcaauauguuggagacaaucaaggugucaccucagacaauggaugguauccucaaauccauuuuaaaggucaagaaggcucuuggaauguucauuucagacaccccuggugaaaggaauccuuaugaaaacauacucuacaagauuuguuugucaggagauggauggccauauauugcaucaagaaccucaauaacaggaagggccugggaaaacacugucguugaucuggaaucagaugggaagccacagaaagcugacagcaacaauuccaguaaaucccugcagucggcaggguuuaccgcugggcuuaccuauucucagcugaugacccucaaggaugcaaugcugcaacuugacccaaaugcuaagaccuggauggacauugaaggaagaccugaagauccaguggaaauugcccucuaucaaccaaguucaggcugcuacauacacuucuuccgugaaccuacugauuuaaagcaaaagcaguucaagcaggaugcuaaguacucacaugggauugaugucacagaccucuucgcuacacaaccgggcuugaccagugcugucauugaugcacucccccggaauauggucauuaccugucagggguccgaugacauaaggaaacuccuugaaucacaaggaagaaaagacauuaaacuaauugauauugaccucaguaaaacugauuccaggaaguaugaaaaugcagucugggaccaguauaaagacuuaugccacaugcacacaggugucguuguugaaaagaagaaaagaggcgguaaagaggaaauaaccccucacugugcacuaauggacugcaucauguuugaugcagcagugucaggaggacugaacacaucgguuuugagagcagugcugcccagagauaugguguucagaacaucgacaccuagagucguucuguaa

SEQ ID NO: 8025 - RNA, 1710 nt, Artificial Sequence
  derived and/or modified CDS sequence (wt) from MOPV/LASV reassortant(IGS-3;Clade IV)__AFY05580__NP
augagugccucaaaggaaauaaaauccuuuuuguggacacaaucuuugaggagggaauuaucugguuacugcuccaacaucaaacuacagguggugaaagaugcccaggcucuuuuacauggacuugacuucuccgaagucaguaauguucaacgguugaugcgcaaggagagaagggaugacaaugauuugaaacgguugagggaccuaaaucaagcggucaacaaucuuguugaauuaaaaucaacucaacaaaagaguauacugagaguugggacucuaaccucagaugacuuauuaaucuuagccgcugaucuagagaaguuaaggucaaaggugaucagaacagaaaggccauuaagugcaggugucuauaugggcaaccuaagcucacagcaacuugaccaaagaagagcucuccugaauaugauaggaaugaguggugguaaucaaggggcucgggcugggagagauggaguggugagaguuugggaugugaaaaaugcagaguugcucaguaaucaguucgggaccauaccaagucugacacuggcaugucugacaaaacaggggcagguugacuugaaugaugcaguacaagcauugacagauuuggguuugaucuacacagcaaaguaucccaacacuucagacuuagacaggcugacucaaagucaucccauccuaaauaugauugacaccaagaaaagcucuuugaauaucucagguuauaauuuuagcuugggugcagcugugaaggcaggagcuugcaugcuggaugguggcaauauguuggagacaaucaaggugucaccucagacaauggaugguauccucaaauccauuuuaaaggucaagaaggcucuuggaauguucauuucagacaccccuggugaaaggaauccuuaugaaaacauacucuacaagauuuguuugucaggagauggauggccauauauugcaucaagaaccucaauaacaggaagggccugggaaaacacugucguugaucuggaaucaggugggaagccacagaaagcugacagcaacaauuccaguaaaucccugcagucggcaggguuuaccgcugggcuuaccuauucucagcugaugacccucaaggaugcaaugcugcaacuugacccaaaugcuaagaccuggauggacauugaaggaagaccugaagauccaguggaaauugcccucuaucaaccaaguucaggcugcuacauacacuucuuccgugaaccuacugauuuaaagcaguucaagcaggaugcuaaguacucacaugggauugaugucacagaccucuucgcuacacaaccgggcuugaccagugcugucauugaugcacucccccggaauauggucauuaccugucagggguccgaugacauaaggaaacuccuugaaucacaaggaagaaaagacauuaaacuaauugauauugaccucaguaaaacugauuccaggaaguaugaaaaugcagucugggaccaguauaaagacuuaugccacaugcacacaggugucguuguugaaaagaagaaaagaggcgguaaagaggaaauaaccccucacugugcacuaauggacugcaucauguuugaugcagcagugucaggaggacugaacacaucgguuuugagagcagugcugcccagagauaugguguucagaacaucgacaccuagagucguucuguaa

SEQ ID NO: 8026 - RNA, 1710 nt, Artificial Sequence
  derived and/or modified CDS sequence (wt) from MOPV/LASV reassortant(IGS-4;Clade IV)__AFY05581__NP
augagugccucaaaggaaauaaaauccuuuuuguggacacaaucuuugaggagggaauuaucugguuacugcuccaacaucaaacuacagguggugaaagaugcccaggcucuuuuacauggacuugacuucuccgaagucaguaauguucaacgguugaugcgcaaggagagaagggaugacaaugauuugaaacgguugagggaccuaaaucaagcggucaacaaucuuguugaauuaaaaucaacucaacaaaagaguauacugagaguugggacucuaaccucagaugacuuauuaaucuuagccgcugaucuagagaaguuaaagucaaaggugaucagaacagaaaggccauuaagugcaggugucuauaugggcaaccuaagcucacagcaacuugaccaaagaagagcucuccugaauaugauaggaaugaguggugguaaucaaggggcucgggcugggagagauggaguggugagaguuugggaugugaaaaaugcagaguugcucaguaaucaguucgggaccauaccaagucugacacuggcaugucugacaaaacaggggcagguugacuugaaugaugcaguacaagcauugacagauuuggguuugaucuacacagcaaaguaucccaacacuucagacuuagacaggcugacucaaagucaucccauccuaaauaugauugacaccaagaaaagcucuuugaauaucucagguuauaauuuuagcuugggugcagcugugaaggcaggagcuugcaugcuggaugguggcaauauguuggagacaaucaaggugucaccucagacaauggaugguauccucaaauccauuuuaaaggucaagaaggcucuuggaauguucauuucagacaccccuggugaaaggaauccuuaugaaaacauacucuacaagauuuguuugucaggagauggauggccauauauugcaucaagaaccucaauaacaggaagggccugggaaaacacugucguugaucuggaaucaggugggaagccacagaaagcugacagcaacaauuccaguaaaucccugcagucggcaggguuuaccgcugggcuuaccuauucucagcugaugacccucaaggaugcaaugcugcaacuugacccaaaugcuaagaccuggauggacauugaaggaagaccugaagauccaguggaaauugcccucuaucaaccaaguucaggcugcuacauacacuucuuccgugaaccuacugauuuaaagcaguucaagcaggaugcuaaguacucacaugggauugaugucacagaccucuucgcuacacaaccgggcuugaccagugcugucauugaugcacucccccggaauauggucauuaccugucagggguccgaugacauaaggaaacuccuugaaucacaaggaagaaaagacauuaaacuaauugauauugaccucaguaaaacugauuccaggaaguaugaaaaugcagucugggaccaguauaaagacuuaugccacaugcacacaggugucguuguugaaaagaagaaaagaggcgguaaagaggaaauaaccccucacugugcacuaauggacugcaucauguuugaugcagcagugucaggaggacugaacacaucgguuuugaaagcagugcugcccagagauaugguguucagaacaucgacaccuagagucguucuguaa

SEQ ID NO: 8027 - RNA, 1710 nt, Artificial Sequence
  derived and/or modified CDS sequence (wt) from MOPV/LASV reassortant(IGS-9;Clade IV)__AFY05585__NP
augagugccucaaaggaaauaaaauccuuuuuguggacacaaucuuugaggagggaauuaucugguuacugcuccaacaucaaacuacagguggugaaagaugcccaggcucuuuuacauggacuugacuucuccgaagucaguaauguucaacgguugaugcgcaaggagagaagggaugacaaugauuugaaacgguugagggaccuaaaucaagcggucaacaaucuuguugaauuaaaaucaacucaacaaaagaguauacugagaguugggacucuaaccucagaugacuuauuaaucuuagccgcugaucuagagaaguuaaggucaaaggugaucagaacagaaaggccauuaagugcaggugucuauaugggcaaccuaagcucacagcaacuugaccaaagaagagcucuccugaauaugauaggaaugaguggugguaaucaaggggcucgggcugggagagauggaguggugagaguuugggaugugaaaaaugcagaguugcucaguaaucaguucgggaccauuccaagucugacacuggcaugucugacaaaacaggggcagguugacuugaaugaugcaguacaagcauugacagauuuggguuugaucuacacagcaaaguaucccaacacuucagacuuagacaggcugacucaaagucaucccauccuaaauaugauugacaccaagaaaagcucuuugaauaucucagguuauaauuuuagcuugggugcagcugugaaggcaggagcuugcaugcuggaugguggcaauauguuggagacaaucaaggugucaccucagacaauggaugguauccucaaauccauuuuaaaggucaagaaggcucuuggaauguucauuucagacaccccuggugaaaggaauccuuaugaaaacauacucuacaagauuuguuugucaggagauggauggccauauauugcaucaagaaccucaauaacaggaagggccugggaaaacacugucguugaucuggaaucagaugggaagccacagaaagcugacagcaacaauuccaguaaaucccugcagucggcaggguuuaccgcugggcuuaccuauucucagcugaugacccucaaggaugcaaugcugcaacuugacccaaaugcuaagaccuggauggacauugaaggaagaccugaagauccaguggaaauugcccucuaucaaccaaguucaggcugcuacauacacuucuuccgugaaccuacugauuuaaagcaguucaagcaggaugcuaaguacucacaugggauugaugucacagaccucuucgcuacacaaccgggcuugaccagugcugucauugaugcacucccccggaauauggucauuaccugucagggguccgaugacauaaggaaacuccuugaaucacaaggaagaaaagacauuaaacuaauugauauugaccucaguaaaacugauuccaggaaguaugaaaaugcagucugggaccaguauaaagacuuaugccacaugcacacaggugucguuguugaaaagaagaaaagaggcgguaaagaggaaauaaccccucacugugcacuaauggacugcaucauguuugaugcagcagugucaggaggacugaacacaucgguuuugagagcagugcugcccagagauaugguguucagaacaucgacaccuagagucguucuguaa

SEQ ID NO: 8028 - RNA, 1710 nt, Artificial Sequence
  derived and/or modified CDS sequence (wt) from LASV(LM032-SLE-2010;Clade IV)__AIT17803__NP
augagugccucaaaggaaauaaaguccuuuuuguggacacagucauugaggagggaauuaucugguuacugcucuaacaucaaauuacagguggugaaagaugcccaagcucuuuuacauggacuugacuucuccgaagucaguaauguucaacggcugaugcgcaaggagagaagggaugacaaugauuugaagcgguugagggaccuaaaucaagcggucaacaaccuuguugaguuaaaaucaacucaacaaaagaguauucugagaguugggacucuaacaucagaugauuuauuaaucuuagccgcugaucuagaaaaguugaaaucaaaggugauuaggacagagaggccauugagugcaggugucuauaugggcaaccugagcucacagcaacuugaccaaagacgagcucuucuaaguaugauaggaaugaguggugguagucaagaggcucgggcagggagagauggaguagugagaguuugggauguaaaaaaugcagaguugcuuaacaaucaguucgggaccaugccaagucugacacuggcaugucugacaaagcaggggcagguugauuugaaugaugcagugcaagcauugacagauuugggucugaucuacacagcaaaguaucccaauacuucagacuuagauaggcugacucaaagucaccccauccuaaacaugauugacaccaagaaaagcucuuugaacaucucagguuauaauuucagccugggugcagcugugaaggcaggagcuugcaugcuggaugguggcaauauguuggagacaaucaaggugucaccucagacaguggacgguauccucaaauccaucuuaaaggucaagaaggcucuugggauguucaucucagacaccccuggugaaaggaauccuuaugaaaacauacucuauaagauuuguuugucaggagauggauggccauauauugcaucaagaacuucaauaacaggaagggcuugggaaaacacugucguugaucuggaaucagauggaaagccacagaaagcugguagcaacaauuccaauaaauccuugcagucggcaggguuuaccgcugggcuuaccuauucucaguuaaugacccugaaggaugcaauguugcaacuugacccaaaugccaagaccuggauggacauugaaggaagaccugaagauccaguggaaauugcccucuaucaaccaaguucaggcugcuacauucacuucuuccgugaaccuacugauuuaaagcaguucaagcaggaugcuaaguacucacaugggauugauguuacagaccucuucgcugcgcaaccgggcuugaccagugcugucauugaugcacucccccgaaauauggucauuaccugucagggguccgaugacauaaggaaacuccuugaaucacaagguaggaaagacaucaaacugauugauauugcccuuagcaaaacugauuccaggaaguaugaaaaugcagucugggaucaguauaaggacuuaugccacaugcacacaggugucguuguugaaaagaagaaaaaaggcgguaaagaggaaauaaccccucacugugcacuaauggacugcaucauguuugaugcagcagugucaggaggacugaacacaucaguuuugagagcagugcugccuagagauaugguguucagaacaucgacaccuagagucgucuuguaa

SEQ ID NO: 8029 - RNA, 1710 nt, Artificial Sequence
  derived and/or modified CDS sequence (wt) from LASV(LM395-SLE-2009;Clade IV)__AIT17811__NP
augagugccucaaaggaaauaaaauccuuuuuguggacacaauccuugaggagggaauuaucugguuacugcuccaacaucaaacuacagguggugaaagaugcccaggcccuuuuacauggacuugacuucucugaagucaguaauguucaacgguugaugcgcaaggagagaagggaugacaaugauuugaaacgguugagggaucuaaaucaagcggucaacaaucuuguugaauuaaagucaacucaacaaaagaguauacugagaguugggacucuaaccucagaugacuuguuaauccuggccgcugaucuagagaaguugaagucaaaggugaccagaacagaaaggccauugagugcaggugucuauaugggcaaccuaagcucacagcaacucgaccaaagaagagcucuucugaacaugauaggaaugagugguaguaaucaaggggcucgggcugggagagauggagugguuagaguuugggaugugaaaaaugcagaguugcucaauaaucaguucgggacuaugccaaguuugacacuggcaugucugacaaaacaggggcagguugacuugaaugaugcaguacaagcauuaacagauuuagguuugaucuacacagcgaaguauccuaacacuucagacuuggacaggcugacucaaagucaccccauccuaaauaugauugacaccaagaagagcucuuugaauaucucagguuauaauuuuagcuugggugcagcugugaaggcaggagcuugcaugcuggaugguggcaauauguuggagacaaucaaggugucaccucagacaauggaugguauucucaaauccaucuuaaaggucaagaaggcucuugggauguucauuucagauaccccuggugaaaggaauccuuaugaaaacauacucuacaagauuuguuugucaggagauggauggccauacauugcaucaagaaccucaauaacaggaagggccugggaaaacacugucguugaucuggaaucagaugggaagccacagaaagcuggcagcaacgguuccaauaaaucucuacagucggcaggguuuaccgcugggcuuaccuauucucagcugaugacccucaaggaugcaaugcugcaacuugacccaaaugcuaagaccuggauggacauugaaggaaggccugaagauccaguggaaaucgccuucuaucaaccaagcucaggaugcuacauacauuucuuccgugaaccuacugacuuaaagcaguucaagcaggaugcuaaguacucacaugggauugaugucacggaccucuucgcugcacaaccgggccugaccagugcuguuauugaugcacucccccgaaauuuggucauuaccugucaggggucggaugacauaaggaaacucuuugaaucacaaggaagaaaagacaucaaacuaauugacauugcccucagcaaaacugauuccaggaaguaugaaaaugcagucugggaccaguauaaagacuuaugccacaugcacacagguauuguuguugagaagaagaaaagaggcgguaaagaggaaauaaccccucacugugcacuaauggacugcaucauguuugaugcagcagugucaggaggacugaacgcaucaguuuugagagcagugcugcccagagacaugguguucagaacaucaacaccuagagucguccuguaa

SEQ ID NO: 8030 - RNA, 1710 nt, Artificial Sequence
  derived and/or modified CDS sequence (wt) from LASV(LM765-SLE-2012;Clade IV)__AIT17815__NP
augagugccucaaaggaaauaaaauccuuuuuguggacacaauccuugaggagggaauuaucugguuacugcuccaacaucaaacugcagguggugaaggaugcccaggcucuuuuacaugggcuugacuucucugaagucaguaauguucaacgguugaugcgcaaggagagaagggaugacaaugauuugaaacgguugagggaccuaaaucaagcagucaacaaucuuguugaauuaaaaucaacucaacaaaagaguauacugagaguugggacucuaaccucagaugacuuauuaaucuuggccgcugaucuagagaaguugaagucgaaggugaccagaacagaaaggccauugagugcaggugucuauaugggcaaccuaagcucucagcaacuugaccaaagaagagcucuucuggacaugauaggaaugagugguaguaaucaaggggcucgggcugggagagauggaguggucagaguuugggaugugaaaaaugcagaguugcucaauaaucaguucgggaccaugccaagucugacacuggcaugucugacaaaacaggggcagguugacuugaaugaugcagugcaagcauugacagauuuagguuugaucuacacagcgaaguaccccaauacuucagacuuggacaggcugacucaaagucaucccauccuaaauaugauugacaccaagaaaagcucuuugaacaucucagguuauaauuuuagcuugggugcagcugugaaggcaggagcuuguaugcuggaugguggcaauauguuggagacaaucaaggugucaccucagacaauggauggcauucucaaauccauuuuaaaggucaagaaggcucuugggauguuuauuucagaugccccuggugaaaggaauccuuaugaaaacauacucuacaagauuuguuuaucaggagacggauggccauacauugcaucaagaaccucaauaacaggaagggccugggaaaacacuguuguugaccuggaaucagaugggaagccacagaaagcuggcaguaacgguuccaauaaaucucugcagucggcaggauuuaccgcugggcucaccuauucucagcugaugacccucaaggaugcaaugcugcaacuugacccaaaugcuaagaccuggauggacauugaaggaagaccugaagauccaguggaaaucgcccucuaucaaccaaguucagggugcuacauacacuucuuccgugaaccuacugauuuaaagcaguucaagcaggaugcuaaguacucacaugggauugaugucacggaccucuucgcugcacagccgggcuugaccagugcugucauugaugcacucccccggaauauggucaucaccugccagggaucugaugacauaaggaaacucuuugaaucacaaggaagaaaagacauuaaacuaauugacauugcccucagcaagacugauuccaggaaguaugaaaaugcagucugggaucaguauaaagauuuaugccacaugcauacagguauuguuguugagaagaagaaaagaggugguaaagaggaaauaaccccucacugugcauuaauggacugcaucauguuugaugcagcaguaucaggaggacugaacacaucaguuuugagagcagugcugcccagagacaugguguucagaacaucgacaccuagggucguccuguaa

SEQ ID NO: 8031 - RNA, 1710 nt, Artificial Sequence
  derived and/or modified CDS sequence (wt) from LASV(LM774-SLE-2012;Clade IV)__AIT17821__NP
augagugcuucaaaggaaauaaaguccuuucuguggacacaaucauuaaggagggaauugucugguuacugcuccaacaucaaacuacagguggugaaagaugcccaggcucuucugcauggacuugacuucuccgaaguaagcaauguucaacgguugaugcgcaaggagagaagggaugacaaugauuuaaagcgguugagggaccuuaaucaagcggucaacaaccuuguugaguuaaaaucaacucaacaaaagagcauauugagaguuggaaccuuaaccucagaugacuuauuaaucuuagcugcugaucuagagaagcugaaaucaaaggugaucaggacagaaaggccauugagugcaggugucuacauggguaaccugagcucacagcaacuugaccagagacgagcucuucugagcaugauagggaugaguggugguaaucagggggcucgggcugggagagaugggguggugagaguuugggaugugaaaaaugcagaauugcucaauaaucaguucgggaccaugccaagucuuacacuggcaugucugacaaaacagggacagguugacuugaaugaugcagugcaagcauugacagauuugggucugaucuacacggcgaaguaucccaauacuucagacuuggauaggcugacucaaagucaccccauccuaaacaugauugacaccaagaagagcucuuuaaacaucucagguuauaauuuuagcuugggugcagcugugaaggcgggagcuuguaugcuggaugguggcaacauguuggagacaaucaaggugucaccucagacaguggaugguauccucaaauccaucuugaaggucaagaaggcucuugggauguucaucucagacaccccuggugaaaggaauccuuaugagaacauacucuacaaaauuugccugucaggagauggguggccauacauugcaucaaggaccucaauaacaggaagggccugggaaaacacugucguugaucuggaaucagaugggaagccacagaaaacuggcagcaacaauuccaacaaaucccugcagucggcaggguuuaccgcugggcuuaccuauucucagcugaugacccucaaggaugcaaugcugcaacuugauccaaaugcaaagacuuggauggauauugaaggaagaccugaggauccaguggaaguugcccucuaucagccaaguucaggcuguuacauucacuucuuucgugaaccuacugauuuaaagcaguucaaacaggaugcuaaguacucacaugggauugaugucacagaccucuucgcugcacaaccgggccugaccagugcugucauagaugcacucccucggaauauggucauuaccugucagggguccgaugacauaaggaaacuccuugaaucacaagguaggaaagacaucaaacuaauugauauugcccucagcaaaacugauuccaggaaguaugaaaaugcagucugggaucaguauaaagacuuaugccacaugcacacaggugucguuguugagaagaagaaaagaggcgguaaagaggaaauaaccccucacugugcacuaauggacugcaucauguuugacgcagcagugucaggaggacugaacacaucgguuuugagagcagugcugcccagggauaugguguuuagaacaucaacaccuagagucguccuguaa

SEQ ID NO: 8032 - RNA, 1710 nt, Artificial Sequence
  derived and/or modified CDS sequence (wt) from LASV(LM776-SLE-2012;Clade IV)__AIT17825__NP
augagugcuucaaaggaaauaaaguccuuucuguggacacaaucauuaaggagggaauuaucuaguuacuguuccaacaucaaacuacagguggugaaagaugcccaggcucuuuugcaugggcuugacuucuccgaagucagcaauguucaacgguugaugcgcaaggagagaagggaugacaaugauuuaaagcgguugagggaccuuaaucaagcagucaacaaccuuguugaguuaaaaucaacucaacaaaagaguauauugagaguugggaccuuaaccucagaugacuuacuaaucuuagcugcugaucuagagaagcugaaaucaaaggugacuaggacagaaaggccauugagugcaggugucuacauggguaaccugagcucacagcaacuugaccagagacgagcucuucugagcaugauagggaugagugguaguaaucaaggggcucgggcugggagagauggaguggugagaguuugggaugugaaaaaugcagaguugcucaauaaucaguucgggaccaugccaagucuuacacuggcauguuugacaaaacaggggcagguugacuugaaugaugcagugcaagcauugacagauuugggucugaucuacacggcaaaguaucccaauacuucagaccuggauaggcugacucaaagucaccccauccuaaacaugauugacaccaagaagagcucuuuaaacaucucagguuauaauuuuagcuugggugcagcugugaaggcaggagcuugcaugcuggaugguggcaacauguuggagacaaucaaggugucaccucagacaauggaugguauccucaaauccaucuugaaggucaagaaggcucuugggauguucaucucagacaccccuggugaaaggaauccuuaugagaacauacucuauaagaucugucugucaggagauggguggccauacauugcaucaaggaccucaauaacaggaagggcuugggaaaacacugucguugaucuggaaucagaugggaagccacagaaagcuggcagcaacaauucuaacaaaucccugcagucggcaggguuuaccgcugggcuuaccuauucucagcuaaugacucucaaggaugcaaugcugcaacuugauccaaaugcuaagaccuggauggauauugaaggaagaccugaagauccaguggaaguugcccucuaucaaccaaguucaggcuguuacauucacuucuuccgugaaccuacugauuuaaagcaguucaaacaggaugcuaaguacucacaugggauugaugucacagaccucuucgcugcacaaccgggccugaccagugcugucauagaugcacucccucggaauauggucauuaccugucagggguccgaugacauaaggaaacuccuugaaucacaagguaggaaagacaucaaacuaauugauauugcccucagcaaaacugauuccaggaaguaugaaaaugcagucugggaucaguauaaagacuuaugccacaugcacacaggugucguuguugagaagaagaaaagaggugguaaagaggaaauaaccccucacugugcacuaauggacugcaucauguuugacgcagcagugucaggaggacugaacacaucgguuuugagagcagugcugcccagggauaugguguucagaacaucaacaccuagagucguucuguaa

SEQ ID NO: 8033 - RNA, 1710 nt, Artificial Sequence
  derived and/or modified CDS sequence (wt) from LASV(Mad39;Clade IV)__ANH09723__NP
augagugccucaaaagagauaaagucuuuuuuguggacacagucucugaggagggaauugucggguuacugcuccaacaucaaacuacagguggugaaagaugcccaggcucuuuuacauggacuugacuuuucugaggucagcaacguccaacggcugaugcgcaaacagagaagggaugacaaugaucuaaagcggcugagggauuuaaaucaagcaguuaacaaucuuguugaacuaaaaucaacucagcaaaagaguguguugagaguuggaacucuaaccucagaugacuuguugacauuagcugcugaccuagagaagcugaaaucaaagguaaccaggacagaaagaccauugaccgcaggcguuuacaugggcaacuuaaguucacaacagcuugaccaaagacgggcucuccugaauaugauaggaaugaguggugguaaccaaggggcucgaacugggagagaugggguagugagggucugggauguuaaaaaugcagaauugcucaacaaucaguuuggaacuaugccaagcuugacacuagcaugccugacaaagcaagggcagguugaccuaaaugauguggugcaagcacuaacagaucuaggccugaucuauacagcaaaguaucccaacacuucagaccuggacagacuaacucagagccaucccauccuaaacaugauugauacuaauaaaagcucccuaaauaucucagguuauaauuuuagcuugggugcagcugugaaggcaggagcuugcaugcuggaugguggaaacaugcuagagacaaucaaagugucaccccaaacaauggauggcauccucaaguccauuuuaaagguaaaaaagagucuugggauguucauuucagacacccccggcgagagaaaucccuaugaaaauauacucuacaagauuugucugucgggggauggguggccauauauugcaucaaggaccucaauaacaggaagggccugggaaaauacuguuguugaucuagaaucaggugggaagccacagaaagcugguagcaacaacuccaacaagucccuacaaucggcaggauuugcugcugggcucacuuauucucaguuaaugacccucaaggaugcaauguugcaacuugauccaaaugcuaagaccuggauggauauugagggaaggccugaagacccaguggagauugcucucuaucagccaauuucggguugcuacauucacuucuuccgugaaccuacugaucugaaacaguucaagcaagaugcuaaguauucacauggaauugauguuacagaccuuuuugcugcacaaccaggauuaacuagugcugugauagaagcacucccccggaacauggucaucaccugucaaggaucugacgacauaaggaaacuuuuugagucacaaggaaggaaagacaucaagcugauugauauugcucucagcaaaacugauucuagaaaauaugaaaacgcagucugggaccaguacaaagauuuaugucauaugcacacagguguuguuguugagaagaaaaagaagggcggcaaagaagaaauaaccccucauugugcucuaauggacugcaucauguuugaugcagcaguaucaggagggcugaacacgcugguuuugagagcagugcuaccuagagauaugguguucagaacaucaacaccuaaagucguccuguaa

SEQ ID NO: 8034 - RNA, 1710 nt, Artificial Sequence
  derived and/or modified CDS sequence (wt) from LASV(Mad41;Clade IV)__ANH09725__NP
augagugccuccaaggagauaaaguccuucuuguggacacagucucugaggagagaacugucggguuacugcucuaacaucaaacuacagguggugaaagacgcccaggcucuuuugcauggacuugacuucucugaggucagcaauguccaacgguugaugcgcaaacagaggagggaugacaaugaccuaaagcggcugagggauuuaaaucaggcaguuaacaaccuuguugaauuaaaaucaacucagcaaaagaguguguugaggguugggacucuaaccucagaugaccuguugauauuagcugcugacuuagagaagcugaaaucaaagguaaccaggacagaaagaccauuaagugcagguguuuauaugggcaacuuaagcucacaacagcuugaccaaagacgggcucuuuugaacaugauaggaaugaguggugguaaccaaggggcccgagcugggagagaugggguagugagggucugggaugucaaaaaugcagauuugcucaacaaucaauuuggaacuaugccaagccuaacacuggcaugcuuaacaaagcaggggcagguugaccuaaaugauguaguucaagcgcuuacagaucuaggccugaucuacacagcaaaguaccccaacacuucagauuuagacagacuaacucagagucauccuauccuaaacaugauugacaccaauaaaagcucccuaaauaucucagguuauaauuuuagcuugggugcagcugugaaggcaggagcuugcaugcuagaugguggaaacaugcuagagacaauuaaagugucaccccaaacaauggauggcauccuuaagucuauuuuaaagguaaaaaagagucuugggauguuuauuucagauaccccuggcgagagaaacccuuaugaaaacauacucuacaagaucugucugucgggggauggguggccauacauugcaucaaggaccucaauaacaggaagggcuugggaaaauaccguuguugauuuagaaucaggugggaaaccacagaaagcuggaagcaauaacuccaacaaguccuuacaaucggcgggguuugcugcuggacucacuuauucucaguuaaugacccucaaggaugcaaugcugcaacuugacccuaaugcuaagaccuggauggacauugagggaaggccugaagauccgguggagauugcucucuaucaaccaauuucagguugcuacauucacuucuuccgugaaccuaccgaucugaagcaguuuaagcaagaugcuaaguauucacauggaauugaugucacagaccuuuuugcugcacaaccaggacuaacuagugcugugauagaagcacucccccggaacauggucaucaccugucagggaucugaugacauaagaaaacuucuugagucacaaggaaggaaagacaucaagcugauugauauugcucucagcaaaacugauucuagaaaauaugagaacgcagucugggaucaguacaaagauuuaugccauaugcacacagguguuguuguugagaagaaaaagaggggcggcaaagaagaaauaaccccucauugcgcucuaauggacugcaucauguuugaugcagcaguaucaggagggcugaacacauugguuuugagggcagugcuaccuagggauaugguguucagaacaucaacaccuaaagucguccuguaa

SEQ ID NO: 8035 - RNA, 1710 nt, Artificial Sequence
  derived and/or modified CDS sequence (wt) from LASV(Mad63;Clade IV)__ANH09729__NP
augagugccucaaaagagauaaaguccuucuuguggacacagucccugaggagagaauugucggguuacuguucuaacaucaaacuacagguggugaaagaugcccaggcccuuuugcauggacuugacuuuucugaggucagcaacguccaacgauugaugcguaaacagaggagggaugacagugaccuaaagcggcugagggauuugaaucaagcaguuaacaaucuuguugaacuaaaaucaacucagcaaaagaguguguugagaguuggaacucuaaccucagaugacuuguugacauuagcugcugaccuagagaagcugaaaucaaagguaaccagaacagaaagaccauugagcgcaggcguuuacaugggcaacuuaagcucacaacagcuugaccaaagacgggcucuccugaauaugauaggaaugaguggugguaaccaaggggcucgaacugggagagaugggguaguaagggucugggaugucaaaaaugcagauuugcucaacaaucaguuuggaacuaugccaagcuugacuuuggcaugcuugacaaagcaagggcagguugaccugaaugauguggugcaagcgcuaacagaucuaggccugaucuacacagcaaaguaccccaacacuucagacuuagacagacuaacucagagccaucccauccuaaacaugauugacaccaauaaaagcucccuaaauaucucagguuauaauuuuagcuugggugcagcugugaaagcaggagcuugcaugcuagaugguggaaacaugcuggagacaauuaaagugucaccccaaacaauggauggcauccuuaagucuauuuuaaagguaaaaaagagucuugggauguucaucucagacaccccuggcgagagaaauccuuaugaaaacauacucuacaagaucugucugucaggggauggguggccauauauugcaucaaggaccucaauaacaggaagggccugggaaaacacuguuguugauuuagaaucaggugggaaaccacagagagcuggaagcaacaacuccaacaagucccuacaaucggcgggauuugcugcugggcuuacuuauucucaguuaaugacccucaaagaugcaauguugcaacuugauccaaaugcuaagaccuggauggauauugagggaaggccugaagauccaguggagauugcccucuaucagccaacuucggguugcuacauucacuucuuccgugaaccuacugaucugaagcaguucaagcaagaugcuaaguauucacaugggauugauguuacagaccuuuuugcugcacaaccaggauuaacuagugcugugauagaagcacucccccggaacauggucaucaccugucagggaucugacgacauaagaaagcuucuugaaucacaagggaggaaagacaucaagcuaauugauauugcucucagcaagacugauucuagaaaauaugaaaacgcagucugggaucaguacaaagauuuaugucacaugcacacagguguuguuguugagaagaaaaagaagggcgguaaagaagaaauaaccccucauugcgcucugauggacugcaucauguuugaugcagcaguaucaggagggcuaaacacacugguuuugagagcagugcuaccuagggauaugguguucagaacaucaacaccuaaagucguccuguaa

SEQ ID NO: 8036 - RNA, 1710 nt, Artificial Sequence
  derived and/or modified CDS sequence (wt) from LASV(Mad69;Clade IV)__ANH09731__NP
augagugccucaaaagagauaaaguccuuccuguggacacagucucugaggagagaauugucggguuacugcuccaacaucaaacuacagguggugaaagaugcccaggcucuuuugcauggacuugacuuuucugaggucagcaacguccaacgguugaugcguaaacagaggagggaugacaaugaccuaaagcggcugagggauuuaaaucaagcaguuaacaaucuuguugagcuaaaaucaacucagcaaaaaaguguguugagaguuggaacucuaaccucagaugacuuguugacauuagcugcugaccuagagaagcugaaaucaaagguaaccaggacagaaagaccauugagcgcaggcguuuauaugggcaacuuaagcucacaacaacuugaccaaagacgggcucuccugaauaugauaggaaugacuggugguaaccaaggggcucgaacugggagagaugggguagugagggucugggaugucaaaaaugcagauuugcucaacaaucaguuuggaacuaugccaagcuugacauuggcauguuuaacaaagcaagggcagguugaccuaaaugauguggugcaagcgcuaacagaucuaggccugaucuacacagcaaaguaccccaacacuucagacuuagauagacuaacucagagccaucccauccuaaacaugaucgacaccaauaaaagcucccuaaauaucucagguuauaauuuuagcuuaggugcagcugugaaggcaggagcuugcaugcuggaugguggaaacaugcuagagacaauuaaagugucaccccaaacaauggauggcauccucaagucuauuuuaaagguaaaaaagagucuugggauguucauuucagacaccccuggcgagagaaauccuuaugaaaacauacucuacaagaucugucugucaggggauggguggccauacauugcaucaaggaccucaauaacaggaagggccugggaaaacacuguuguugauuuagaaucaggugggaaaccacagagagcuggaagcaacaacuccaacaagucccuacaaucggcaggauuagcugcugggcuuacuuauucucaguuaaugacccucaaggaugcaauguugcaacuugauccaaaugcuaagaccuggauggauauugagggaaggccugaagauccgguggagauugcucucuaucagccaacuucggguugcuacauucacuucuuucgugaaccuaccgaucugaagcaguucaagcaagaugcuaaguauucacaugggauugauguuacagaccuuuuugcugcacaaccaggauuaacuagugcugugauagaagcacucccccggaacauggucaucaccugucaaggaucugacgacauaagaaaacuucuugaaucacaaggaaggaaagacaucaagcugauugauauugcucucagcaaaacugauucuagaaaauaugaaaacgcagucugggaucaguacaaagauuuaugucacaugcacacagguguuguuguugagaagaaaaagaagggcgguaaggaggaaauaaccccucauugcgcucugauggacugcaucauguuugacgcagcaguaucaggagggcuaaacacacuggucuugagagcagugcuaccuagggauaugguguucagaacaucaacaccuaaagucguccuguaa

SEQ ID NO: 8037 - RNA, 1710 nt, Artificial Sequence
  derived and/or modified CDS sequence (wt) from LASV(Mad83;Clade IV)__ANH09733__NP
augagugccucaaaagagauaaaguccuucuuguggacacagucucugaggagagaauugucggguuacugcucuaacaucaaacuacagguggugaaagaugcccaggcucuuuugcauggacuugacuucucugaggucagcaacguccaacgguugaugcgcaaacagaggagggaugacaaugaccuaaagcggcugagggauuuaaaucaagcaguuaacaaucuuguugaacuaaaaucaacucagcaaaagaguguauugagaguuggaacucuaaccucagaugaccuguugacauuagcugcugaccuagagaagcuaaaaucaaagguaaccaggacagaaagaccauugagcgcaggcguuuauaugggcaacuuaagcucacaacagcuugaccaaagacgggcucuccugaauaugauaggaaugaguggugguaaccaaggggcucgaacugggagagaugggguagugagggucugggaugucaaaaaugcagaucugcucaacaaucaguuuggaacuaugccaagcuugacacuggcaugcuugacaaagcaggggcagguugaccuaaaugauguggugcaagcacuaacagaucuaggccuaaucuacacagcaaaguaccccaacacuucagacuuagacagacuaacucagagccaccccauccuaaacaugauugacaccaauaaaagcucccuaaacaucucagguuauaauuuuagcuuaggugcagcugugaaggcaggagcuugcaugcuggauggugggaacaugcuagagacaauuaaaguaucaccccaaacaauggauggcauccuuaagucuauuuuaaagguaaaaaagagucuugggauguucauuucagacaccccuggcgagagaaauccuuaugaaaacauacuuuauaagaucugucugucgggggauggguggccauauauugcaucaagaaccucaauaacagggagggcuugggaaaauacuguuguugauuuagaaucaggugggaaaccacagagagcuggaagcaacaacuccaacaagucccuacaaucggcaggguuugcugcugggcucacuuauucucaguugaugacucucaaggaugcaaugcugcaacuugauccaaaugcuaagaccuggauggauauugagggaaggccugaagauccgguggagauugcuuucuaucagccaauuucagguugcuacauucacuucuuccgugaaccuacugaucugaagcaauuuaagcaagaugcuaaguauucacauggaauugaugucacagaccuuuuugcugcacaaccaggauuaacuagugcugugauagaagcacucccccggaacauggucauuaccugucagggaucugaugacauaagaaaacuucuugagucacaaggaaggaaagacaucaagcugauugauauugcucucagcaaaacugauucuagaaaauaugaaaacgcaguaugggaucaguauaaagauuugugucacaugcacacaggcguuguuguugagaagaagaagaagggcggcaaagaagaaauaaccccucauugcgcucuaauggacugcaucauguuugaugcagcaguaucgggagggcugaacacacugguuuugagagcagugcuaccuagggauaugguguucagaacaucaacaccuaaagucguccuguaa

SEQ ID NO: 8038 - RNA, 1710 nt, Artificial Sequence
  derived and/or modified CDS sequence (wt) from LASV(NL;Clade IV)__AAO59513__NP
augagugccucaaaggaaguaaaguccuucuuguggacacaaucuuugaggagggaauuguccgguuacugcuccaacaucaaacugcagguggugaaagaugcccaagcucuucugcauggacuugacuucuccgaagucaguaauguucaacggcugaugcgcaaggagagaagggaugauagugauuugaagcgguugagggaccuaaaucaagcggucaacaaccuuguugaauugaaaucaacucaacaaaagagugugcuaagaguugggacucuaaccucagaugacuugcuagucuuagcugcugaucuagagaaguugagaucaaaagugaccaggacagaaaggccauugagugcaggugucuauaugggcaaccugagcucacagcaacuugaccaaaggcgagcucuucuaaguaugauaggaaugaaugguagcaaucaaggagcucgggcugggagagaugggguggugagaguuugggaugugaaaaaugcagaguugcucaacaaucaauucgggaccaugccaagccugacacuagcauguuuaacaaaacaagggcaaguugacuugaaugaugcaguacaagcauugacagauuuggguuugaucuacacagcaaaguaucccaauacuucagaccuggauaggcugacucaaagucaccccauccuaaauaugauugauacaaagaaaagcucuuugaaugucucagguuauaacuuuagcuugggugcagcugugaaggcaggagcuugcaugcuggaugguggcaauauguuggagacaaucaaggugucaccucagacaauggauggcauccucaaauccauuuuaaaggucaagaaggcucuugggauguucauuucagacaccccuggugaaaggaacccuuaugaaaacauacucuacaagauuugucugucaggggacggguggccauauauugcaucaagaaccucaauaacaggaagagccugggaaaacacuguuguugaucuggaaucagaugaaaagccacagaaagcuggcagcaacaauuccaacaaaucccugcaaucggcaggguuuaccgcugggcuuaccuacucucagcuuaugacccucaaagaugcaaugcugcaacuugacccaaaugcuaagacuuggauggacauugaaggaagaccugaagauccgguggaaauugcccuuuaucaaccaaguucaggcugcuacauacacuucuuccgugaaccuacugauuugaagcaguucaagcaagaugcuaaauacucacaugggauugauaucacagaccucuuugcugcacaaccgggcuugaccagugcuguuauagaugcacucccccggaacauggucauuaccugucagggguccgaugacauaaggaaacuccuugagucacaaggaagaaaagacaucaaguuaauugauauugcccucaacaaagcugacuccagaaaguaugagaaugcagucugggaucaguacaaagaccuaugccacaugcacacaggugucguuguugaaaagaagaaaagaggcggcaaagaggaaauaaccccucacugugcacugauggacugcaucauguuugaugcagcaguaucaggaggacugaaaacauugguccugagagcagugcuacccagagacaugguguucagaacaucgacaccuagagucguccuguaa

SEQ ID NO: 8039 - RNA, 1710 nt, Artificial Sequence
  derived and/or modified CDS sequence (wt) from LASV(Z0947-SLE-2011;Clade IV)__AIT17841__NP
augagugccucaaaggaaauaaaguccuuuuuguggacacaauccuugaggagggaauuaucugguuacugcuccaacaucaaacugcagguggugaaggaugcccaggcucuuuuacaugggcuugacuucucugaagucaguaauguucaacgguugaugcgcaaggagagaagggaugacaaugauuugaaacgguugagggaccuaaaucaagcagucaacaaucuuguugaauuaaaaucaacucaacaaaagaguauacugagaguugggacucuaaccucagaugacuuauuaaucuuggccgcugaucuagagaaguugaagucgaaggugaccagaacagaaagaccauugagugcaggugucuauaugggcaaccuaagcucacagcaacuugaccaaagaagagcucuucugaacaugauaggaaugagugguaguaaucaaggggcucggacugggagagauggaguggucagaguuugggaugugaaaaaugcagaguugcucaauaaucaguucggaaccaugccaagucugacacuggcaugucugacaaaacaggggcagguugacuugaaugaugcaguacaagcauugacagauuuagguuugaucuacacagcgaaguaccccaauacuucagacuuggacaggcugacucaaagucaccccauccuaaauaugauugacaccaagaaaagcucuuugaacaucucagguuauaauuuuagcuugggugcagcugugaaggcaggagcuuguaugcuggaugguggcaauauguuggagacaaucaaggugucaccucagacaauggaugguauucucaaauccauuuuaaaggucaagaaggcucuugggauguucauuucagaugccccuggugaaaggaauccuuaugaaaacauacucuacaagauuuguuugucaggagacggauggccauacauugcaucaagaaccucaauaacaggaagggccugggaaaacacuguuguugaucuggaaucagaugggaagccacagaaagcuggcaguaacgguuccaauaaaucucugcagucggcaggauuuaccgcugggcucaccuauucucagcugaugacccucaaggaugcaaugcugcaacuugacccaaaugcuaagaccuggauggacauugaaggaagaccugaagauccaguggaaaucgcccucuaucaaccaaguucagggugcuacauacacuucuuccgugaaccuacugauuuaaagcaguucaagcaggaugcuaaguacucacaugggauugaugucacggaccucuucgcugcacaaccgggcuugaccagugcugucauugaugcacucccccggaauauggucaucaccugccaggggucugaugacauaaggaaacucuuugaaucacaaggaagaaaagacauuaaacuaauugacauugcccucagcaagacugauuccaggaaguaugaaaaugcagucugggaucaguauaaagacuuaugccacaugcauacaggcauuguuguugagaagaagaaaagaggcggcaaagaggaaauaaccccucacugugcacuaauggacugcaucauguuugaugcagcaguaucaggaggacugaacacaucaguuuugagagcagugcugcccagagacaugguguucagaacaucgacaccuagggucguccuguaa

SEQ ID NO: 8040 - RNA, 1710 nt, Artificial Sequence
  derived and/or modified CDS sequence (wt) from LASV(Z0948-SLE-2011;Clade IV)__AIT17845__NP
augagugccucaaaggaaauaaaguccuuuuuguggacacaauccuugaggagggaauuaucugguuacugcuccaacaucaaacugcagguggugaaggaugcccaggcucuuuuacaugggcuugacuucucugaagucaguaauguucaacgguugaugcgcaaggagagaagggaugacaaugauuugaaacgguugagggaccuaaaucaagcagucaacaaucuuguugaauuaaaaucaacucaacaaaagaguauacugagaguugggacucuaaccucagaugacuuauuaaucuuggccgcugaucuagagaaguugaagucgaaggugaccagaacagaaagaccauugagugcaggugucuauaugggcaaccuaagcucacagcaacuugaccaaagaagagcucuucugaacaugauaggaaugagugguaguaaucaaggggcucagacugggagagauggaguggucagaguuugggaugugaaaaaugcagaguugcucaauaaucaguucggaaccaugccaagucugacacuggcaugucugacaaaacaggggcagguugacuugaaugaugcaguacaagcauugacagauuuagguuugaucuacacagcgaaguaccccaauacuucagacuuggacaggcugacucaaagucaccccauccuaaauaugauugacaccaagaaaagcucuuugaacaucucagguuauaauuuuagcuugggugcagcugugaaggcaggagcuuguaugcuggaugguggcaauauguuggagacaaucaaggugucaccucagacaauggaugguauucucaaauccauuuuaaaggucaagaaggcucuugggauguucauuucagaugccccuggugaaaggaauccuuaugaaaacauacucuacaagauuuguuugucaggagacggauggccauacauugcaucaagaaccucaauaacaggaagggccugggaaaacacuguuguugaucuggaaucagaugggaagccacagaaagcuggcaguaacgguuccaauaaaucucugcagucggcaggauuuaccgcugggcucaccuauucucagcugaugacccucaaggaugcaaugcugcaacuugacccaaaugcuaagaccuggauggacauugaaggaagaccugaagauccaguggaaaucgcccucuaucaaccaaguucagggugcuacauacacuucuuccgugaaccuacugauuuaaagcaguucaagcaggaugcuaaguacucacaugggauugaugucacggaccucuucgcugcacaaccgggcuugaccagugcugucauugaugcacucccccggaauauggucaucaccugccaggggucugaugacauaaggaaacucuuugaaucacaaggaagaaaagacauuaaacuaauugacauugcccucagcaagacugauuccaggaaguaugaaaaugcagucugggaucaguauaaagacuuaugccacaugcauacaggcauuguuguugagaagaagaaaagaggcggcaaagaggaaauaaccccucacugugcacuaauggacugcaucauguuugaugcagcaguaucaggaggacugaacacaucaguuuugagagcagugcugcccagagacaugguguucagaacaucgacaccuagggucguccuguaa

SEQ ID NO: 8041 - RNA, 1710 nt, Artificial Sequence
  derived and/or modified CDS sequence (wt) from LASV(Z148;Clade IV)__AAT49007__NP
augagugucucaaaagagauaaaauccuuucuguggacacagucucugaggagggaguugucggguuacugcucuaacauaaaauuacaagugguuaaagaugcucaagcucuucugcaugggcuugacuucucugaggucagcaauguccagcgguugaugcgcaagcaaagaagggaugacaacgacuugaaacgacugagagaccuaaaccaggcaguuaacaaucuuguugagcugaaaucaacucaacaaaagaguguacugagaguugggacauuaacuucagaugacuuguugauuuuagcugcugaccuagagaagcugaagucaaaggugaccaggacagaaaggccauugagcgcugguauuuacauggguaaucuaagcucacaacaacuugaucaacgacgagcucuuuugaauaugauagggaugaguggcgggaaucaaggggcucagacugggagagacggaguggugaggauuugggaugugaaaaaugcagagcugcuuaacaaucaguuugggaccaugccaaguuugacacuggcuuguuuaacaaaacagggacagguugauuugaacgauguuguucaggcauugacagaccugggcuugaucuacacagcaaaguaucccaacaccucagaccuggauagacuaacccagagccacccuauucuaaacaugauugauaccaagaaaagcucucugaauaucucagguuauaacuucagcuuaggugcagcuguaaaagcaggagcuugcaugcuggaugguggcaacauguuagagacaaucaaagugucaccccaaacaauggaugguauucucaaguccaucuuaaaggucaagaaagcucuugggauguuuauuucagacacuccuggugagagaaacccuuaugagaacauacuuuacaagaucuguuugucgggggauggguggccauacauugcaucaaggacuucaauaacaggaagggcaugggaaaacacuguuguugauuuggaaucaggcgagaagccacaaaaaauugggagcaacaacuccaacaaauccuugcagucugcaggguucacugcugggcucaccuauucucagcucaugacucucaaggaugcaaugcugcagcuugauccaaaugcuaagaccuggauggacauugaggggagaccugaagauccaguagaaauugcucuauaucagccaaguucaggcuguuacauucacuucuuccgugaacccacugaccuaaaacaguucaaacaagaugcuaaguauucacacggaauugauguuacagaccuuuuugcugcacagccagguuugaccagugcuguuauagaggcacucccccgaaacauggucaugaccugucaggggucugaugacauaagaaagcuccuugaaucacaaggaaggaaggauaucaaguugaucgauauugcucucagcaagacagauucuagaaaguaugagaaugcagucugggaccaauacaaagacuuaugccacaugcauacagguguuguuguugaaaagaagaagaaggguggcaaagaggaaauaaccccucacugugcccuaauggacugcaucauguuugaugcagcagcgucaggaggauugaacacauuaguuuuaagagcagugcuaccuagagauaugguguuuagaacaucaacacccaaagucguccuguaa

SEQ ID NO: 8042 - RNA, 1710 nt, Artificial Sequence
  derived and/or modified CDS sequence (wt) from LASV(Bamba-R114;Clade V)__AHC95554__NP
augagugccucuaaggaagugagguccuucuuauggacacagucuuuaaggagagaguugucaggcuauugcuccaacauuaaacuucagguggugaaggaugcucaagcccuucuacaugggcuugauuucuccgaggucagcaauguucagcgacugaugcgcaaacaaagaagagaugauggugaucugaagcgacuuagagaccugaaucaggcagucaauaaucuuguugaauuaaaaucaacacaacagaaaagugugcuaaggguuggcaccuugaacucggaugaucuguugacuuuggcggcugaucuugagaaacugaaaucaaaggucacaagaacagagagaccuuugagcucaggcgucuacaugggaaacuuaagcucacaacagcuugaucagaggagggcacuccuaaacaugauaggaaugacagguggcaaucaaggggcccaggcugggagggauggaguggugagaguuugggaugugaaaaaugcggaguuguuaaacaaccaauuugggacaaugccgaguuugacacuagcaugucuaacaaaacaggggcaagucgaccugaaugaugugguucaagcacucacagaucuggguuugauuuauacugccaaauaccccaauacuucagacuuagauagguugacccagagucaccccauucugaauaugauugacaccaagaagagcucccugaacaucucagguuacaauuucagucugggugcugcagugaaagcaggugccuguauguuggaugguggcaacaugcuagaaacaaucaaaauuucaccucaaucuguggauggcauuuugaaauccaucuugaagguuaagaggucucuuggaauguucguuucagacaccccgggugaaagaaaccccuaugaaaacauacucuauaaaaucugccugucaggugauggguggccauacauugcauccagaacaucaauagugggaagggccugggaaaacacugugguggacuuagaagcagaugggaaaccacaaaaaccaaacagugguagcucaaauaaaucccuccaaucugcaggcuuuccagcuggguugaccuacucucaacucaugacucucaaagaugcaauguugcaacuugauccaaaugccaagacauggauggauauagaggggaggccggaagacccgguggaaguugcccuauaucagccuagcucuggguguuacauacacuucuuccgagagcccacugaucuuaaacaauucaaacaagaugcaaaguacucccauggaauugaugucacagaucuguuugcugcacaaccagguuugaccagugcuguuauugaggcacucccccgaaauaugguuaucaccugccaagggucugaagacauaaagaagcuucuugaaucacaaggaagaaaggacauaaaauugauugacauugcccuuagcaaaauugacucuaggaaauuugaaaaugcuguaugggaucaauacaaagauuugugucacaugcacacagguguuguuguugaaaagaagaagagagguggcaaggaagaaauuaccccucauugugcgcuaauggauugcaucauguucgaugcugcugugucaggaggacuaaaugcaucgguucucagggcuguauugcccagggacaugguguuuagaacaucaacaccaaaagucguccuguaa

SEQ ID NO: 8043 - RNA, 1710 nt, Artificial Sequence
  derived and/or modified CDS sequence (wt) from LASV(Komina-R16;Clade V)__AHC95556__NP
augagugccucuaaagaaguuaaaucuuuccuauggacacagucuuugaggagagaauuaucgggcuacuguuccaacaucaaguugcagguggugaaggaugcccaagcucuucuacauggacuugauuuuucagaggucagcaauguccaacgguugaugcgcaagcagaggagggaugauggugaucuaaagcgacucagggaccuaaaccaggcagucaacaaucuuguugaguugaaaucaacacaacagaaaaaugugcugagaguugggacccugaacucagaugacuuauugaccuuagcagcugauuuagagaagcugaagucuaaagucacaagaacagagaggcccuugagcucaggugucuacaugggaaaccugaguucacagcagcuugaucagaggagggcacuccuaaauaugauagggaugacggguggcaaucaagggacccaaacugggagagaugggguggugagagucugggauguaaaaaaugcagaauuguugaauaaucaguuugguacaaugccaaguuugacauuagcaugucuaacaaaacaagggcaagcugauuuaaaugaugugguccaagcacucacagaucugggcuugauuuacacagcuaaauauccuaaugccucugaucuggauagguugacucaaagucaccccauuuuaaacaugauugauaccaagaagagcucccugaacaucucagguuauaacuuuaguuugggugcugcaguaaaagcaggugccuguauguuggauggugggaacauguuggaaacaaucaaaguuucaccucaaucaauggauggcauuuuaaaguccaucuugaaggucaagagagcucuugggauguuuguuucagacacuccgggugaaaggaacccuuaugaaaacauacucuauaaaauuugcuuaucaggugauggguggccauacauugcaucuagaacaucaauaguagggagggccugggaaaacacugugguagaccucgaggcagacggaaacccaaaaaaacucaacagcaauggcuccaauaaaucucuccagucugcaggcuucccagcugggcugaccuacucucaacuuaugacucuuaaagaugcaaugcugcaacuugacccaaaugccaagacauggauggacauagaggggagaccagaggacccgguggaaguugcccucuaucagcccaacucuggaugcuauauacauuucuuucgggagcccacugaucuuaagcaguuuaaacaagaugcaaaguauucucauggaauugaugucacagauuuguuugcugcacaaccuggucugaccagugcuguuauugaggcacuuccucggaauaugguuaucacuugccaggggucugaagacauaaggaagcuucuugaaucacaagggagaaaagacauaaaacugauugacauugcccuuaguaagacugacuccagaaaguuugagaaugcugugugggaucaacacaaggauuugugucacaugcacacagguguuguuguugagaagaagaagagagguggcaaggaagaaauuaccccucacugugcacuaauggacugcaucauguuugaugcugcugucucagggggacuaaauacauugguccucagggcuguucugcccagagacaugguguuuaggacaucaacaccaaaagucguccuguaa

SEQ ID NO: 8044 - RNA, 1710 nt, Artificial Sequence
  derived and/or modified CDS sequence (wt) from LASV(Ouoma-R123;Clade V)__AHC95558__NP
augagugccuccaaagaaguaagguccuuccuauggacacagucuuuaaggagagagcugucagguuacugcuccaauaucaagcuucagguagugaaggaugcccaagcucuuuugcaugggcuugauuucuccgaagucagcaauguccaacgguugaugcgcaaacaaaggagagaugauagugaucugaagcgacuuagagaccugaaucaggcagucaauaaccuuguugaauuaaagucaacacagcaaaaaagugugcugaggguugguaccuugaguucagacgaccuguugacucuggcagcugaucuugaaaagcugaagucgaaggucauaagaacagaaaggccuuugaguucaggugucuacaugggaaaccuaagcucacaacagcuugaucagagaagggcacuucugaauaugauagggaugacagguggcaaucagggggcccaggcugggagggauggaguagugagagucugggaugugagaaaugcagaauugcugaacaaccaauuugggacaaugccaaguuuaacauuagcaugucuaacaaagcaggggcaaguugaccugaaugaugugguucaagcacucacagaucuggguuugauuuacacagccaaauaucccaacacuucagauuuagauagguugacccagaaucaccccauuuugaauaugauugacaccaagaagagcucuuugaacaucucaggcuacaauuucagucugggugcugcagugaaagcaggugccuguaugcuggaugguggcaacauguuagaaacaaucaaaguuucaccucaaucuauagauggcauuuuaaaauccauucuaaaggucaagagaacucuuggaauguuuguuucagacaccccaggugaaagaaaccccuaugaaaacauacucuauaaaaucugcuugucaggugauggauggccauacauugcaucuagaacaucaauaguaggaagggcuugggaaaacacugugguggaccuagagacagacaggaaaucacaagggcccaacaguggcaacucaaacaaaucccuccaaucugcaggcuuuucagcuggacugacuuacucucagcuuaugacucucaaagacgcaauguuacaacuugauccgaaugccaagacauggauggacauagaagggaggccggaagacccaguggaaguugcccuauaucaacccaucuccggguguuacauacauuucuuccgagaacccacugaucucaaacaauucaaacaagaugcaaaguacucucauggaauugauaucacagaucuauuugcugcacagccagguuugaccagugcuguuauugaggcacucccucggaauaugguuaucaccugccaagggucugaggacauaaagaagcuccuugaaucacaaggaagaaaggauauaaaacugauugacauugcccuuagcaagauugauucuaggaaguuugaaaaugcuguaugggaucaauacaaagauuugugucacaugcacacagguguuguugucgagaagaagaagagaggugguaaggaagaaauuaccccucauugugcacuaauggauugcaucauguuugaugcugcugugucaggaggacuaaaugcaucgguucucagggccguguuacccagagacaugguguuuagaacaucaacaccaaaagucguccuguaa

SEQ ID NO: 8045 - RNA, 1710 nt, Artificial Sequence
  derived and/or modified CDS sequence (wt) from LASV(Soromba-R;Clade V)__AHC95552__NP
augagugcuucuaaagaagugaaaucuuuccuauggacacagucuuugaggagagaauuaucgggcuacuguuccaacaucaagcugcagguggugaaggaugcccaagcucuucuacauggacuugauuuuucagaggucagcaauguccaacggcugaugcgcaagcagaggagggaugauggugaucuaaaacgacucagggaccuaaaccaggcagucaacaaccuuguugaguugaaaucaacacaacagaaaaauguacugagaguugggacccugaacucagaugacuuauugaccuuagcagcugauuuagagaagcugaagucuaaagucacaagaacagagaggccccugagcucaggugucuacaugggaaaccugaguucacagcagcuugaucagaggagggcacuccuaaauaugauagggaugacggguggcaaucaagggacccaagcugggagagaugggguggugagagucugggauguaaaaaaugcagaauuauugaauaaucaauuugguacaaugccaagcuugacauuagcaugucuaacaaaacaagggcaagcugauuuaaaugaugugguccaagcacucacagauuugggcuugauuuacacagcuaaauauccuaaugccucugaucuggacagguugacucaaagucaccccauuuuaaacaugauugauaccaagaagagcucccugaacaucucagguuauaacuuuaguuugggugcugcaguaaaagcaggugccuguauguuggauggugggaacauguuggaaacaaucaaaguuucaccucaaucaauggauggcauuuuaaaguccaucuugaaggucaagagagcucuugggauguuuguuucagacacuccgggugaaaggaacccuuaugaaaacauacucuauaaaauuugcuuaucaggugauggguggccauacauugcaucuagaacaucaauaguagggagggccugggaaaacacugugguagaccucgaggcagacggaaacccaaaaaaacucaacagcaauggcuccaauaaaucucuccagucugcaggcuucccagcugggcugaccuacucucaacuuaugacucuuaaagaugcaaugcugcagcuugacccaaaugccaagacauggauggacauagaggggagaccagaggacccgguggaaguugcccucuaucagcccaacucugggugcuauauacacuucuuucgggagcccacugaucuuaagcaguuuaaacaagaugcaaaguauucucauggaauugaugucacagauuuguuugcugcacaaccuggucugaccagugcuguuauugaggcacuuccucggaauaugguuaucacuugccaggggucugaagacauaaggaagcuucuugaaucacaagggagaaaagacauaaaacugauugacauugcccuuaguaagacugacuccagaaaguuugagaaugcugugugggaucaauacaaggaucugugucacaugcacacagguguugucguugagaagaagaagagagguggcaaggaagaaauuaccccucauugugcacuaauggacugcaucauguuugaugcugcugucucagggggacuaaauacauugguccucagggcuguucugcccagagacaugguguuuagaacaucaacaccaagagucgucuuguaa

SEQ ID NO: 8046 - RNA, 1710 nt, Artificial Sequence
  derived and/or modified CDS sequence (wt) from LASV(Soromba-R30;Clade V)__AHC95560__NP
augagugccucuaaggaagugaaaucuuuccuauggacacagucuuugaggagagaauuaucgggcuacuguuccaacaucaaacugcagguaguaaaggaugcccaagcucuucuacauggacuugauuucucagaggucagcaauguccaacgguugaugcguaagcagaggagggaugauggugaucuaaagcgacucagggaccuaaaccaggcagucaacaaucuuguugaguugaaaucaacacaacagaaaaaugugcugagaguugggacccugaacucagaugacuuauugaccuuagcagcugauuuagagaagcugaagucuaaagucacaagaacagagagacccuugagcucaggugucuacaugggaaaccugaguucacagcagcuugaucagaggagggcacuccuaaacaugauagggaugucggguggcaaucaagggacccaaguugggagagaugggguggugagggucugggaugugaaaaaugcagaauuguugaacaaucaguuugguacaaugccgaguuugacauuagcaugucuaacaaaacaggggcaagcugauuuaaaugaugugguccaagcacucacagaucuggguuugauuuacacagccaaauauccuaaugccucugaucuagacagguugacccaaagucaccccaucuuaaacaugauugacaccaagaagagcucccugaacauuucagguuauaacuuuaguuugggcgcugcaguaaaagcaggugccuguauguuagauggugggaacauguuggaaacaaucaaaguuucaccucaaucaauggauggcauuuuaaaauccaucuugaaagucaagagagcucuuggaauguuugucucagacacuccgggugaaaggaacccuuaugaaaacauacucuauaaaauuugcuuaucaggugauggguggccauacauugcaucuagaacaucaauaguagggagagccugggaaaacacugugguagaccuugaagcagauggaaacccaaaaaaacucaacagcaauggcuccaauaaaucucuccagucugcaggcuuuccagcugggcugaccuacucucaacuuaugacucuuaaagaugcaaugcugcaacuugacccaaaugccaagacauggauggacauagaggggagaccagaggauccgguggaaguugcccucuaucagcccaacucugggugcuauauacacuucuuucgggagcccacugaucuuaagcaguuuaaacaagaugcgaaguauucucaugggauugaugucacagauuuguuugcugcacaaccuggucugaccagugcuguuauugaggcacuuccucggaauaugguuaucacaugccaggggucugaagacauaaggaagcuucuugaaucacaagggagaaaagacauaaaacugauugacauugcccuuaguaagacugacuccagaaaauuugagaaugcugugugggaucaacacaaggaucugugucacaugcacacagguguugucguugagaagaagaagagagguggcaaggaagaaaucaccccucauugugcacuaauggacugcaucauguuugaugcugcugucucagggggucuaaacacauugguccuuagggcuguucugcccagagacaugguguucagaacaucaacaccaaaagucguccuguaa

SEQ ID NO: 8047 - RNA, 1710 nt, Artificial Sequence; identical to SEQ ID NO: 7803
  derived and/or modified CDS sequence (wt) from LASV(Alzey;Clade VI)__SCA79106__NP

SEQ ID NO: 8048 - RNA, 1710 nt, Artificial Sequence
  derived and/or modified CDS sequence (wt) from LASV(NIGERIA IKEJI;Clade II)__AMZ00372__NP
augaguguuuccaaggaaguaaaaucauuccuuuggacacagucgcuaaggagagagcucucagguuauugcucaaacauaaagcuucaggucgucaaagacgcucaggcccuucuucacggucuugauuuuucugaagucagcaaugugcaacgucugaugcgcaagcaaaagagggaugacaaugacuuaaaacgccucagagacuuaaaucaggcagugaacaaucuuguugaauuaaagucagugcaacagaaaagcauucugagaguuggaacacuaacuucagacgaccuguugacacuggcggcugaccuggaaaaauuaaaauccaaagugauuagaacggagaggccgcugaguucagguguguauaugggaaaucugagcucacaacaacuugagcaaaggaaagcauuauuaaccaugauagguaugacuggugggucucaaagugcccaaccuggaagagacgggguugucagaguaugggaugugaagaacucagaccucuugaacaaucaauucggcaccaugccaaguuugacuuuggcaugccuuacuaaacagggucaaguugaucuuaaugaugcuguucuggcauugacagauuuaggacugauauacacugccaaguauccuaacacuuccgauuuggacaggcugucccaaagccauccuauacugaacaugguagacaccaagaagagcucuuuaaacaucucuggcuauaauuucagccugggggcugcagugaaggcuggggccugcaugcuugacggaggcaacaugcuggagacuauaaaggucacaccucagacgauggaugguauccugaaaucuaucuugaaggugaagagggcuuugggaauguuuguuucagacacaccuggcgaaaggaauccuuaugagaacauacucuacaagauuugccucucuggagauggauggcccuacauagcaucaagaacuuccauuguggggagagcuugggaaaacaccauuguggaucuugagucggacagcaaaccgcagaaaguaggcgcuauagguucaaacaagucacugcaaucugcaggauucccagcggguuugacuuauucucaacugaugacacucaaagacucuaugaugcagcuagacccaagugcuaaaacuuggauagacauugaaggucgcccagaggacccuguggagauugcucuuuaucagcccauuucaggcuguuacauacauuucuuuagagagccaacagauuuaaaacaguuuaagcaagaugcaaaguacucacacgggauugauguagcagaucuuuucucugcccagccuggucuuaccagugcaguuaucgaagcucucccucgcaacauggucuugaccugucaagguucagaugacauuaagaaacuuuuggacucucaagggaggagggacauaaagcuuauugacauaucauuaaauaaagcugauucuagaagauuugagaaugcuguuugggaucaguguaaggaucugugccacaugcacacuggagugguuguugagaaaaagaaaaggggagguaaggaggaaaucacuccacacugugcucugauggauuguauaauguuugaugcagccguuucaggaggacuuaacauaccaaccuugagagcuguacuuccgagagacaugguauuuagaacuucaagccccaaggucguccuguaa

SEQ ID NO: 8049 - RNA, 1710 nt, Artificial Sequence
  derived and/or modified CDS sequence (opt1) from LASV(Josiah;Clade IV)__NP_694869__NP
augagcgccuccaaggagaucaagagcuuccuguggacccagucccuccgccgggagcugagcggcuacugcuccaacaucaagcuccagguggucaaggacgcccaggcgcugcugcacgggcuggacuucagcgagguguccaacgugcagcgccucaugcggaaggagcgccgggacgacaacgaccugaagcgccugcgggaccucaaccaggccgucaacaaccugguggagcucaagagcacccagcagaaguccauccugcgcgugggcacccugaccagcgacgaccugcucauccuggccgccgaccuggagaagcucaaguccaaggucauccggaccgagcgcccccugagcgccgggguguacaugggcaaccuguccagccagcagcucgaccagcggcgcgcgcugcugaacaugaucgggauguccggcggcaaccagggggcccgggccggccgcgacggggugguccgggugugggacgugaagaacgccgagcuccugaacaaccaguucggcaccaugccgagccugacgcucgcgugccugaccaagcaggggcaggucgaccugaacgacgccgugcaggcccucaccgaccugggccugaucuacaccgccaaguaccccaacacguccgaccucgaccgccugacccagagccaccccauccugaacaugaucgacaccaagaaguccagccucaacaucagcggcuacaacuucucccugggggccgcggugaaggccggcgccugcaugcuggacgggggcaacaugcucgagaccaucaaggucagcccccagacgauggacggcauccugaaguccauccugaaggugaagaaggcccucgggauguucaucagcgacaccccgggcgagcggaaccccuacgagaacauccuguacaagaucugccuguccggggacggcuggcccuacaucgccagccgcaccuccaucaccgggcgggcgugggagaacacgguggucgaccucgagagcgacggcaagccccagaaggccgacuccaacaacagcuccaagagccugcaguccgccggcuucaccgccgggcugaccuacagccagcucaugacccugaaggacgccaugcugcagcuggacccgaacgcgaagacguggauggacaucgagggccgccccgaggaccccguggagaucgcccucuaccagcccuccagcgggugcuacauccacuucuuccgggagccgaccgaccugaagcaguucaagcaggacgccaaguacucccacggcaucgacgugaccgaccuguucgccacccagcccgggcucacgagcgccgucaucgacgcgcugccccgcaacauggugaucacgugccagggcuccgacgacauccgcaagcugcucgagagccagggccggaaggacaucaagcugaucgacaucgcccugagcaagaccgacucccgcaaguacgagaacgccgugugggaccaguacaaggaccucugccacaugcacaccggggucguggucgagaagaagaagcggggcgggaaggaggagaucaccccgcacugcgcccugauggacugcaucauguucgacgcggccgugagcggcgggcugaacaccuccgugcuccgcgccguccugccccgggacaugguguuccgcaccagcacgccccgggugguccuguga

SEQ ID NO: 8050 - RNA, 1710 nt, Artificial Sequence
  derived and/or modified CDS sequence (opt1) from LASV(LP;Clade I)__AAF86702__NP
augagcaacuccaaggagaucaagagcuuccuguggacccagucccuccgccgggagcugagcggcuacugcuccaacaucaagcuccagguggucaaggacgcccaggcccugcugcacgggcuggacuucagcgagguguccaacgugcagcgccucaugcggaagcagaagcgcgacgacgcggaccugaagcggcugcgcgaccucaaccaggccgucaacaaccugguggagcucaagagcacccagcagaagaacgugcugcgggucggcacgcuguccagcgacgaccugaucacccucgccgccgaccuggagaagcugaaguccaaggugauccgcaccgagcggccccucagcuccgggguguacaugggcaaccugagcucccagcagcuggaccagcgccgggcccuccugagcaugaucgggauguccggcggcccgcaggggaaccgcaccggcggggacggcgucgugcgggugugggacgucaagaacgcggagcugcucaacaaccaguucgggacgaugcccagccugacccuggccugccucaccaagcagggccagguggaccugaacgacgccgugcaggcccugaccgaccucggccugaucuacacggcgaaguaccccaacuccagcgaccuggacaugcucacccagagccaccccauccuggggauggucgacaccaagaaguccagccugaacaucuccggcuacaacuucagccucggggccgccgugaaggccggcgccugcaugcuggacggcgggaacaugcuggagaccaucaagguguccccgcagacgauggacggcauccucaagagcauccugaaggucaagcgcucccuggggauguucaucagcgacacccccggcgagcggaaccccuacgagaacauccucuacaagaucugccuguccggggagggcuggcccuacaucgcgagccgcaccuccaucaccggccgggccugggagaacacgcugguggaccucgagagcgacaacaagccgcccaagcugaacuccgccgggagcaacaagucccugcaggccgccggccucaacgcggggcugaccuacagccagcugaugacccugaaggacugcaugcuccagcuggaccccuccagcaagaccuggaucgacaucgagggccgccccgaggacccgguggagaucgcccuguuccagcccuccagcgggugcuacauccacuucuuccgggagcccacggaccucaagcaguucaagcaggacgccaaguacagccacggcaucgacgucaccgaccuguucuccacccagcccggccugaccagcgccgugaucgaggcccucccgcgcaacauggugcugacgugccagggguccgacgacaucaagaagcugcucgagagccagggccggcgcgacaucaagcugaucgacaucucccugagcaaggcggacucccgcaaguucgagaacgccgucugggaccaguacaaggaccucugccacaugcacaccgggguggucguggagaagaagaagcggggcgggaaggaggagaucacgccccacugcgcccugcuggacugcaucauguucgacgccgccaccaccggcagccucaacaucaccacccugcgcgcggugcugccccgggacauggucuuccgcaccuccacgcccaagguggugcucuga

SEQ ID NO: 8051 - RNA, 1710 nt, Artificial Sequence
  derived and/or modified CDS sequence (opt1) from LASV(803213;Clade II)__AAF86704__NP
augagcgccuccaaggaggugaaguccuuccuguggacccagagccuccgccgggagcugagcggcuacugcuccaacaucaagcugcaggucgugaaggacgcccaggcgcuccugcacgggcuggacuucagcgaggugaacaacguccagcgccucaugcggaagcagaagcgcgacgacggcgaccugaagcggcugcgcgaccucaaccaggccgugaacaaccugguggagcugaaguccacccagcagaaguccauccuccgggucgggacgcugaccagcgacgaccugcucacccuggccgccgaccuggagaagcucaagagcaaggugauccgcaccgagcggccccuguccagcggcguguacauggggaaccuguccacgcagcagcucgagcagcgccgggcccugcugaacaugaucggcauggucggcggggcgcagggcacccagccggggcgcgacggcguggugcgggucugggacgugaagaaccccgaccuccugaacaaccaguucgggaccaugcccagccugacccucgccugccugacgaagcagggccagguggaccugaacgacgccguccucgcccugaccgaccugggccucaucuacaccgcgaaguaccccaacuccagcgaccuggaccgccugucccagagccacccgauccucaacaugguggacaccaagaaguccagccugaacaucagcggguacaacuucucccugggcgccgccgugaaggccggggccugcaugcucgacggcggcaacaugcuggagacgaucaaggucacgccccagaccauggacgggauccucaagagcauccugaaggugaagcggucccugggcauguucgugagcgacacccccggggagcgcaaccccuacgagaacauccuguacaagaucugccucuccggcgacggguggccguacaucgcgagccggaccuccaucgucggccgcgccugggagaacaccaccguggaccuggagagcgacggcaagccccagaagguggggaccgccggcuccaacaagagccugcaguccgccggguuccccacgggccucaccuacagccagcugaugacccugaaggacuccaugaugcagcuggaccccagcgccaagaccuggaucgacaucgaggggcggccggaggaccccgucgagaucgcgcucuaccagcccauguccggcugcuacauccacuucuuccgcgagcccacggaccugaagcaguucaagcaggacgccaaguacagccacggcaucgacguggccgaccuguucccggcccagcccgggcucaccuccgccgucaucgaggcgcugccccggaacauggugcugaccugccagggcagcgacgacaucaagaagcuccuggacucccaggggcgccgcgacaucaagcugaucgacaucagccucagcaagguggacucccggaaguucgagaacgccgucugggaccagugcaaggaccugugccacaugcacaccggcgugguggucgagaagaagaagcgcgggggcaaggaggagaucacgccccacugcgcccugauggacugcaucauguucgacgccgccgugagcggcgggcucaacaucccggugcugcgggcgguccugccccgcgacaugguguuccggaccuccagccccaaggugguccucuga

SEQ ID NO: 8052 - RNA, 1713 nt, Artificial Sequence
  derived and/or modified CDS sequence (opt1) from LASV(GA391;Clade III)__CAA36646__NP
augagcgccuccaaggaggugcgcagcuuccuguggacccagucccuccggcgcgagcugagcggcuacugcuccaacaucaagcugcaggucgugaaggacgcccaggcgcuccugcacgggcuggacuucagcgagguguccaacguccagcggcucaugcgcaagcagaagcgggacgacggcgaccugaagcgccugcgggaccucaaccaggccgugaacaaccugguggagcucaagagcacccagcagaaguccguccugcgcguggggacccugagcuccgacgaccugcucauccuggccgccgaccuggagaagcucaagagcaaggugacccggaccgagcgcccccuguccagcggcgucuacauggggaaccuguccagccagcagcucgaccagcggcgcgcccugcugaacaugaucggcaugaccggcguguccgggggcgggaagggcgcgagcgacgggaucgugcgggucugggacgugaagaacgccgagcuccugaacaaccaguucggcacgaugccgucccugacccucgccugccugaccaagcagggccagguggaccugaacgacgccguccaggcgcucaccgaccuggggcugaucuacacggccaaguaccccaacagcagcgaccucgaccgccugucccagagccaccccauccugaacaugaucgacaccaagaaguccagccucaacaucuccggcuacaacuucagccugggggccgccgugaaggccggcgcgugcaugcuggacggcgggaacaugcucgagaccaucaaggugagcccccagaccauggacggcauccucaaguccauccugaaggucaagaagucccuggggauguucgugagcgacacgccgggcgagcggaaccccuacgagaacauccuguacaagaucugccuguccggggacggcuggcccuacaucgccagccgcaccuccaucgugggccgggccugggagaacaccgucguggaccucgagcaggacaacaagccccagaagaucgggaacggcgggagcaacaagucccugcagagcgccggcuucgccgcggggcugaccuacucccagcucaugacgcugaaggacuucaagugcuucaaccugaucccgaacgccaagaccuggauggacaucgagggccgccccgaggaccccguggagaucgcccuguaccagcccagcuccggcugcuacguccacuucuuccgggagccgaccgaccucaagcaguucaagcaggacgccaaguacagccacgggaucgacgugaccgaccuguucgccgcgcagcccggccugacgagcgccgucaucgaggcccucccccgcaacauggugaucacgugccagggguccgaggacauccggaagcugcuggagagccagggccgccgcgacaucaagcucaucgacaucacccuguccaaggccgacagccggaaguucgagaacgccgugugggaccaguucaaggaccugugccacaugcacaccggggucgugguggagaagaagaagcgcggcggcaaggaggagaucacgccccacugcgcgcucauggacugcaucauguucgacgccgccgucuccgggggccuggacgccaaggugcugcgggugguccucccgcgcgacaugguguuccggaccagcacccccaaggugguccuguga

SEQ ID NO: 8053 - RNA, 1710 nt, Artificial Sequence
  derived and/or modified CDS sequence (opt1) from LASV(AV;Clade V)__CCA30315__NP
augagcgccuccaaggaggugaaguccuuccuguggacccagagccuccgccgggagcugagcggcuacugcuccaacaucaagcugcaggucgugaaggacgcccaggcgcuccugcacgggcuggacuucagcgagguguccaacguccagcgccucaugcggaagcagcgccgggacgacagcgaccugaagcgccugcgggaccucaaccaggccgugaacaaccugguggagcugaaguccacccagcagaaguccguccuccgcgugggcacgcugagcagcgacgaccugcucacccuggccgccgaccuggagaagcucaaguccaaggugacccggaccgagcgcccccugagcuccggggucuacaugggcaaccugagcucccagcagcucgaccagcggcgcgcccugcugaaccucaucgggaugacgaacggcagccagggcucccaggcggggcgggacggcguggugcgcgucugggacgugaagaacgccgagcugcugaacaaccaguucgggaccaugccgagccucacccuggccugccugaccaagcagggccagguggaccucaacgacgucgugcaggcccugacggaccuggggcucaucuacaccgcgaaguaccccaacaccagcgaccuggaccggcugacccagucccaccccauccucaacaugaucgacacgaagaaguccagccugaacaucagcggcuacaacuucucccugggcgccgccgugaaggccggggccugcaugcucgacggcgggaacaugcuggagaccaucaaggucagcccccaguccauggacggcauccucaagagcauccugaaggugaagcgcgcgcugggcauguucguguccgacaccccgggggagcggaaccccuacgagaacauccuguacaagaucugccucagcggcgacggguggcccuacaucgccucccgcaccagcaucgucggccgggccugggagaacacggugguggaccuggagaccgacgggaagccccagaagaucggcuccggcaacagcaacaagucccugcagagcgccggguucuccgccggccucaccuacagccagcugaugacccugaaggacgcgaugcugcagcucgacccgaacgccaagacguggauggacaucgaggggcgccccgaggaccccgucgagguggcccuguaccagcccaucuccggcugcuacauccacuucuuccgggagccgaccgaccugaagcaguucaagcaggacgccaaguacagccacgggaucgacaucgccgaccucuucgcggcccagcccggccugaccagcgccgucaucgaggcccugccccgcaacauggugaucacgugccagggcuccgaggacaucaagaagcuccuggagagccaggggcgcaaggacaucaagcugaucgacaucgcccucuccaagaucgacagccggaaguucgagaacgcggugugggaccaguacaaggaccugugccacaugcacaccggcgucgugguggagaagaagaagcgcgggggcaaggaggagaucaccccgcacugcgcccugauggacugcaucauguucgacgccgccgucuccgggggccucaacacccuggugcugcgggcggugcucccccgcgacauggucuuccggaccagcacgccccgcguggugcuguga

SEQ ID NO: 8054 - RNA, 1710 nt, Artificial Sequence
  derived and/or modified CDS sequence (opt1) from LASV(Togo/2016/7082;Clade VI)__AMR44578__NP
augagcaacuccaaggaggugaaguccuuccuguggacccagagccuccgccgggagcugagcggcuacugcuccaacaucaagcugcaggucgugaaggacgcccaggcccuccugcacgggcuggacuucagcgagguguccaacguccagcgccucaugcggaagcagaagcgcgacgacggcgaccugaagcggcugcgcgaccucaaccaggcggugaacaaccugguggagcucaagagcguccagcagaaguccauccugcggguggggacccugaccagcgacgaccugcucacccuggccgccgaccuggagaagcucaaguccaaggugacccgcaccgagcggccccugagcuccggcgucuacauggggaaccugagcucccagcagcucgaccagcgccgggcccugcugagcaugaucggcauguccggcgggaaccagaacagccagccgaagggcgacgggguggugcgcgucugggacgugaagaacgccgaccuccugaacaaccaguucggcacgaugcccucccugacccucgcgugccugaccaagcagggccagguggaccugaacgacgccguccaggcccucaccgaccuggggcugaucuacacggccaaguaccccaacagcagcgaccucgaccggcugucccagagccaccccauccugaacaugaucgacaccaagaaguccagccucaacaucuccggcuacaacuucagccugggggcggccaucaagaccggcgccugcaugcuggacgggggcaacaugcucgagaccaucaaggugacgccgcagaccauggacggcauccugaaguccauccugaaggugaagcgcagccucgggauguucaucuccgacacccccggcgagcggaaccccuacgagaacauccuguacaagaucugccugagcggggacggcuggcccuacaucgccucccgcaccgccaucaucgggcgggcgugggagaacacggucguggaccucgagagcgacuccaagccgcagaagaucggcagcaacggcuccaacaagagccugcaguccgccggguucgcccccggccugaccuacagccagcucaugacccugaaggacuccaugcugcagcuggaccccaacgccaagaccuggaucgacaucgaggggcgccccgaggacccgguggaggucgcccucuuccagcccaucagcggcugcuacauccacuucuuccgggagcccacggaccugaagcaguucaagcaggacgcgaaguacagccacgggaucgacgugaccgaccuguucgccgcccagcccggccucaccuccgccgugaucgaggcccugccgcgcaacaugguccugaccugccagggcagcgacgacaucaagaagcuccuggacucccaggggcggcgcgacaucaagcugaucgacgugagccucaacaagaucgacucccgcaaguucgagaacgcggucugggaccaguacaaggaccugugccacaugcacacgggcgugguggucgagaagaagaagaagggcgggaaggaggagaucacgccccacugcgcccugcucgacugcaucauguucgacgccgccgugagcgggggccugaacgccaccgugcugcgggcgguccucccccgcgacaugguguuccggaccuccagccccaaggugguccuguga

SEQ ID NO: 8055 - RNA, 1710 nt, Artificial Sequence
  derived and/or modified CDS sequence (opt1) from LASV(KAK-428;Clade n.d. (VII))__ANH09741__NP
augagcaacuccaaggaggugaaguccuuccuguggacccagagccuccgccgggagcugagcggcuacugcaccaacaucaagcugcaggucgugaaggacgcccaggcccuccugcacgggcuggacuucuccgaggugagcaacguccagcgccucaugcggaagcagaagcgcgacgacaacgaccugaagcggcugcgcgaccucaaccaggcggugaacaaccugguggagcugaaguccguccagcagaaguccgugcucaaggugggcacgcugaacagcgacgaccugcucacccuggccgccgaccuggagaagcucaagagcaaggucgugcggaccgagcgcccccuguccagcgggguguacaugggcaaccuguccagccagcagcucgaccagcggcgcgcccugcugaacaugaucgggauggccggcggcucccaggggaaccagccgagccgggacggcgucgugcgcgugugggacgucaagaacgcggaccuccugaacaaccaguucgggaccaugcccucccugacgcucgccugccugaccaagcagggccagguggaccugaacgacgugguccucgcccugaccgaccuggggcucaucuacaccgccaaguaccccaacagcuccgaccuggaccggcugagccagaaccaccccgugcucaacaugaucgacgugaacaagagcucccugaacaucagcggcuacaacuucucccugggcgcggccgucaaggccggggccugcaugcucgacggcgggaacaugcuggagacgaucaagaucagcccgcagaccguggacggcauccugaaguccauccucaaggugaagcgcgcccugggcauguucgucagcgacacccccggggagcggaaccccuacgagaacauccuguacaaggugugccucuccggcaacggguggcccuacaucgcgagccgcaccuccaucgucggccgggccugggagaacacggugguggaccuggagagcaacaagaaccagccgaaggucgggaacaacggcuccaacaagaugcugcagagcuccggcuucgccaccgggcucaccuacagccagcugaugacccugcgcgacuccaugcugcagcucgaccccacggccaagaccuggaucgacaucgagggccggcccgaggaccccguggagcuggcccuguuccagccgagcuccgggugcuacauccacuucuuccgcgagcccaccgaccucaagcaguucaagcaggacgcgaaguacagccacggcaucgacgugaacgaccuguucuccgcccagcccgggcugaccagcgccguccucgaggcccugccccggaacauggugcugacgugccagggcagcgacgacauccgcaagcuccuggacucccaggaccgcaaggacaucaagcugaucgacaucagccucuccaaggccgacgcgcggaaguucgagaacgacgugugggaccaguucaaggaccugugccacaugcacaccggcaucgucguggagaagaagaagaagggcgggaagcaggagaugaccccgcacugcgcccugcucgacugcaucauguucgacgccgccgugagcgggggccugaacguccccacccugcgcgccgugcuccccacggacaugguguuccggaccaucaccaccaaggucgugcuguga

SEQ ID NO: 8056 - RNA, 1710 nt, Artificial Sequence; identical to SEQ ID NO: 8050
  derived and/or modified CDS sequence (opt1) from LASV(Pinneo-NIG-1969;Clade I)__AIT17837__NP

SEQ ID NO: 8057 - RNA, 1710 nt, Artificial Sequence
  derived and/or modified CDS sequence (opt1) from LASV(ISTH0009-NIG-2011;Clade II)__AIT17405__NP
augagcguguccaaggaggucaagagcuuccuguggacccagucccuccgccgggagcugagcggcuacugcuccaacaucaagcuccagguggugaaggacgcccaggcccugcugcacgggcuggacuucagcgaggucuccaacgugcagcgccucaugcggaagcagaagcgcgacgacagcgaccugaagcggcugcgcgaccucaaccaggcggugaacaaccuggucgagcugaaguccacccagcagaaguccauccuccgggugggcacccugaccagcgacgaccugcucacccuggccgccgaccuggagaagcucaagagcaaggugauccgcaccgagcggccccuguccagcggggucuacaugggcaaccuguccacgcagcagcucgagcagcgccgggcccugcugaacaugaucgggauggugggcggcgcccaggggacccagccgggccgcgacggggugguccgggugugggacgugaagaaccccgaccuccugaacaaccaguucggcaccaugcccagccugacccucgcgugccugacgaagcaggggcaggucgaccugaacgacgccgugcucgcccugaccgaccugggccucaucuacaccgccaaguaccccaacuccagcgaccuggaccgccugucccagagccacccgauccucaacaugguggacaucaagaaguccagccugaacaucagcggcuacaacuucucccugggggcggccgucaaggccggcgccugcaugcucgacgggggcaacaugcuggagaccaucaaggugacgccccagaccauggacggcauccucaagagcauccugaaggugaagcggucccuggggauguucgucagcgacacccccggcgagcgcaaccccuacgagaacauccuguacaagaucugccucuccggggacggcuggccguacaucgccagccggaccuccaucguggggcgcgcgugggagaacacgaccguggaccuggagagcgacggcaagccccagaaggucggcuccgccgggagcaacaagucccugcagagcgccggcuuccccaccgggcucaccuacucccagcugaugacgcugaaggacagcaugaugcagcuggaccccuccgccaagaccuggaucgacaucgagggccggccggaggaccccguggagaucgcccucuaccagcccaugagcgggugcuacauccacuucuuccgcgagcccaccgaccugaagcaguucaagcaggacgcgaaguacucccacggcaucgacgucgccgaccuguucccggcccagcccggccucaccagcgccgugaucgaggcccugccccggaacauggugcugacgugccaggggagcgacgacaucaagcgccuccuggacucccagggccgccgggacaucaagcugaucgacaucgcgcucagcaaggccgacucccgccgguucgagaacgccgucugggaccagugcaaggaccugugccacaugcacaccggggugguggucgagaagaagaagcgcggcgggaaggaggagaucacgccccacugcgcccugauggacugcaucauguacgacgccgcggugagcggcggccucaacaucccggugcugcgggccguccugccccgcgacaugguguuccggaccuccagccccaaggugguccucuga

SEQ ID NO: 8058 - RNA, 1710 nt, Artificial Sequence
  derived and/or modified CDS sequence (opt1) from LASV(ISTH0012-NIG-2011;Clade II)__AIT17409__NP
augagcgccuccaaggaggugaaguccuuccuguggacccagagccuccgccgggagcugagcggcuacugcuccaacaucaagcugcaggucgugaaggacgcccaggcgcuccugcacgggcuggacuucagcgagguguccaacguccagcgccucaugcggaagcagaagcgcgacgacggcgaccugaagcggcugcgcgaccucaaccaggccgugaacaaccugguggagcucaagagcacccagcagaaguccauccugcgggucgggacccugaccagcgacgaccugcucacccuggccgccgaccuggagaagcucaaguccaaggugauccgcaccgagcggccccugagcuccggcguguacauggggaaccugagcacgcagcagcucgagcagcgccgggcccugcugaacaugaucggcauggucggcggggcgcagggcacccagccggggcgcgacggcguggugcgggucugggacgugaagaaccccgaccuccugaacaaccaguucgggaccaugcccucccugacccucgccugccugacgaagcagggccagguggaccugaacgacgccguccucgcccugaccgaccugggccucaucuacaccgcgaaguaccccaacagcuccgaccuggaccgccugagccagucccacccgauccucaacaugguggacaccaagaaguccagccugaacaucagcggguacaacuucagccugggcgccgccgugaaggccggggccugcaugcucgacggcggcaacaugcuggagacgaucaaggucacgccccagaccauggacgggauccugaaguccauccucaaggugaagaagucccugggcauguucgugagcgacacccccggggagcggaaccccuacgagaacauccuguacaagaucugccucagcggcgacggguggccguacaucgcgucccgcaccagcaucgucggccgggccugggagaacaccaccguggaccuggaguccgacggcaagccccagaagguggggaccgccggcagcaacaagucccugcagagcgccggguuccccacgggccucaccuacucccagcugaugacccugaaggacagcaugaugcagcuggaccccuccgccaagaccuggaucgacaucgaggggcgcccggaggaccccgucgagaucgcgcucuaccagcccaugagcggcugcuacauccacuucuuccgggagcccacggaccugaagcaguucaagcaggacgccaaguacucccacggcaucgacgugaccgaccuguucagcgcccagccggggcucaccuccgccgucaucgaggcccugccccgcaacauggugcugaccugccagggcagcgacgacaucaagcggcuccuggacagccaggggcgccgcgacaucaagcugaucgacaucgcgcucaacaaggccgacucccggcgcuucgagaacgccgugugggaccagugcaaggaccugugccacaugcacacgggcgucgugguggagaagaagaagcgcgggggcaaggaggagaucacgccccacugcgcccugauggacugcaucauguacgacgccgcggucagcggcgggcucaacauccccgugcugcgggccgugcugccgcgggacauggucuuccgcaccuccagccccaagguggugcucuga

SEQ ID NO: 8059 - RNA, 1710 nt, Artificial Sequence
  derived and/or modified CDS sequence (opt1) from LASV(ISTH0047-NIG-2011;Clade II)__AIT17413__NP
augagcgccuccaaggaggugaaguccuuccuguggacccagagccuccgccgggagcugagcggcuacugcuccagcaucaagcugcaggucgugaaggacgcccaggcgcuccugcacgggcuggacuucuccgaggugagcaacguccagcgccucaugcggaagcagaagcgcgacgacuccgaccugaagcggcugcgcgaccucaaccaggccgugaacaaccugguggagcucaagagcacccagcagaaguccauccugcgggucggcacgcugaccagcgacgaccugcucacccuggccgccgaccuggagaagcucaaguccaaggugauccgcaccgagcggccccugagcuccgggguguacaugggcaaccugagcacgcagcagcucgagcagcgccgggcccugcugaacaugaucgggauggucggcggcgcgcaggggacccagccgggccgcgacgggguggugcgggucugggacgugaagaaccccgaccuccugaacaaccaguucggcaccaugcccucccugacccucgccugccugacgaagcagggccagguggaccugaacgacgccguccucgcccugaccgaccuggggcucaucuacaccgcgaaguaccccaacagcuccgaccuggaccgccugagccagagccacccgauccucaacaugguggacaccaagaaguccagccugaacaucuccggcuacaacuucagccugggggccgccgugaaggccggcgccugcaugcucgacgggggcaacaugcuggagacgaucaaggucacgccccagaccauggacggcauccugaaguccauccucaaggugaagcggagccuggggauguucguguccgacgcgcccggcgagcgcaaccccuacgagaacauccuguacaagaucugccucagcggggacggcuggccguacaucgccucccggaccagcaucgucgggcgcgccugggagaacaccaccguggaccuggaguccgacggcaagccccagaagaugggcaccgccgggagcaacaagucccugcagagcgccggcuuccccaccgggcucacguacucccagcugaugacccugaaggacagcaugaugcagcuggaccccuccgcgaagaccuggaucgacaucgagggccggccggaggaccccguggagaucgcccucuaccagcccaugagcgggugcuacauccacuucuuccgcgagcccaccgaccugaagcaguucaagcaggacgccaaguacucccacggcaucgacgucgccgaccuguucccggcccagcccggccucacgagcgcggugaucgaggcccugccccggaacaugguccugaccugccaggggagcgacgacaucaagaagcuccuggacucccagggccgccgcgacaucaagcugaucgacaucgcccucagcaaggccgacucccggcgcuucgagaacgccgugugggaccagugcaaggaccugugccacaugcacaccgggguggucguggagaagaagaagcggggcgggaaggaggagaucacgccccacugcgcgcugauggacugcaucauguacgacgccgccgugagcggcggccucaacaucccgguccugcgcgccgugcugccccgggacaugguguuccgcaccuccagccccaaggucgugcucuga

SEQ ID NO: 8060 - RNA, 1710 nt, Artificial Sequence
  derived and/or modified CDS sequence (opt1) from LASV(ISTH0230-NIG-2011;Clade II)__AIT17421__NP
augagcgccuccaaggaggugaaguccuuccuguggacccagagccuccgccgggagcugagcggcuacugcuccaacaucaagcugcaggucgugaaggacgcccaggcgcuccugcacgggcuggacuucagcgagguguccaacguccagcgccucaugcggaagcagaagcgcgacgacagcgaccugaagcggcugcgcgaccucaaccaggccgugaacaaccugguggagcugaaguccacccagcagaaguccauccuccgggucggcacccugaccagcgacgaccugcucacccuggccgccgaccuggagaagcucaagagcaaggugauccgcaccgagcggccccuguccagcgggguguacaugggcaaccuguccacgcagcagcucgagcagcgccgggcccugcugaacaugaucgggauggucagcggcgcgcagggcacccagccggggcgcgacggcguggugcgggucugggacgugaagaaccccgaccuccugaacaaccaguucgggaccaugcccucccugacccucgccugccugacgaagcagggccagguggaccugaacgacgccguccucgcccugaccgaccuggggcucaucuacaccgcgaaguaccccaacagcuccgaccuggaccgccugagccagagccacccgauccucaacaugguggacaucaagaaguccagccugaacaucuccggcuacaacuucagccugggcgccgccgugaaggccggggccugcaugcucgacggcgggaacaugcuggagaccaucaaggucacgccccagaccauggacggcauccugaaguccauccucaaggugaagcggagccugggcauguucguguccgacacccccggggagcgcaaccccuacgagaacauccuguacaagaucugccucagcggcgacggguggccguacaucgcgucccggaccagcaucgucggccgcgccugggagaacacgaccguggaccuggaguccgacgggaagccccagaagaugggcagcgccggcuccaacaagagccugcaguccgccggguuccccaccggccucaccuacagccagcugaugacgcugaaggacuccaugaugcagcuggaccccagcgccaagaccuggaucgacaucgaggggcggccggaggaccccguggagaucgcgcucuaccagcccauguccggcugcuacauccacuucuuccgcgagcccaccgaccugaagcaguucaagcaggacgccaaguacagccacgggaucgacgucgccgaccuguucccggcccagcccggccucaccagcgccgugaucgaggcgcugccccggaacaugguccugacgugccagggcuccgacgacaucaagcgccuccuggacagccaggggcgccgggacaucaagcugaucgacaucgcccucuccaaggccgacagccgccgguucgagaacgccgugugggaccagugcaaggaccugugccacaugcacaccggcguggucguggagaagaagaagcgcgggggcaaggaggagaucacgccccacugcgcccugauggacugcaucauguacgacgcggccguguccgggggccucaacaucccgguccugcgggccgugcugccccgcgacaugguguuccggaccagcucccccaaggucgugcucuga

SEQ ID NO: 8061 - RNA, 1710 nt, Artificial Sequence
  derived and/or modified CDS sequence (opt1) from LASV(ISTH0531-NIG-2011;Clade II)__AIT17425__NP
augagcgccuccaaggaggugaaguccuuccuguggacccagagccuccgccgggagcugagcggcuacugcuccagcaucaagcugcaggucgugaaggacgcccaggcgcuccugcacgggcuggacuucuccgaggugagcaacguccagcgccucaugcggaagcagaagcgcgacgacuccgaccugaagcggcugcgcgaccucaaccaggccgugaacaaccugguggagcucaagagcacccagcagaaguccauccugcgggucggcacgcugaccagcgacgaccugcucacccuggccgccgaccuggagaagcucaaguccaaggugauccgcaccgagcggccccugagcuccgggguguacaugggcaaccugagcacgcagcagcucgagcagcgccgggcccugcugaacaugaucgggauggucggcggcgcgcaggggacccagccgggccgcgacgggguggugcgggucugggacgugaagaaccccgaccuccugaacaaccaguucggcaccaugcccucccugacccucgccugccugacgaagcagggccagguggaccugaacgacgccguccucgcccugaccgaccuggggcucaucuacaccgcgaaguaccccaacagcuccgaccuggaccgccugagccagagccacccgauccucaacaugguggacaccaagaaguccagccugaacaucuccggcuacaacuucagccugggggccgccgugaaggccggcgccugcaugcucgacgggggcaacaugcuggagacgaucaaggucacgccccagaccauggacggcauccugaaguccauccucaaggugaagaagucccuggggauguucgugagcgacacccccggcgagcggaaccccuacgagaacauccuguacaagaucugccucagcggggacggcuggccguacaucgcgucccgcaccagcaucgucgggcgggccugggagaacaccaucguggaccuggaguccgacggcaagccccagaaggugggcaccgccgggagcaacaagucccugcagagcgccggcuuccccaccgggcucacguacucccagcugaugacccugaaggacagcaugaugcagcuggaccccuccgccaagaccuggaucgacaucgagggccgcccggaggaccccgucgagaucgcgcucuaccagcccaugagcgggugcuacauccacuucuuccgggagcccaccgaccugaagcaguucaagcaggacgccaaguacucccacggcaucgacguggccgaccuguucccggcccagcccggccucacgagcgccgucaucgaggcgcugccccgcaacauggugcugaccugccaggggagcgacgacaucaagcggcuccuggacucccagggccgccgcgacaucaagcugaucgacaucgcccucagcaaggccgacucccggcgcuucgagaacgccgugugggaccagugcaaggaccugugccacaugcacaccggggucgugguggagaagaagaagcggggcgggaaggaggagaucacgccccacugcgcccugauggacugcaucauguacgacgcggccgucagcggcggccucaacaucccggugcugcgcgccgugcugccccgggacauggucuuccgcaccuccagccccaagguggugcucuga

SEQ ID NO: 8062 - RNA, 1710 nt, Artificial Sequence
  derived and/or modified CDS sequence (opt1) from LASV(ISTH0595-NIG-2011;Clade II)__AIT17429__NP
augagcgccuccaaggaggugaaguccuuccuguggacccagagccuccgccgggagcugagcggcuacugcuccaacaucaagcugcaggucgugaaggacgcccaggcgcuccugcacgggcuggacuucagcgagguguccaacguccagcgccucaugcggaagcagaagcgcgacgacagcgaccugaagcggcugcgcgaccucaaccaggccgugaacaaccugguggagcugaaguccacccagcagaaguccauccuccgggucggcacccugaccagcgacgaccugcucacccuggccgccgaccuggagaagcucaagagcaaggugauccgcaccgagcggccccuguccagcgggguguacaugggcaaccuguccgcccagcagcucgagcagcgccgggcgcugcugaacaugaucgggauggucggcggcgcccaggggacgcagccgggccgcgacgggguggugcgggucugggacgugaagaaccccgaccuccugaacaaccaguucggcaccaugcccagccugacccucgccugccugaccaagcagggccagguggaccugaacgacgccguccucgcgcugacggaccuggggcucaucuacaccgccaaguaccccaacuccagcgaccuggaccgccugucccagagccacccgauccucaacaugguggacaccaagaaguccagccugaacaucagcggcuacaacuucucccugggggccgccgugaaggccggcgcgugcaugcucgacgggggcaacaugcuggagaccaucaaggucacgccccagaccauggacggcauccucaagagcauccugaaggugaagcggucccuggggauguucgugagcgacgcccccggcgagcgcaaccccuacgagaacauccuguacaagaucugccucuccggggacggcuggccguacaucgccagccggaccuccaucgucgggcgcgccugggagaacaccacgguggaccuggagagcgacggcaagccccagaaggugggcaccgccggguccaacaagagccugcaguccgcgggcuuccccaccgggcucaccuacagccagcugaugacgcugaaggacuccaugaugcagcuggaccccagcgccaagaccuggaucgacaucgagggccggccggaggaccccgucgagaucgcccucuaccagcccauguccgggugcuacauccacuucuuccgcgagcccaccgaccugaagcaguucaagcaggacgccaaguacagccacggcaucgacguggccgaccuguucccggcgcagcccggccucaccuccgccgucaucgaggcccugccccggaacauggugcugacgugccaggggagcgacgacaucaagcgccuccuggacagccagggccgccgggacaucaagcugaucgacaucgcccucuccaaggccgacagccgccgguucgagaacgcggugugggaccagugcaaggaccugugccacaugcacaccggggucgugguggagaagaagaagcgcggcgggaaggaggagaucacgccccacugcgcccugauggacugcaucauguacgacgccgccgucuccggcggccucaacaucccggugcugcgggcggugcugccccgcgacauggucuuccggaccagcucccccaagguggugcucuga

SEQ ID NO: 8063 - RNA, 1710 nt, Artificial Sequence
  derived and/or modified CDS sequence (opt1) from LASV(ISTH0964-NIG-2011;Clade II)__AIT17431__NP
augagcgccuccaaggaggugaaguccuuccuguggacccagagccuccgccgggagcugagcggcuacugcuccaacaucaagcugcaggucgugaaggacgcccaggcgcuccugcacgggcuggacuucagcgagguguccaacguccagcgccucaugcggaagcagaagcgcgacgacagcgaccugaagcggcugcgcgaccucaaccaggccgugaacaaccugguggagcugaaguccacccagcagaaguccauccuccgggucggcacgcugaccagcgacgaccugcucacccuggccgccgaccuggagaagcucaagagcaaggugauccgcaccgagcggccccuguccagcgggguguacaugggcaaccuguccacgcagcagcucgagcagcgccgggcccugcugaacaugaucgggauggucggcggcgcgcaggggacccagccgggccgcgacgggguggugcgggucugggacgugaagaaccccgaccuccugaacaaccaguucggcaccaugcccagccugacccucgccugccugacgaagcagggccagguggaccugaacgacgccguccucgcccugaccgaccuggggcucaucuacaccgcgaaguaccccaacuccagcgaccuggaccgccugucccagagccacccgauccucaacaugguggacaccaagaaguccagccugaacaucagcggcuucaacuucucccugggggccgccgugaaggccggcgccugcaugcucgacgggggcaacaugcuggagacgaucaaggucacgccccagaccauggacggcauccucaagagcauccugaaggugaagaagucccuggggauguucgugagcgacacccccggcgagcggaaccccuacgagaacauccuguacaagaucugccucuccggggacggcuggccguacaucgcgagccgcaccuccaucgucgggcgggccugggagaacaccaccguggaccuggagagcgacggcaagccccagaaggugggcaccgccggguccaacaagagccugcaguccgccggcuuccccacggggcucaccuacagccagcugaugacccugaaggacuccaugaugcagcuggaccccagcgccaagaccuggaucgacaucgagggccgcccggaggaccccgucgagaucgcgcucuaccagcccauguccgggugcuacauccacuucuuccgggagcccacggaccugaagcaguucaagcaggacgccaaguacagccacggcaucgacguggccgaccuguucccggcccagcccggccucaccuccgccgucaucgaggcgcugccccgcaacauggugcugaccugccaggggagcgacgacaucaagcggcuccuggacagccagggccgccgcgacaucaagcugaucgacaucgcccucuccaaggccgacagccggcgcuucgagaacgccgugugggaccagugcaaggaccugugccacaugcacaccggggucgugguggagaagaagaagcggggcgggaaggaggagaucacgccccacugcgcccugauggacugcaucauguacgacgcggccgucuccggcggccucaacaucccggugcugcgcgccgugcugccccgggacauggucuuccgcaccgccagccccaagguggugcucuga

SEQ ID NO: 8064 - RNA, 1710 nt, Artificial Sequence
  derived and/or modified CDS sequence (opt1) from LASV(ISTH1038-NIG-2011;Clade II)__AIT17439__NP
augagcgccuccaaggaggugaaguccuuccuguggacccagagccuccgccgggagcugagcggcuacugcuccagcaucaagcugcaggucgugaaggacgcccaggcgcuccugcacgggcuggacuucuccgaggugagcaacguccagcgccucaugcggaagcagaagcgcgacgacuccgaccugaagcggcugcgcgaccucaaccaggccgugaacaaccugguggagcucaagagcacccagcagaaguccauccugcgggucggcacgcugaccagcgacgaccugcucacccuggccgccgaccuggagaagcucaaguccaaggugauccgcaccgagcggccccugagcuccgggguguacaugggcaaccugagcacgcagcagcucgagcagcgccgggcccugcugaacaugaucgggauggucggcggcgcgcaggggacccagccgggccgcgacgggguggugcgggucugggacgugaagaaccccgaccuccugaacaaccaguucggcaccaugcccucccugacccucgccugccugacgaagcagggccagguggaccugaacgacgccguccucgcccugaccgaccuggggcucaucuacaccgcgaaguaccccaacagcuccgaccuggaccgccugagccagagccacccgauccucaacaugguggacaccaagaaguccagccugaacaucuccggcuucaacuucagccugggggccgccgugaaggccggcgccugcaugcucgacgggggcaacaugcuggagacgaucaaggucacgccccagaccauggacggcauccugaaguccauccucaaggugaagcggagccuggggauguucguguccgacacccccggcgagcgcaaccccuacgagaacauccuguacaagaucugccucagcggggacggcuggccguacaucgcgucccggaccagcaucgucgggcgcgccugggagaacaccaccguggaccuggaguccgacggcaagccccagaagaugggcaccgccgggagcaacaagucccugcagagcgccggcuuccccacggggcucaccuacucccagcugaugacccugaaggacagcaugaugcagcuggaccccuccgccaagaccuggaucgacaucgagggccggccggaggaccccguggagaucgcgcucuaccagcccgucagcgggugcuacauccacuucuuccgcgagcccacggaccugaagcaguucaagcaggacgccaaguacucccacggcaucgacguggccgaccuguucagcgcccagccgggccucaccagcgccgucaucgaggcgcugccccggaacauggugcugaccugccagggguccgacgacaucaagcgccuccuggacagccagggccgccgggacaucaagcugaucgacaucgcccucuccaaggccgacagccgccgguucgagaacgccgugugggaccagugcaaggaccugugccacaugcacaccggggucgugguggagaagaagaagcgcggcgggaaggaggagaucacgccccacugcgcccugauggacugcaucauguacgacgcggccgucuccggcggccucaacauccccguguuccgggccgugcugccgcgcgacauggucuuccggaccagcucccccaagguggugcuguga

SEQ ID NO: 8065 - RNA, 1710 nt, Artificial Sequence
  derived and/or modified CDS sequence (opt1) from LASV(ISTH1048-NIG-2011;Clade II)__AIT17443__NP
augagcgccuccaaggaggugaaguccuuccuguggacccagagccuccgccgggagcugagcggcuacugcuccagcaucaagcugcaggucgugaaggacgcccaggcgcuccugcacgggcuggacuucuccgaggugagcaacguccagcgccucaugcggaagcagaagcgcgacgacuccgaccugaagcggcugcgcgaccucaaccaggccgugaacaaccugguggagcucaagagcacccagcagaaguccauccugcgggucggcacgcugaccagcgacgaccugcucacccuggccgccgaccuggagaagcucaaguccaaggugauccgcaccgagcggccccugagcuccgggguguacaugggcaaccugagcacgcagcagcucgagcagcgccgggcccugcugaacaugaucgggauggucggcggcgcgcaggggacccagccgggccgcgacgggguggugcgggucugggacgugaagaaccccgaccuccugaacaaccaguucggcaccaugcccucccugacccucgccugccugacgaagcagggccagguggaccugaacgacgccguccucgcccugaccgaccuggggcucaucuacaccgcgaaguaccccaacagcuccgaccuggaccgccugagccagagccacccgauccucaacaugguggacaccaagaaguccagccugaacaucuccggcuacaacuucagccugggggccgccgugaaggccggcgccugcaugcucgacgggggcaacaugcuggagacgaucaaggucacgccccagaccauggacggcauccugaaguccauccucaaggugaagcggagccuggggauguucguguccgacgcgcccggcgagcgcaaccccuacgagaacauccuguacaagaucugccucagcggggacggcuggccguacaucgccucccggaccagcaucgucgggcgcgccugggagaacaccaccguggaccuggaguccgacggcaagccccagaaggugggcaccgccgggagcaacaagucccugcagagcgccggcuuccccaccgggcucacguacucccagcugaugacccugaaggacagcaugaugcagcuggaccccuccgcgaagaccuggaucgacaucgagggccggccggaggaccccgucgagaucgcccucuaccagcccaugagcgggugcuacauccacuucuuccgcgagcccaccgaccugaagcaguucaagcaggacgccaaguacucccacggcaucgacguggccgaccuguucccggcccagcccggccucacgagcgcggucaucgaggcccugccccggaacauggugcugaccugccaggggagcgacgacaucaagaagcuccuggacucccagggccgccgcgacaucaagcugaucgacaucgcccucagcaaggccgacucccggcgcuucgagaacgccgugugggaccagugcaaggaccugugccacaugcacaccggggucgugguggagaagaagaagcggggcgggaaggaggagaucacgccccacugcgcgcugauggacugcaucauguacgacgccgccgucagcggcggccucaacaucccggugcugcgcgccgugcugccccgggacauggucuuccgcaccuccagccccaagguggugcucuga

SEQ ID NO: 8066 - RNA, 1710 nt, Artificial Sequence
  derived and/or modified CDS sequence (opt1) from LASV(ISTH1058-NIG-2011;Clade II)__AIT17447__NP
augagcgccuccaaggaggugaaguccuuccuguggacccagagccuccgccgggagcugagcggcuacugcuccaacaucaagcugcaggucgugaaggacgcccaggcgcuccugcacgggcuggacuucagcgagguguccaacguccagcgccucaugcggaagcagaagcgcgacgacagcgaccugaagcggcugcgcgaccucaaccaggccgugaacaaccugguggagcugaaguccacccagcagaaguccauccuccgggucggcacccugaccagcgacgaccugcucacccuggccgccgaccuggagaagcucaagagcaaggugauccgcaccgagcggccccuguccagcgggguguacaugggcaaccuguccacgcagcagcucgagcagcgccgggcccugcugaacaugaucgggauggucggcggcgcgcaggggacccagccgggccgcgacgggguggugcgggucugggacgugaagaaccccgaccuccugaacaaccaguucggcaccaugcccagccugacccucgccugccugacgaagcagggccagguggaccugaacgacgccguccucgcccugaccgaccuggggcucaucuacaccgcgaaguaccccaacuccagcgaccuggaccgccugucccagagccacccgauccucaacaugguggacaccaagaaguccagccugaacaucagcggcuacaacuucucccugggggccgccgugaaggccggcgccugcaugcucgacgggggcaacaugcuggagacgaucaaggucacgccccagaccauggacggcauccucaagagcauccugaaggugaagaagucccuggggauguucgugagcgacacccccggcgagcggaaccccuacgagaacauccuguacaagaucugccucuccggggacggcuggccguacaucgcgagccgcaccuccaucgucgggcgggccugggagaacaccaccguggaccuggagagcgacggcaagccccagaaggugggcaccacgggguccaacaagagccugcaguccgccggcuuccccaccgggcucaccuacagccagcugaugacccugaaggacuccaugaugcagcuggaccccagcgccaagacguggaucgacaucgagggccgcccggaggaccccgucgagaucgcccucuaccagcccauguccgggugcuacauccacuucuuccgggagcccaccgaccugaagcaguucaagcaggacgcgaaguacagccacggcaucgacgugaccgaccuguucccggcccagcccggccucaccuccgccgucaucgaggcccugccccgcaacauggugcugacgugccaggggagcgacgacaucaagcggcuccuggacagccagggccgccgcgacaucaagcugaucgacaucgcccucuccaaggcggacagccggcgcuucgagaacgccgugugggaccagugcaaggaccugugccacaugcacaccggggucgugguggagaagaagaagcggggcgggaaggaggagaucacgccccacugcgcccugauggacugcaucauguacgacgccgccgucuccggcggccucaacaucccggugcugcgcgcggugcugccccgggacauggucuuccgcaccagcucccccaagguggugcucuga

SEQ ID NO: 8067 - RNA, 1710 nt, Artificial Sequence
  derived and/or modified CDS sequence (opt1) from LASV(ISTH1064-NIG-2011;Clade II)__AIT17451__NP
augagcgccuccaaggaggugaaguccuuccuguggacccagagccuccgccgggagcugagcggcuacugcuccaacaucaagcugcaggucgugaaggacgcccaggcgcuccugcacgggcuggacuucagcgagguguccaacguccagcgccucaugcggaagcagaagcgcgacgacagcgaccugaagcggcugcgcgaccucaaccaggccgugaacaaccugguggagcugaaguccacccagcagaaguccauccuccgggucggcacccugaccagcgacgaccugcucacccuggccgccgaccuggagaagcucaagagcaaggugauccgcaccgagcggccccuguccagcgggguguacaugggcaaccuguccacgcagcagcucgagcagcgccgggcccugcugaacaugaucgggauggucggcggcgcgcaggggacccagccgggccgcgacgggguggugcgggucugggacgugaagaaccccgaccuccugaacaaccaguucggcaccaugcccagccugacccucgccugccugacgaagcagggccagguggaccugaacgacgccguccucgcccugaccgaccuggggcucaucuacaccgcgaaguuccccaacuccagcgaccuggaccgccugucccagagccacccgauccucaacaugguggacaccaagaaguccagccugaacaucagcggcuacaacuucucccugggggccgccgugaaggccggcgccugcaugcucgacgggggcaacaugcuggagacgaucaaggucacgccccagaccauggacggcauccucaagagcauccugaaggugaagaagucccuggggauguucgugagcgacacccccggcgagcggaaccccuacgagaacauccuguacaagaucugccucuccggggacggcuggccguacaucgcgagccgcaccuccaucgucgggcgggccugggagaacaccaccguggaccuggagagcgacggcaagccccagaaggugggcaccacgggguccaacaagagccugcaguccgccggcuuccccaccgggcucaccuacagccagcugaugacccugaaggacuccaugaugcagcuggaccccagcgccaagacguggaucgacaucgagggccgcccggaggaccccgucgagaucgcccucuaccagcccauguccgggugcuacauccacuucuuccgggagcccaccgaccugaagcaguucaagcaggacgcgaaguacagccacggcaucgacguggccgaccuguucccggcccagcccggccucaccuccgccgucaucgaggcccugccccgcaacauggugcugaccugccaggggagcgacgacaucaagcggcuccuggacagccagggccgccgcgacaucaagcugaucgacaucgcgcucuccaaggccgacagccggcgcuucgagaacgccgugugggaccagugcaaggaccugugccacaugcacacgggggucgugguggagaagaagaagcggggcgggaaggaggagaucacgccccacugcgcccugauggacugcaucauguacgacgccgcggucuccggcggccucaacaucccggugcugcgcgccgugcugccccgggacauggucuuccgcaccagcucccccaagguggugcucuga

SEQ ID NO: 8068 - RNA, 1710 nt, Artificial Sequence
  derived and/or modified CDS sequence (opt1) from LASV(ISTH1069-NIG-2011;Clade II)__AIT17455__NP
augagcgccuccaaggaggugaaguccuuccuguggacccagagccuccgccgggagcugagcggcuacugcuccagcaucaagcugcaggucgugaaggacgcccaggcgcuccugcacgggcuggacuucuccgaggugagcaacguccagcgccucaugcggaagcagaagcgcgacgacuccgaccugaagcggcugcgcgaccucaaccaggccgugaacaaccugguggagcucaagagcacccagcagaaguccguccugcgggugggcacgcugaccagcgacgaccugcucacccuggccgccgaccuggagaagcucaaguccaaggugauccgcaccgagcggccccugagcuccggggucuacaugggcaaccugagcacgcagcagcucgagcagcgccgggcccugcuguccaugaucgggauggugggcggcgcgcaggggacccagccgggccgcgacggggugguccgggugugggacgugaagaaccccgaccuccugaacaaccaguucggcaccaugcccagccugacccucgccugccugacgaagcaggggcaggucgaccugaacgacgccgugcucgcccugaccgaccugggccucaucuacaccgcgaaguaccccaacuccagcgaccuggaccgccugagccagucccacccgauccucaacaugguggacaccaagaaguccagccugaacaucagcggcuacaacuucucccugggggccgccgucaaggccggcgccugcaugcucgacgggggcaacaugcuggagacgaucaaggugacgccccagaccauggacggcauccucaagagcauccugaaggugaagcggucccuggggauguucgucagcgacacccccggcgagcgcaaccccuacgagaacauccuguacaagaucugccucuccggggacggcuggccguacaucgcgagccggaccuccaucguggggcgcgccugggagaacaccaccguggaccuggagagcgacggcaagccccagaaggucggcaccgccggguccaacaagagccugcaguccgccggcuuccccacggggcucaccuacagccagcugaugacccugaaggacuccaugaugcagcuggaccccagcgccaagaccuggaucgacaucgagggccggccggaggaccccguggagaucgcgcucuaccagcccauguccgggugcuacauccacuucuuccgcgagcccacggaccugaagcaguucaagcaggacgccaaguacagccacggcaucgacgucgccgaccuguucccggcccagcccggccucaccagcgccgugaucgaggcgcugccccggaacauggugcugaccugccagggguccgacgacaucaagcgccuccuggacagccagggccgccgggacaucaagcugaucgacaucgcccucuccaaggccgacagccgccgguucgagaacgccgucugggaccagugcaaggaccugugccacaugcacaccggggugguggucgagaagaagaagcgcggcgggaaggaggagaucacgccccacugcgcccugauggacugcaucauguacgacgcggccguguccggcggccucaacaucccggugcugcgggccguccugccccgcgacaugguguuccggaccagcucccccaaggugguccucuga

SEQ ID NO: 8069 - RNA, 1710 nt, Artificial Sequence
  derived and/or modified CDS sequence (opt1) from LASV(ISTH1096-NIG-2012;Clade II)__AIT17459__NP
augagcgccuccaaggaggugaaguccuuccuguggacccagagccuccgccgggagcugagcggcuacugcuccagcaucaagcugcaggucgugaaggacgcccaggcgcuccugcacgggcuggacuucuccgaggugagcaacguccagcgccucaugcggaagcagaagcgcgacgacuccgaccugaagcggcugcgcgaccucaaccaggccgugaacaaccugguggagcucaagagcacccagcagaaguccauccugcgggucggcacgcugaccagcgacgaccugcucacccuggccgccgaccuggagaagcucaaguccaaggugauccgcaccgagcggccccugagcuccgggguguacaugggcaaccugagcacgcagcagcucgagcagcgccgggcccugcugaacaugaucgggauggucggcggcgcgcaggggacccagccgggccgcgacgggguggugcgggucugggacgugaagaaccccgaccuccugaacaaccaguucggcaccaugcccucccugacccucgccugccugacgaagcagggccagguggaccugaacgacgccguccucgcccugaccgaccuggggcucaucuacaccgcgaaguaccccaacagcuccgaccuggaccgccugagccagagccacccgauccucaacaugguggacaccaagaaguccagccugaacaucuccggcuacaacuucagccugggggccgccgugaaggccggcgccugcaugcucgacgggggcaacaugcuggagacgaucaaggucacgccccagaccauggacggcauccugaaguccauccucaaggugaagcggagccuggggauguucguguccgacacccccggcgagcgcaaccccuacgagaacauccuguacaagaucugccucagcggggacggcuggccguacaucgcgucccggaccagcaucgucgggcgcgccugggagaacaccaccguggaccuggaguccgacggcaagccccagaagaugggcaccgccgggagcaacaagucccugcagagcgccggcuuccccacggggcucaccuacucccagcugaugacccugaaggacagcaugaugcagcuggaccccuccgccaagaccuggaucgacaucgagggccggccggaggaccccguggagaucgcgcucuaccagcccgucagcgggugcuacauccacuucuuccgcgagcccacggaccugaagcaguucaagcaggacgccaaguacucccacggcaucgacguggccgaccuguucccggcccagcccggccucaccagcgccgucaucgaggcgcugccccggaacauggugcugaccugccaggggagcgacgacaucaagcgccuccuggacucccagggccgccgggacaucaagcugaucgacaucgcccucagcaaggccgacucccgccgguucgagaacgccgugugggaccagugcaaggaccugugccacaugcacaccggggucgugguggagaagaagaagcgcggcgggaaggaggagaucacgccccacugcgcccugauggacugcaucauguacgacgcggccgucagcggcggccucaacaucccggugcugcgggccgugcugccccgcgacauggucuuccggaccuccagccccaagguggugcucuga

SEQ ID NO: 8070 - RNA, 1710 nt, Artificial Sequence
  derived and/or modified CDS sequence (opt1) from LASV(ISTH1107-NIG-2012;Clade II)__AIT17463__NP
augagcgccuccaaggaggugaaguccuuccuguggacccagagccuccgccgggagcugagcggcuacugcuccagcaucaagcugcaggucgugaaggacgcccaggcgcuccugcacgggcuggacuucuccgaggugagcaacguccagcgccucaugcggaagcacaagcgcgacgacuccgaccugaagcggcugcgcgaccucaaccaggccgugaacaaccugguggagcucaagagcacccagcagaaguccauccugcgggucggcacccugaccagcgacgaccugcucacccuggccgccgaccuggagaagcucaaguccaaggugauccgcaccgagcggccccugagcuccgggguguacaugggcaaccugagcacgcagcagcucgagcagcgccgggcccugcugaacaugaucgggauggucggcggcgcgcaguccacccagccggggcgcgacggcguggugcgggucugggacgugaagaaccccgaccuccugaacaaccaguucgggaccaugcccagccugacccucgccugccugacgaagcagggccagguggaccugaacgacgccguccucgcccugaccgaccuggggcucaucuacaccgcgaaguaccccaacuccagcgaccuggaccgccugagccagucccacccgauccucaccaugguggacacgaagaaguccagccugaacaucagcggcuucaacuucucccugggcgccgccgugaaggccggggccugcaugcucgacggcgggaacaugcuggagaccaucaaggucacgccccagaccauggacggcauccucaagagcauccugaaggugaagaagucccugggcauguucgugagcgacacccccggggagcggaaccccuacgagaacauccuguacaagaucugccucuccggcgacggguggccguacaucgcgagccgcaccuccaucgucggccgggccugggagaacaccaucguggaccuggagaccgacgggaagccccagaaggugggcacggccggcagcucccgcagccugcaguccgccggguuccccaccggccucaccuacagccagcugaugacccugaaggacuccaugaugcagcuggaccccagcgccaagacguggaucgacaucgaggggcggccggaggaccccgucgagaucgcgcucuaccagcccauguccggcugcuacauccacuucuuccgcgagcccaccgaccugaagcaguucaagcaggacgccaaguacagccacgggaucgacguggccgaccuguucccggcccagcccggccucaccagcgccgucaucgaggcgcugccccggaacauggugcugaccugccagggcuccgacgacaucaagaagcuccuggacagccaggggcgccgcgacaucaagcugaucgacaucgcccucuccaaggccgacagccggcgcuucgagaacgccgugugggaccagugcaaggaccugugccacaugcacacgggcgucgugguggagaagaagaagcgcgggggcaaggaggagaucacgccccacugcgcccugauggacugcaucauguacgacgcggccgucuccgggggccucaacaucccggugcugcgggccgugcugccccgggacauggucuuccgcaccagcucccccaagguggugcucuga

SEQ ID NO: 8071 - RNA, 1710 nt, Artificial Sequence
  derived and/or modified CDS sequence (opt1) from LASV(ISTH1111-NIG-2011;Clade II)__AIT17467__NP
augagcgccuccaaggaggugaaguccuuccuguggacccagagccuccgccgggagcugagcggcuacugcuccagcaucaagcugcaggucgugaaggacgcccaggcgcuccugcacgggcuggacuucuccgaggugagcaacguccagcgccucaugcggaagcagaagcgcgacgacuccgaccugaagcggcugcgcgaccucaaccaggccgugaacaaccugguggagcucaagagcacccagcagaaguccauccugcgggucggcacccugaccagcgacgaccugcucacccuggccgccgaccuggagaagcucaaguccaaggugauccgcaccgagcggccccugagcuccgggguguacaugggcaaccugagcacgcagcagcucgagcagcgccgggcccugcugaacaugaucgggauggucggcggcacccaggggacccagccgggccgcgacgggguggugcgggucugggacgugaagaaccccgaccuccugaacaaccaguucggcaccaugcccucccugacgcucgcgugccugaccaagcagggccagguggaccugaacgacgccguccucgcccugaccgaccuggggcucaucuacaccgccaaguaccccaacagcuccgaccuggaccgccugagccagagccacccgauccucaacaugguggacacgaagaaguccagccugaacaucuccggcuacaacuucagccugggggcggccgugaaggccggcgccugcaugcucgacgggggcaacaugcuggagaccaucaaggucacgccccagaccauggacggcauccugaaguccauccucaaggugaagaagucccuggggauguucgugagcgacacccccggcgagcggaaccccuacgagaacauccuguacaagaucugccucagcggggacggcuggccguacaucgccucccgcaccagcaucgucgggcgggcgugggagaacaccaccguggaccuggaguccgacggcaagccccagaaggugggcacggccgggagcaacaagucccugcagagcgccggcuuccccaccgggcucaccuacucccagcugaugacccugaaggacagcaugaugcagcuggaccccuccgccaagacguggaucgacaucgagggccgcccggaggaccccgucgagaucgcccucuaccagcccaugagcgggugcuacauccacuucuuccgggagcccaccgaccugaagcaguucaagcaggacgcgaaguacucccacggcaucgacguggccgaccuguucccggcccagcccggccucaccagcgccgucaucgaggcccugccccgcaacauggugcugaccugccaggggagcgacgacaucaagcggcuccuggacucccagggccgccgcgacaucaagcugaucgacaucagccucuccaaggcggacagccggcgcuucgagaacgccgugugggaccagugcaaggaccugugccacaugcacacgggggucgugguggagaagaagaagcggggcgggaaggaggagaucacgccccacugcgcccugauggacugcaucauguacgacgccgccgucuccggcggccucaacaucccggugcugcgcgcggugcugccccgggacauggucuuccgcaccagcucccccaagguggugcucuga

SEQ ID NO: 8072 - RNA, 1710 nt, Artificial Sequence
  derived and/or modified CDS sequence (opt1) from LASV(ISTH1121-NIG-2012;Clade II)__AIT17471__NP
augagcgccuccaaggaggugaaguccuuccuguggacccagagccuccgccgggagcugagcggcuacugcuccagcaucaagcugcaggucgugaaggacgcccaggcgcuccugcacgggcuggacuucuccgaggugagcaacguccagcgccucaugcggaagcagaagcgcgacgacuccgaccugaagcggcugcgcgaccucaaccaggccgugaacaaccugguggagcucaagagcacccagcagaaguccauccugcgggucggcacccugaccagcgacgaccugcucacccuggccgccgaccuggagaagcucaaguccaaggugauccgcaccgagcggccccugagcuccgggguguacaugggcaaccugagcacgcagcagcucgagcagcgccgggcccugcugaacaugaucgggauggucggcggcgcgcaggggacccagccgggccgcgacgggguggugcgggucugggacgugaagaaccccgaccuccugaacaaccaguucggcaccaugcccucccugacccucgccugccugacgaagcagggccagguggaccugaacgacgccguccucgcccugaccgaccuggggcucaucuacaccgcgaaguaccccaacagcuccgaccuggaccgccugagccagagccacccgauccucaacaugguggacaccaagaaguccagccugaacaucuccggcuacaacuucagccugggggccgccgugaaggccggcgccugcaugcucgacgggggcaacaugcuggagacgaucaaggucacgccccagaccauggacggcauccugaaguccauccucaaggugaagcggagccuggggauguucguguccgacacccccggcgagcgcaaccccuacgagaacauccuguacaagaucugccucagcggggacggcuggccguacaucgcgucccggaccagcaucgucgggcgcgccugggagaacaccaccguggaccuggaguccgacggcaagccccagaagaugggcaccacggggagcaacaagucccugcagagcgccggcuuccccaccgggcucaccuacucccagcugaugacccugaaggacagcaugaugcagcuggaccccuccgccaagacguggaucgacaucgagggccggccggaggaccccguggagaucgcccucuaccagcccaugagcgggugcuacauccacuucuuccgcgagcccaccgaccugaagcaguucaagcaggacgcgaaguacucccacggcaucgacgucgccgaccuguucccggcccagcccggccucaccagcgccgugaucgaggcccugccccggaacaugguccugaccugccaggggagcgacgacaucaagaagcuccuggacucccagggccgccgcgacaucaagcugaucgacaucgcgcucagcaaggccgacucccggaaguucgagaacguggugugggaccagugcaaggaccugugccacaugcacacgggggucgugguggagaagaagaagcgcggcgggaaggaggagaucacgccccacugcgcccugauggacugcaucauguacgacgccgccgucagcggcggccucaacaucccggugcugcgggcggugcugccccgcgacauggucuuccggaccuccagccccaagguggugcucuga

SEQ ID NO: 8073 - RNA, 1710 nt, Artificial Sequence
  derived and/or modified CDS sequence (opt1) from LASV(ISTH1129-NIG-2012;Clade II)__AIT17475__NP
augagcgccuccaaggaggugaaguccuuccuguggacccagagccuccgccgggagcugagcggcuacugcuccagcaucaagcugcaggucgugaaggacgcccaggcgcuccugcacgggcuggacuucuccgaggugagcaacguccagcgccucaugcggaagcagaagcgcgacgacuccgaccugaagcggcugcgcgaccucaaccaggccgugaacaaccugguggagcucaagagcacccagcagaaguccguccugcgggugggcacccugaccagcgacgaccugcucacccuggccgccgaccuggagaagcucaaguccaaggugauccgcaccgagcggccccugagcuccggggucuacaugggcaaccugagcgcccagcagcucgagcagcgccgggcgcugcuguccaugaucgggauggugggcggcgcccaggggacgcagccgggccgcgacggggugguccgggugugggacgugaagaaccccgaccuccugaacaaccaguucggcaccaugcccagccugacccucgccugccugaccaagcaggggcaggucgaccugaacgacacggugcucgcccugaccgaccugggccucaucuacaccgcgaaguaccccaacuccagcgaccuggaccgccugagccagucccacccgauccucaacaugguggacaccaagaaguccagccugaacaucagcggcuacaacuucucccugggggccgccgucaaggccggcgccugcaugcucgacgggggcaacaugcuggagacgaucaaggugacgccccagaccauggacggcauccucaagagcauccugaaggugaagcggucccuggggauguucgucagcgacacccccggcgagcgcaaccccuacgagaacauccuguacaagaucugccucuccggggacggcuggccguacaucgcgagccggaccuccaucguggggcgcgccugggagaacaccaccguggaccuggagagcgacggcaagccccagaaggucggcaccgccggguccaacaagagccugcaguccgccggcuuccccacggggcucaccuacagccagcugaugacccugaaggacuccaugaugcagcuggaccccagcgccaagaccuggaucgacaucgagggccggccggaggaccccguggagaucgcgcucuaccagcccaucuccgggugcuacauccacuucuuccgcgagcccacggaccugaagcaguucaagcaggacgccaaguacagccacggcaucgacgucaccgaccuguucccggcccagcccggccucaccagcgccgugaucgaggcccugccccggaacauggugcugaccugccagggguccgacgacaucaagcgccuccuggacagccagggccgccgggacaucaagaucaucgacaucgcgcuguccaaggccgacagccgccgguucgagaacgccgucugggaccagugcaaggaccucugccacaugcacacgggggugguggucgagaagaagaagcgcggcgggaaggaggagaucacgccccacugcgcccugauggacugcaucauguacgacgccgcgguguccggcggccugaacaucccggugcuccgggccguccugccccgcgacaugguguuccggaccagcucccccaaggugguccuguga

SEQ ID NO: 8074 - RNA, 1710 nt, Artificial Sequence
  derived and/or modified CDS sequence (opt1) from LASV(ISTH1137-NIG-2011;Clade II)__AIT17479__NP
augagcgccuccaaggaggugaaguccuuccuguggacccagagccuccgccgggagcugagcggcuacugcuccaacaucaagcugcaggucgugaaggacgcccaggcgcuccugcacgggcuggacuucagcgagguguccaacguccagcgccucaugcggaagcagaagcgcgacgacagcgaccugaagcggcugcgcgaccucaaccaggccgugaacaaccugguggagcugaaguccacccagcagaaguccguccuccgggugggcacgcugaccagcgacgaccugcucacccuggccgccgaccuggagaagcucaagagcaaggugauccgcaccgagcggccccuguccagcggggucuacaugggcaaccuguccacgcagcagcucgagcagcgccgggcccugcugaacaugaucgggauggugggcggcgcgcaggggacccagccgggccgcgacggggugguccgggugugggacgugaagaaccccgaccuccugaacaaccaguucggcaccaugcccagccugacccucgccugccugacgaagcaggggcaggucgaccugaacgacgccgugcucgcccugaccgaccugggccucaucuacaccgcgaaguaccccaacuccagcgaccuggaccgccugucccagagccacccgauccucaacaugguggacaccaagaaguccagccugaacaucagcggcuacaacuucucccugggggccgccgucaaggccggcgccugcaugcucgacgggggcaacaugcuggagacgaucaaggugacgccccagaccauggacggcauccucaagagcauccugaaggugaagcggucccuggggauguucgucagcgacacccccggcgagcgcaaccccuacgagaacauccuguacaagaucugccucuccggggacggcuggccguacaucgcgagccggaccuccaucguggggcgcgccugggagaacaccaccguggaccuggagagcgacggcaagccccagaaggucggcaccgccggguccaacaagagccugcaguccgccggcuuccccacggggcucaccuacagccagcugaugacccugaaggacuccaugaugcagcuggaccccagcgccaagaccuggaucgacaucgagggccggccggaggaccccguggagaucgcgcucuaccagcccauguccgggugcuacauccacuucuuccgcgagcccacggaccugaagcaguucaagcaggacgccaaguacagccacggcaucgacgucgccgaccuguucccggcccagcccggccucaccuccgccgugaucgaggcgcugccccggaacauggugcugaccugccaggggagcgacgacaucaagaagcuccuggacagccagggccgcaaggacaucaagcugaucgacaucgcccucuccaaggucgacagccgccgguucgagaacgccgugugggaccagugcaaggaccugugccacaugcacaccgggguggucguggagaagaagaagcgcggcgggaaggaggagaucacgccccacugcgcccugauggacugcaucauguacgacgccgcgguguccggcggccucaacaucccgguccugcgggccgugcugccccgcgacaugguguuccggaccagcucccccaaggucgugcucuga

SEQ ID NO: 8075 - RNA, 1710 nt, Artificial Sequence
  derived and/or modified CDS sequence (opt1) from LASV(ISTH2010-NIG-2012;Clade II)__AIT17483__NP
augagcgccuccaaggaggugaaguccuuccuguggacccagagccuccgccgggagcugagcggcuacugcuccaacaucaagcugcaggucgugaaggacgcccaggcgcuccugcacgggcuggacuucagcgagguguccaacguccagcgccucaugcggaagcagaagcgcgacgacagcgaccugaagcggcugcgcgaccucaaccaggccgugaacaaccugguggagcugaaguccacccagcagaaguccauccuccgggucggcacgcugaccagcgacgaccugcucacccuggccgccgaccuggagaagcucaagagcaaggugauccgcaccgagcggccccuguccagcgggguguacaugggcaaccuguccacgcagcagcucgagcagcgccgggcccugcugaaccucaucgggauggucggcggcgcgcaggggacccagccgggccgcgacgggguggugcgggucugggacgugaagaaccccgaccugcugaacaaccaguucggcaccaugcccagccucacccuggccugccugacgaagcagggccagguggaccucaacgacgccguccuggcccugaccgaccucgggcugaucuacaccgcgaaguaccccaacuccagcgaccuggaccgccucucccagagccacccgauccugaacaugguggacaccaagaaguccagccugaacaucagcggcuucaacuucucccucggggccgccgugaaggccggcgccugcaugcuggacgggggcaacaugcuggagacgaucaaggucacgccccagaccauggacggcauccucaagagcauccugaaggugaagaagucccuggggauguucgugagcgacacccccggcgagcggaaccccuacgagaacauccucuacaagaucugccuguccggggacggcuggccguacaucgcgagccgcaccuccaucgucgggcgggccugggagaacaccaccguggaccuggagagcgacggcaagccccacaaggugggcaccgccggguccaacaagagccuccaguccgccggcuuccccacggggcugaccuacagccagcugaugacccugaaggacuccaugaugcagcucgaccccagcgccaagaccuggaucgacaucgagggccgcccggaggaccccgucgagaucgcgcuguaccagcccauguccgggugcuacauccacuucuuccgggagcccacggaccugaagcaguucaagcaggacgccaaguacagccacggcaucgacguggccgaccucuucccggcccagcccggccugaccuccgccgucaucgaggcgcugccccgcaacauggugcugaccugccaggggagcgacgacaucaagcggcuccuggacagccagggccgccgcgacaucaagcucaucgacaucgcccuguccaaggccgacagccggcgcuucgagaacgccgugugggaccagugcaaggaccugugccacaugcacaccggggucgugguggagaagaagaagcggggcgggaaggaggagaucacgccccacugcgcccucauggacugcaucauguacgacgcggccgucuccggcggccugaacaucccggugcugcgcgccgugcucccccgggacauggucuuccgcaccagcucccccaagguggugcuguga

SEQ ID NO: 8076 - RNA, 1710 nt, Artificial Sequence
  derived and/or modified CDS sequence (opt1) from LASV(ISTH2020-NIG-2012;Clade II)__AIT17491__NP
augagcgccuccaaggaggugaaguccuuccuguggacccagagccuccgccgggagcugagcggcuacugcuccaacaucaagcugcaggucgugaaggacgcccaggcgcuccugcacgggcuggacuucagcgagguguccaacguccagcgccucaugcggaagcagaagcgcgacgacggcgaccugaagcggcugcgcgaccucaaccaggccgugaacaaccugguggagcucaagagcacccagcagaaguccguccugcggguggggacgcugaccagcgacgaccugcucacccuggccgccgaccuggagaagcucaaguccaaggugauccgcaccgagcggccccugagcuccggcgucuacauggggaaccugagcacgcagcagcucgagcagcgccgggcccugcuguccaugaucggcauggugggcggggcgcgcggcacccagccggggcgggacggcgugguccgcgugugggacgugaagaaccccgaccuccugaacaaccaguucgggaccaugcccagccugacccucgccugccugacgaagcagggccaggucgaccugaacgacguggugcucgcccugaccgaccugggccucaucuacaccgccaaguaccccaacuccagcgaccuggaccggcugucccagagccacccgauccucaacauggucgacaccaagaaguccagccugaacaucagcggguacaacuucucccugggcgcggccgugaaggccggggccugcaugcucgacggcggcaacaugcuggagacgaucaaggugacgccccagaccauggacgggauccucaagagcauccugaaggucaagaagucccugggcauguucgugagcgacacccccggggagcgcaaccccuacgagaacauccuguacaagaucugccucuccggcgacggguggccguacaucgccagccggaccuccaucgugggccgcgcgugggagaacaccaccgucgaccuggagagcgacggcaagccccagaaggugggggccgccggcuccaacaagagccugcaguccgccggguuccccaccggccucacguacagccagcugaugacccugaaggacuccaugaugcagcuggaccccagcgccaagaccuggaucgacaucgaggggcggccggaggaccccgucgagaucgcgcucuaccagcccauguccggcugcuacauccacuucuuccgcgagcccaccgaccugaagcaguucaagcaggacgccaaguacagccacggcaucgacgugacggaccuguucuccgcccagccggggcucaccagcgccgugaucgaggcccugccccggaacaugguccugaccugccagggcagcgacgacaucaagcgccuccuggacucccaggggcgccgggacaucaagcugaucgacaucgcgcucagcaaggccgacucccgccgguucgagaacgccgugugggaccagugcaaggaccugugccacaugcacaccggcguggucguggagaagaagaagcgcgggggcaaggaggagaucacgccccacugcgcccugauggacugcaucauguacgacgccgcggugagcggcgggcucaacauccccguccugcgggccgugcugccgcgcgacaugguguuccggaccuccagccccaaggucgugcucuga

SEQ ID NO: 8077 - RNA, 1710 nt, Artificial Sequence
  derived and/or modified CDS sequence (opt1) from LASV(ISTH2025-NIG-2012;Clade II)__AIT17495__NP
augagcgccuccaaggaggugaaguccuuccuguggacccagagccuccgccgggagcugagcggcuacugcuccaacaucaagcugcaggucgugaaggacgcccaggcgcuccugcacgggcuggacuucagcgagguguccaacguccagcgccucaugcggaagcagaagcgcgacgacagcgaccugaagcggcugcgcgaccucaaccaggccgugaacaaccugguggagcugaaguccacccagcagaaguccauccuccgggucggcacccugaccagcgacgaccugcucacccuggccgccgaccuggagaagcucaagagcaaggugauccgcaccgagcggccccuguccagcgggguguacaugggcaaccuguccacgcagcagcucgagcagcgccgggcccugcugaacaugaucgggauggucggcggcgcgcagagcgcccagccggggcgcgacggcguggugcgggucugggacgugaagaaccccgaccuccugaacaaccaguucgggaccaugcccucccugacccucgccugccugaccaagcagggccagguggaccugaacgacgccguccucgcgcugacggaccuggggcucaucuacaccgccaaguaccccaacagcuccgaccuggaccgccugagccagagccacccgauccucaacaugguggacaccaagaaguccagccugaacaucuccggcuucaacuucagccugggcgccgccgugaaggccggggcgugcaugcucgacggcgggaacaugcuggagaccaucaaggucacgccccagaccauggacggcauccugaaguccauccucaaggugaagcggagccugggcauguucguguccgacgcccccggggagcgcaaccccuacgagaacauccuguacaagaucugccucagcggcgacggguggccguacaucgccucccggaccagcaucgucggccgcgccugggagaacaccacgguggaccuggaguccgacgggaagccccagaaggugggcaccgccggcagcaacaagucccugcagagcgcgggguuccccaccggccucaccuacucccagcugaugacgcugaaggacagcaugaugcagcuggaccccuccgccaagaccuggaucgacaucgaggggcggccggaggaccccgucgagaucgcccucuaccagcccaugagcggcugcuacauccacuucuuccgcgagcccaccgaccugaagcaguucaagcaggacgccaaguacucccacgggaucgacguggccgaccuguucccggcgcagcccggccucaccagcgccgucaucgaggcccugccccggaacauggugcugacgugccagggcagcgacgacaucaagaagcuccuggacucccaggggcgccgcgacaucaagcugaucgacaucgcccucagcaaggccgacucccggcgcuucgagaacgcggugugggaccagugcaaggaccugugccacaugcacaccggcgucgugguggagaagaagaagcgcgggggcaaggaggagaucacgccccacugcgcccugauggacugcaucauguacgacgccgccgucagcgggggccucaacaucccggugcugcgggcggugcugccccgggacauggucuuccgcaccuccagccccaagguggugcucuga

SEQ ID NO: 8078 - RNA, 1710 nt, Artificial Sequence
  derived and/or modified CDS sequence (opt1) from LASV(ISTH2031-NIG-2012;Clade II)__AIT17499__NP
augagcgccuccaaggaggugaaguccuuccuguggacccagagccuccgccgggagcugagcggcuacugcuccagcaucaagcugcaggucgugaaggacgcccaggcgcuccugcacgggcuggacuucuccgaggugagcaacguccagcgccucaugcggaagcagaagcgcgacgacuccgaccugaagcggcugcgcgaccucaaccaggccgugaacaaccugguggagcucaagagcacccagcagaaguccauccugcgggucggcacgcugaccagcgacgaccugcucacccuggccgccgaccuggagaagcucaaguccaaggugauccgcaccgagcggccccugagcuccgggguguacaugggcaaccugagcacgcagcagcucgagcagcgccgggcccugcugaacaucaucgggauggucggcggcgcgcaggggacccagccgggccgcgacgggguggugcgggucugggacgugaagaaccccgaccuccugaacaaccaguucggcaccaugcccucccugacccucgccugccugacgaagcagggccagguggaccugaacgacgccguccucgcccugaccgaccuggggcucaucuacaccgcgaaguaccccaacagcuccgaccuggaccgccugagccagagccacccgauccucaacaugguggacaccaagaaguccagccugaacaucuccggcuacaacuucagccugggggccgccgugaaggccggcgccugcaugcucgacgggggcaacaugcuggagacgaucaaggucacgccccagaccauggacggcauccugaaguccauccucaaggugaagcggagccuggggauguucguguccgacacccccggcgagcgcaaccccuacgagaacauccuguacaagaucugccucagcggggacggcuggccguacaucgcgucccggaccagcaucgucgggcgcgccugggagaacaccaccguggaccuggaguccgacggcaagccccagaaggugggcgccgccgggagcaacaagucccugcagagcgccggcuuccccaccgggcucacguacucccagcugaugacccugaaggacagcaugaugcagcuggaccccuccgcgaagaccuggaucgacaucgagggccggccggaggaccccgucgagaucgcccucuaccagcccaugagcgggugcuacauccacuucuuccgcgagcccaccgaccugaagcaguucaagcaggacgccaaguacucccacggcaucgacguggccgaccuguucccggcccagcccggccucacgagcgcggucaucgaggcccugccccggaacauggugcugaccugccaggggagcgacgacgugaagcgccuccuggacucccagggccgccgggacaucaagcugaucgacaucgcccucagcaaggccgacucccgccgguucgagaacgccgucugggaccagugcaaggaccugugccacaugcacaccggggugguggucgagaagaagaagcgcggcgggaaggaggagaucacgccccacugcgcgcugauggacugcaucauguacgacgccgccgugagcggcggccucaacaucccggugcugcgggccguccugccccgcgacaugguguuccggaccuccagccccaaggugguccucuga

SEQ ID NO: 8079 - RNA, 1710 nt, Artificial Sequence
  derived and/or modified CDS sequence (opt1) from LASV(ISTH2037-NIG-2012;Clade II)__AIT17503__NP
augagcuccagcaaggaggugaaguccuuccuguggacccagagccuccgccgggagcuguccggcuacugcagcuccaucaagcugcaggucgugaaggacgcccaggcccuccugcacgggcuggacuucagcgagguguccaacguccagcgccucaugcggaagcagaagcgcgacgacagcgaccugaagcggcugcgcgaccucaaccaggcggugaacaaccugguggagcugaaguccacccagcagaaguccauccuccgggucggcacgcugaccagcgacgaccugcucacccuggccgccgaccuggagaagcucaagagcaaggugauccgcaccgagcggccccuguccagcgggguguacaugggcaaccuguccgcccagcagcucgagcagcgccgggcccugcugaacaugaucgggauggucggcggcgcgcaggggacgcagccgggccgcgacgggguggugcgggucugggacgugaagaaccccgaccuccugaacaaccaguucggcaccaugcccagccugacccucgccugccugaccaagcagggccagguggaccugaacgacgccguccucgcccugacggaccuggggcucaucuacaccgcgaaguaccccaacuccagcgaccuggaccgccugagccagucccacccgauccucaacaugguggacaccaagaaguccagccugaacaucagcggcuacaacuucucccugggggccgccgugaaggccggcgccugcaugcucgacgggggcaacaugcuggagaccaucaaggucacgccccagaccauggacggcauccucaagagcauccugaaggugaagaagucccuggggauguucgugagcgacacccccggcgagcggaaccccuacgagaacauccuguacaagaucugccucuccggggacggcuggccguacaucgcgagccgcaccuccaucgucgggcgggccugggagaacacgaccguggaccuggagagcgacggcaagccccagaaggugggcaccgccggguccaacaagagccugcaguccgccggcuuccccaccgggcucacguacagccagcugaugacccugaaggacuccaugaugcagcuggaccccagcgccaagaccuggaucgacaucgagggccgcccggaggaccccgucgagaucgcgcucuaccagcccauguccgggugcuacauccacuucuuccgggagcccaccgaccugaagcaguucaagcaggacgccaaguacagccacggcaucgacguggccgaccuguucccggcccagcccggccucacgagcgccgucaucgaggcgcugccccgcaacauggugcugaccugccagggguccgacgacaucaagcggcuccuggacagccagggccgccgcgacaucaagcugaucgacaucgcccucuccaaggccgacagccggcgcuucgagaacgccgugugggaccagugcaaggaccugugccacaugcacaccggggucgugguggagaagaagaagcggggcgggaaggaggagaucacgccccacugcgcccugauggacugcaucauguacgacgcggccgucuccggcggccucaacaucccggugcugcgcgccgugcugccccgggacauggucuuccgcaccagcucccccaagguggugcucuga

SEQ ID NO: 8080 - RNA, 1710 nt, Artificial Sequence
  derived and/or modified CDS sequence (opt1) from LASV(ISTH2042-NIG-2012;Clade II)__AIT17507__NP
augagcgccuccaaggaggugaaguccuuccuguggacccagagccuccgccgggagcugagcggcuacugcuccaacaucaagcugcaggucgugaaggacgcccaggcgcuccugcacgggcuggacuucagcgagguguccaacguccagcgccucaugcggaagcagaagcgcgacgacagcgaccugaagcggcugcgcgaccucaaccaggccgugaacaaccugguggagcugaaguccacccagcagaaguccauccuccgggucggcacgcugaccagcgacgaccugcucacccuggccgccgaccuggagaagcucaagagcaaggugauccgcaccgagcggccccuguccagcgggguguacaugggcaaccuguccacgcagcagcucgagcagcgccgggcccugcugaaccucaucgggauggucggcggcgcgcaggggacccagccgggccgcgacgggguggugcgggucugggacgugaagaaccccgaccugcugaacaaccaguucggcaccaugcccagccucacccuggccugccugacgaagcagggccagguggaccucaacgacgccguccuggcccugaccgaccucgggcugaucuacaccgcgaaguaccccaacuccagcgaccuggaccgccucucccagagccacccgauccugaacaugguggacaccaagaaguccagccugaacaucagcggcuucaacuucucccucggggccgccgugaaggccggcgccugcaugcuggacgggggcaacaugcuggagacgaucaaggucacgccccagaccaucgacggcauccucaagagcauccugaaggugaagaagucccuggggauguucgugagcgacacccccggcgagcggaaccccuacgagaacauccucuacaagaucugccuguccggggacggcuggccguacaucgcgagccgcaccuccaucgucgggcgggccugggagaacaccaccguggaccuggagagcgacggcaagccccacaaggugggcaccgccggguccaacaagagccuccaguccgccggcuuccccacggggcugaccuacagccagcugaugacccugaaggacuccaugaugcagcucgaccccagcgccaagaccuggaucgacaucgagggccgcccggaggaccccgucgagaucgcgcuguaccagcccauguccgggugcuacauccacuucuuccgggagcccacggaccugaagcaguucaagcaggacgccaaguacagccacggcaucgacguggccgaccucuucccggcccagcccggccugaccuccgccgucaucgaggcgcugccccgcaacauggugcugaccugccaggggagcgacgacaucaagcggcuccuggacagccagggccgccgcgacaucaagcucaucgacaucgcccuguccaagguggacagccggcgcuucgagaacgccgucugggaccagugcaaggaccugugccacaugcacaccggggugguggucgagaagaagaagcggggcgggaaggaggagaucacgccccacugcgcccucauggacugcaucauguacgacgccgcgguguccggcggccugaacaucccggugcugcgcgccguccucccccgggacaugguguuccgcaccagcucccccaaggugguccuguga

SEQ ID NO: 8081 - RNA, 1710 nt, Artificial Sequence
  derived and/or modified CDS sequence (opt1) from LASV(ISTH2046-NIG-2012;Clade II)__AIT17511__NP
augagcgccuccaaggaggugaaguccuuccuguggacccagagccuccgccgggagcugagcggcuacugcuccaacaucaagcugcaggucgugaaggacgcccaggcgcuccugcacgggcuggacuucagcgagguguccaacguccagcgccucaugcggaagcagaagcgcgacgacggcgaccugaagcggcugcgcgaccucaaccaggccgugaacaaccugguggagcucaagagcacccagcagaaguccauccugcgggucgggacccugaccagcgacgaccugcucacccuggccgccgaccuggagaagcucaaguccaaggugauccgcaccgagcggccccugagcuccggcguguacauggggaaccugagcacgcagcagcucgagcagcgccgggcccugcugaacaugaucggcauggucggcggggcgcagggcacccagccggggcgcgacggcguggugcgggucugggacgugaagaaccccgaccuccugaacaaccaguucgggaccaugcccucccugacccucgccugccugacgaagcagggccagguggaccugaacgacgccguccucgcccugaccgaccugggccucaucuacaccgcgaaguaccccaacagcuccgaccuggaccgccugagccagucccacccgauccucaacaugguggacaccaagaaguccagccugaacaucagcggguacaacuucagccugggcgccgccgugaaggccggggccugcaugcucgacggcggcaacaugcuggagacgaucaaggucacgccccagaccaucgacgggauccugaaguccauccucaaggugaagaagucccugggcauguucgugagcgacacccccggggagcggaaccccuacgagaacauccuguacaagaucugccucagcggcgacggguggccguacaucgcgucccgcaccagcaucgucggccgggccugggagaacaccaccguggaccuggaguccgacggcaagccccagaagguggggaccgccggcagcaacaagucccugcagagcgccggguuccccacgggccucaccuacucccagcugaugacccugaaggacagcaugaugcagcuggaccccuccgccaagaccuggaucgacaucgaggggcgcccggaggaccccgucgagaucgcgcucuaccagcccaugagcggcugcuacauccacuucuuccgggagcccacggaccugaagcaguucaagcaggacgccaaguacucccacggcaucgacgugaccgaccuguucagcgcccagccggggcucaccuccgccgucaucgaggcccugccccgcaacauggugcugaccugccagggcagcgacgacaucaagcggcuccuggacagccaggggcgccgcgacaucaagcugaucgacaucgcgcucuccaaggccgacagccggcgcuucgagaacgccgugugggaccagugcaaggaccugugccacaugcacacgggcgucgugguggagaagaagaagcgcgggggcaaggaggagaucacgccccacugcgcccugauggacugcaucauguacgacgccgcggucuccggcgggcucaacauccccgugcugcgggccgugcugccgcgggacauggucuuccgcaccagcucccccaagguggugcucuga

SEQ ID NO: 8082 - RNA, 1710 nt, Artificial Sequence
  derived and/or modified CDS sequence (opt1) from LASV(ISTH2050-NIG-2012;Clade II)__AIT17515__NP
augagcgccuccaaggaggugaaguccuuccuguggacccagagccuccgccgggagcugagcggcuacugcuccagcaucaagcugcaggucgugaaggacgcccaggcgcuccugcacgggcuggacuucuccgaggugagcaacguccagcgccucaugcggaagcagaagcgcgacgacuccgaccugaagcggcugcgcgaccucaaccaggccgugaacaaccugguggagcucaagagcacccagcagaaguccauccugcgggucggcacgcugaccagcgacgaccugcucacccuggccgccgaccuggagaagcucaaguccaaggugauccgcaccgagcggccccugagcuccgggguguacaugggcaaccugagcacgcagcagcucgagcagcgccgggcccugcugaacaugaucgggauggucggcggcgcgcaggggacccagccgggccgcgacgggguggugcgggucugggacgugaagaaccccgaccuccugaacaaccaguucggcaccaugcccucccugacccucgccugccugacgaagcagggccagguggaccugaacgacgccguccucgcccugaccgaccuggggcucaucuacaccgcgaaguaccccaacagcuccgaccuggaccgccugagccagagccacccgauccucaacaugguggacaccaagaaguccagccugaacaucuccggcuacaacuucagccugggggccgccgugaaggccggcgccugcaugcucgacgggggcaacaugcuggagacgaucaaggucacgccccagaccauggacggcauccugaaguccauccucaaggugaagcggagccuggggauguucguguccgacacccccggcgagcgcaaccccuacgagaacauccuguacaagaucugccucagcggggacggcuggccguacaucgcgucccggaccagcaucgucgggcgcgccugggagaacaccaccguggaccuggaguccgacggcaagccccagaaggugggcgccgccgggagcuccaagagccugcaguccgccggcuuccccaccgggcucacguacagccagcugaugacccugaaggacuccaugaugcagcuggaccccagcgcgaagaccuggaucgacaucgagggccggccggaggaccccgucgagaucgcccucuaccagcccguguccgggugcuacauccacuucuuccgcgagcccaccgaccugaagcaguucaagcaggacgccaaguacagccacggcaucgacgucgccgaccuguucccggcccagcccggccucacgagcgcggugaucgaggcccugccccggaacauggugcugaccugccagggguccgacgacaucaagcgccuccuggacagccagggccgccgggacaucaagcugaucgacaucgcccucuccaaggccgacagccgccgguucgagaacgccgucugggaccagugcaaggaccugugccacaugcacaccggggugguggucgagaagaagaagcgcggcgggaaggaggagaucacgccccacugcgcgcugauggacugcaucauguacgacgccgccguguccggcggccucaacaucccggugcugcgggccguccugccccgcgacaugguguuccggaccagcucccccaaggugguccucuga

SEQ ID NO: 8083 - RNA, 1710 nt, Artificial Sequence
  derived and/or modified CDS sequence (opt1) from LASV(ISTH2057-NIG-2012;Clade II)__AIT17519__NP
augagcgccuccaaggaggugaaguccuuccuguggacccagagccuccgccgggagcugagcggcuacugcuccaacaucaagcugcaggucgugaaggacgcccaggcgcuccugcacgggcuggacuucagcgagguguccaacguccagcgccucaugcggaagcagaagcgcgacgacagcgaccugaagcggcugcgcgaccucaaccaggccgugaacaaccugguggagcugaaguccacccagcagaaguccauccuccgggucggcacgcugaccagcgacgaccugcucacccuggccgccgaccuggagaagcucaagagcaaggugauccgcaccgagcggccccuguccagcgggguguacaugggcaaccuguccgcccagcagcucgagcagcgccgggcgcugcugaacaugaucgggauggucggcggcgcccaggggacgcagccgggccgcgacgggguggugcgggucugggacgugaagaaccccgaccuccugaacaaccaguucggcaccaugcccagccugacccucgccugccugaccaagcagggccagguggaccugaacgacgccguccucgcgcugacggaccuggggcucaucuacaccgccaaguaccccaacuccagcgaccuggaccgccugucccagagccacccgauccucaacaugguggacaccaagaaguccagccugaacaucagcggcuucaacuucucccugggggccgccgugaaggccggcgcgugcaugcucgacgggggcaacaugcuggagaccaucaaggucacgccccagaccauggacggcauccucaagagcauccugaaggugaagcggucccuggggauguucgugagcgacacccccggcgagcgcaaccccuacgagaacauccuguacaagaucugccucuccggggacggcuggccguacaucgccagccggaccuccaucgucgggcgcgccugggagaacacgaccguggaccuggagagcgacggcaagccccagaaggugggcaccgccggguccaacaagagccugcaguccgccggcuuccccaccgggcucacguacagccagcugaugacccugaaggacuccaugaugcagcuggaccccagcgcgaagaccuggaucgacaucgagggccggccggaggaccccgucgagaucgcccucuaccagcccauguccgggugcuacauccacuucuuccgcgagcccaccgaccugaagcaguucaagcaggacgccaaguacagccacggcaucgacguggccgaccuguucccggcccagcccggccucacguccgcggucaucgaggcccugccccggaacauggugcugaccugccaggggagcgacgacaucaagcgccuccuggacagccagggccgccgggacaucaagcugaucgacaucgcccucuccaaggccgacagccgccgguucgagaacgccgugugggaccagugcaaggaccugugccacaugcacaccggggucgugguggagaagaagaagcgcggcgggaaggaggagaucacgccccacugcgcgcugauggacugcaucauguacgacgccgccgucuccggcggccucaacaucccggugcugcgggccgugcugccccgcgacauggucuuccggaccagcucccccaagguggugcucuga

SEQ ID NO: 8084 - RNA, 1710 nt, Artificial Sequence
  derived and/or modified CDS sequence (opt1) from LASV(ISTH2064-NIG-2012;Clade II)__AIT17525__NP
augagcgccuccaaggaggugaaguccuuccuguggacccagagccuccgccgggagcugagcggcuacugcuccagcaucaagcugcaggucgugaaggacgcccaggcgcuccugcacgggcuggacuucuccgaggugagcaacguccagcgccucaugcggaagcagcgccgggacgacuccgaccugaagcgccugcgggaccucaaccaggccgugaacaaccugguggagcucaagagcacccagcagaaguccauccugcgcgucggcacccugaccagcgacgaccugcucacccuggccgccgaccuggagaagcucaaguccaaggugauccggaccgagcgcccccugagcuccgggguguacaugggcaaccugagcacgcagcagcucgagcagcggcgcgcccugcugaacaugaucgggauggucggcggcgcgcaggggacccagccgggccgggacgggguggugcgcgucugggacgugaagaaccccgaccuccugaacaaccaguucggcaccaugcccucccugacccucgccugccugacgaagcagggccagguggaccugaacgacgccguccucgcccugaccgaccuggggcucaucuacaccgcgaaguaccccaacagcuccgaccuggaccggcugagccagagccacccgauccucaacaugguggacaccaagaaguccagccugaacaucuccggcuacaacuucagccugggggccgccgugaaggccggcgccugcaugcucgacgggggcaacaugcuggagacgaucaaggucacgccccagaccguggacggcauccugaaguccauccucaaggugaagcgcagccuggggauguucgucuccgacacccccggcgagcggaaccccuacgagaacauccuguacaagaucugccucagcggggacggcuggccguacaucgcgucccgcaccagcaucguggggcgggccugggagaacaccaccguggaccuggaguccgacggcaagccccagaaggucggcaccgccgggagcaacaagucccugcagagcgccggcuuccccacggggcucaccuacucccagcugaugacccugaaggacagcaugaugcagcuggaccccuccgccaagaccuggaucgacaucgagggccgcccggaggaccccguggagaucgcgcucuaccagcccaugagcgggugcuacauccacuucuuccgggagcccacggaccugaagcaguucaagcaggacgccaaguacucccacggcaucgacgucgccgaccuguucccgacccagcccggccucaccagcgccgugaucgaggcccugccccgcaacauggugcugaccugccaggggagcgacgacaucaagcgccuccuggacucccagggccggcgcgacaucaagcugaucgacaucgcgcucagcaaggccgacucccggaaguucgagaacgccgucugggaccagugcaaggaccugugccacaugcacacgggggugguggucgagaagaagaagcgcggcgggaaggaggagaucacgccccacugcgcccugauggacugcaucauguacgacgccgcggugagcggcggccucaacaucccggugcugcgggccguccugccccgcgacaugguguuccggaccuccagccccaaggugguccucuga

SEQ ID NO: 8085 - RNA, 1710 nt, Artificial Sequence
  derived and/or modified CDS sequence (opt1) from LASV(ISTH2065-NIG-2012;Clade II)__AIT17529__NP
augagcgccuccaaggaggugaaguccuuccuguggacccagagccuccgccgggagcugagcggcuacugcuccaacaucaagcugcaggucgugaaggacgcccaggcgcuccugcacgggcuggacuucagcgaggugaacaacguccagcgccucaugcggaagcagaagcgcgacgacuccgaccugaagcggcugcgcgaccucaaccaggccgugaacaaccugguggagcucaagagcacccagcagaaguccauccugcgggucggcacccugaccagcgacgaccugcucacccuggccgccgaccuggagaagcucaaguccaaggugauccgcaccgagcggccccugagcuccgggguguacaugggcaaccugagcacgcagcagcucgagcagcgccgggcccugcugaacaugaucgggauggcgggcggcacccaggggacccagccgggccgcgacggggucgugcgggugugggacgucaagaaccccgaccuccugaacaaccaguucggcaccaugcccucccugacgcucgccugccugaccaagcagggccagguggaccugaacgacgccgugcucgcccugaccgaccuggggcucaucuacaccgcgaaguaccccaacagcuccgaccuggaccgccugagccagucccacccgauccucaacauggucgacacgaagaaguccagccugaacaucagcggcuacaacuucagccugggggccgccgugaaggccggcgccugcaugcucgacgggggcaacaugcuggagaccaucaaggugacgccccagaccauggacggcauccugaaguccauccucaaggucaagcggagccuggggauguucguguccgacacccccggcgagcgcaaccccuacgagaacauccuguacaagaucugccucagcggggacggcuggccguacaucgcgucccggaccagcaucguggggcgcgccugggagaacaccaccgucgaccuggaguccgacggcaagccccagaaggugggcacggccgggagcaacaagucccugcagagcgccggcuuccccaccgggcucaccuacucccagcugaugacccugaaggacagcaugaugcagcuggaccccuccgccaagacguggaucgacaucgagggccggccggaggaccccguggagaucgcgcucuaccagcccaugagcgggugcuacauccacuucuuccgcgagcccaccgaccugaagcaguucaagcaggacgccaaguacucccacggcaucgacgucgccgaccuguucccggcccagcccggccucaccagcgccgugaucgaggcgcugccccggaacaugguccugaccugccagggguccgacgacaucaagaagcuccuggacagccagggccgccgcgacaucaagcugaucgacaucagccucuccaagaucgacagccggaaguucgagaacgccgugugggaccagugcaaggaccugugccacaugcacacggggguggucguggagaagaagaagcgcggcgggaaggaggagaucacgccccacugcgcccugauggacugcaucauguucgacgccgccguguccggcggccucaacaucccgguccugcgggcggugcugccccgcgacaugguguuccggaccagcucccccaaggucgugcucuga

SEQ ID NO: 8086 - RNA, 1710 nt, Artificial Sequence
  derived and/or modified CDS sequence (opt1) from LASV(ISTH2094-NIG-2012;Clade II)__AIT17539__NP
augagcgccuccaaggaggugaaguccuuccuguggacccagagccuccgccgggagcugagcggcuacugcuccaacaucaagcugcaggucgugaaggacgcccaggcgcuccugcacgggcuggacuucagcgagguguccaacguccagcgccucaugcggaagcagaagcgcgacgacggcgaccugaagcggcugcgcgaccucaaccaggccgugaacaaccugguggagcucaagagcacccagcagaaguccguccugcggguggggacgcugaccagcgacgaccugcucauccuggccgccgaccuggagaagcucaaguccaaggugauccgcaccgagcggccccugagcuccggcgucuacauggggaaccugagcacccagcagcucgagcagcgcaaggcccugcuguccaugaucggcauggugggcggggcgcagggcacgcagccggggcgggacggcgugguccgcgugugggacgugaagaaccccgaccuccugaacaaccaguucgggaccaugcccagccugacccucgccugccugaccaagcagggccaggucgaccugaacgacgccgugcucgcccugacggaccugggccucaucuacaccgcgaaguaccccaacuccagcgaccuggaccggcugucccagagccacccgauccucaacaugguggacaccaagaaguccagccugaacaucagcggguacaacuucucccugggcgccgccgucaaggccggggccugcaugcucgacggcggcaacaugcuggagaccaucaaggugacgccccagaccauggacgggauccucaagagcauccugaaggugaagcgcucccugggcauguucgucagcgacacccccggggagcggaaccccuacgagaacauccuguacaagaucugccucuccggcgacggguggccguacaucgcgagccgcaccuccaucgugggccgggccugggagaacacgaccguggaccuggagagcgacggcaagccccagaaggucggguccgccggcagcaacaagucccugcagagcgccggguuccccaccggccucaccuacucccagcugaugacgcugaaggacagcaugaugcagcuggaccccuccgccaagaccuggaucgacaucgaggggcgcccggaggaccccguggagaucgcgcucuaccagcccaugagcggcugcuacauccacuucuuccgggagcccaccgaccugaagcaguucaagcaggacgccaaguacucccacggcaucgacgucaccgaccuguucagcgcccagccggggcucacgagcgccgugaucgaggcccugccccgcaacauggugcugaccugccagggcuccgacgacaucaagaagcuccuggacagccaggggcggcgcgacaucaagcugaucgacaucucccucggcaaggcggacagccgccgguucgagaacgccgucugggaccagugcaaggaccugugccacaugcacaccggggugguggucgagaagaagaagcgcggcggcaaggaggagaucacgccccacugcgcccugauggacugcaucauguucgacgccgccguguccgggggccucaacauccccauccugcgggcggugcugccgcgcgacauggucuuccggaccagcucccccaagguggugcucuga

SEQ ID NO: 8087 - RNA, 1710 nt, Artificial Sequence
  derived and/or modified CDS sequence (opt1) from LASV(ISTH2129-NIG-2012;Clade II)__AIT17545__NP
augagcgccuccaaggaggugaaguccuuccuguggacccagagccuccgccgggagcugagcggcuacugcuccaacaucaagcugcaggucgugaaggacgcccaggcgcuccugcacgggcuggacuucagcgagguguccaacguccagcgccucaugcggaagcagaagcgcgacgacagcgaccugaagcggcugcgcgaccucaaccaggccgugaacaaccugguggagcugaaguccacccagcagaaguccguccuccgggugggcacgcugaccagcgacgaccugcucacccuggccgccgaccuggagaagcucaagagcaaggugauccgcaccgagcggccccuguccagcggggucuacaugggcaaccuguccacgcagcagcucgagcagcgccgggcccugcugaacaugaucgggauggugggcggcgcgcaggggacccagccgggccgcgacggggugguccgggugugggacgugaagaaccccgaccuccugaacaaccaguucggcaccaugcccagccugacccucgccugccugacgaagcaggggcaggucgaccugaacgacgccgugcucgcccugaccgaccugggccucaucuacaccgcgaaguaccccaacuccagcgaccuggaccgccugucccagagccacccgauccucaacaugguggacaccaagaaguccagccugaacaucagcggcuacaacuucucccugggggccgccgucaaggccggcgccugcaugcucgacgggggcaacaugcuggagacgaucaaggugacgccccagaccauggacggcauccucaagagcauccugaaggugaagaagucccuggggauguucgucagcgacacccccggcgagcggaaccccuacgagaacauccuguacaagaucugccucuccggggacggcuggccguacaucgcgagccgcaccuccaucguggggcgggccugggagaacaccaccguggaccuggagagcgacggcaagccccagaaggucggcaucgccggguccaacaagagccugcaguccgccggcuuccccaccgggcucacguacagccagcugaugacccugaaggacuccaugaugcagcuggaccccagcgccaagaccuggaucgacaucgagggccgcccggaggaccccguggagaucgcgcucuaccagcccauguccgggugcuacauccacuucuuccgggagcccaccgaccugaagcaguucaagcaggacgccaaguacagccacggcaucgacgucgccgaccuguucuccgcccagccgggccucacgagcgccgugaucgaggcgcugccccgcaacauggugcugaccugccaggggagcgacgacaucaagcggcuccuggacucccagggccgccgcgacaucaagcugaucgacaucgcccucagcaaggccgacucccggaaguucgagaacgccgucugggaccagugcaaggaccugugccacaugcacaccggggugguggucgagaagaagaagcgcggcgggaaggaggagaucacgccccacugcgcccugauggacugcaucauguacgacgcggccgugagcggcggccucgacauccccgugcugcgggccguccugccgcgcgacaugguguuccggaccuccagccccaaggugguccucuga

SEQ ID NO: 8088 - RNA, 1710 nt, Artificial Sequence
  derived and/or modified CDS sequence (opt1) from LASV(ISTH2217-NIG-2012;Clade II)__AIT17549__NP
augagcgccuccaaggaggugaaguccuuccuguggacccagagccuccgccgggagcugagcggcuacugcuccaacaucaagcugcaggucgugaaggacgcccaggcgcuccugcacgggcuggacuucagcgagguguccaacguccagcgccucaugcggaagcagaagcgcgacgacagcgaccugaagcggcugcgcgaccucaaccaggccgugaacaaccugguggagcugaaguccacccagcagaaguccauccuccgggucggcacgcugaccagcgacgaccugcucacccuggccgccgaccuggagaagcucaagagcaaggugauccgcaccgagcggccccuguccagcgggguguacaugggcaaccuguccacgcagcagcucgagcagcgccgggcccugcugaacaugaucgggauggucggcggcgcgcaggggacccagccgggccgcgacgggguggugcgggucugggacgugaagaaccccgaccuccugaacaaccaguucggcaccaugcccagccugacccucgccugccugacgaagcagggccagguggaccugaacgacgucgugcucgcccugaccgaccuggggcucaucuacaccgccaaguaccccaacuccagcgaccuggaccgccugucccagagccacccgauccucaacaugguggacaccaagaaguccagccugaacaucagcggcuacaacuucucccugggggcggccgucaaggccggcgccugcaugcucgacgggggcaacaugcuggagacgaucaaggugacgccccagaccauggacggcauccucaagagcauccugaaggugaagaagucccuggggauguucgucagcgacacccccggcgagcggaaccccuacgagaacauccuguacaagaucugccucuccggggacggcuggccguacaucgccagccgcaccuccaucguggggcgggcgugggagaacaccaccguggaccuggagagcgacggcaagccccagaaggucggcaccgugggguccaacaagagccugcaguccgccggcuuccccacggggcucaccuacagccagcugaugacccugaaggacuccaugaugcagcuggaccccagcgccaagaccuggaucgacaucgagggccgcccggaggaccccgucgagaucgcccucuaccagcccauguccgggugcuacauccacuucuuccgggagcccacggaccugaagcaguucaagcaggacgccaaguacagccacggcaucgacguggcggaccuguucccggcccagcccggccucaccuccgccgugaucgaggcccugccccgcaacaugguccugaccugccaggggagcgacgacaucaagaagcuccuggacagccagggccggcgcgacaucaagcugaucgacaucgcccucuccaaggcggacagccgcaaguucgagaacgccgugugggaccagugcaaggaccugugccacaugcacaccgggguggucguggagaagaagaagcggggcgggaaggaggagaucacgccccacugcgcccugauggacugcaucauguacgacgccgccguguccggcggccucaacaucccgguccugcgcgcggugcugccccgggacaugguguuccgcaccagcucccccaaggucgugcucuga

SEQ ID NO: 8089 - RNA, 1710 nt, Artificial Sequence
  derived and/or modified CDS sequence (opt1) from LASV(ISTH2271-NIG-2012;Clade II)__AIT17553__NP
augagcgccuccaaggaggugaaguccuuccuguggacccagagccuccgccgggagcugagcggcuacugcuccagcaucaagcugcaggucgugaaggacgcccaggcgcuccugcacgggcuggacuucuccgaggugagcaacguccagcgccucaugcggaagcagaagcgcgacgacuccgaccugaagcggcugcgcgaccucaaccaggccgugaacaaccugguggagcucaagagcacccagcagaaguccauccugcgggucggcacgcugaccagcgacgaccugcucacccuggccgccgaccuggagaagcucaaguccaaggugauccgcaccgagcggccccugagcuccgggguguacaugggcaaccugagcacgcagcagcucgagcagcgccgggcccugcugaacaugaucgggauggucggcggcgcgcaggggacccagccgggccgcgacgggguggugcgggucugggacgugaagaaccccgaccuccugaacaaccaguucggcaccaugcccucccugacccucgccugccugacgaagcagggccagguggaccugaacgacgccguccucgcccugaccgaccuggggcucaucuacaccgcgaaguaccccaacagcuccgaccuggaccgccugagccagagccacccgauccucaacaugguggacaccaagaaguccagccugaacaucuccggcuacaacuucagccugggggccgccgugaaggccggcgccugcaugcucgacgggggcaacaugcuggagacgaucaaggucacgccccagaccauggacggcauccugaaguccauccucaaggugaagcggagccuggggauguucguguccgacacccccggcgagcgcaaccccuacgagaacauccuguacaagaucugccucagcggggacggcuggccguacaucgcgucccggaccagcaucgucgggcgcgccugggagaacaccaccguggaccuggaguccgacggcaagccccagaagaugggcaccgccgggagcaacaagucccugcagagcgccggcuuccccacggggcucaccuacucccagcugaugacccugaaggacagcaugaugcagcuggaccccuccgccaagaccuggaucgacaucgagggccggccggaggaccccguggagaucgcgcucuaccagcccaugagcgggugcuacauccacuucuuccgcgagcccacggaccugaagcaguucaagcaggacgccaaguacucccacggcaucgacgucgccgaccuguucccggcccagcccggccucaccagcgccgugaucgaggcgcugccccggaacaugguccugaccugccaggggagcgacgacaucaagaagcuccuggacucccagggccgccgcgacaucaagcugaucgacaucgcccucagcaaggccgacucccggcgcuucgagaacgccgugugggaccagugcaaggaccugugccacaugcacaccgggguggucguggagaagaagaagcggggcgggaaggaggagaucacgccccacugcgcccugauggacugcaucauguacgacgcggccgugagcggcggccucaacaucccgguccugcgcgccgugcugccccgggacaugguguuccgcaccuccagccccaaggucgugcucuga

SEQ ID NO: 8090 - RNA, 1710 nt, Artificial Sequence
  derived and/or modified CDS sequence (opt1) from LASV(ISTH2312-NIG-2012;Clade II)__AIT17561__NP
augagcgccuccaaggaggugaaguccuuccuguggacccagagccuccgccgggagcugagcggcuacugcuccaacaucaagcugcaggucgugaaggacgcccaggcgcuccugcacgggcuggacuucagcgagguguccaacguccagcgccucaugcggaagcagaagcgcgacgacagcgaccugaagcggcugcgcgaccucaaccaggccgugaacaaccugguggagcugaaguccacccagcagaaguccauccuccgggucggcacgcugaccagcgacgaccugcucacccuggccgccgaccuggagaagcucaagagcaaggugauccgcaccgagcggccccuguccagcgggguguacaugggcaaccuguccacgcagcagcucgagcagcgccgggcccugcugaacaugaucgggauggucggcggcgcgcaggggacccagccgggccgcgacgggguggugcgggucugggacgugaagaaccccgaccuccugaacaaccaguucggcaccaugcccagccugacccucgccugccugacgaagcagggccagguggaccugaacgacgccguccucgcccugaccgaccuggggcucaucuacaccgcgaaguaccccaacuccagcgaccuggaccgccugucccagagccacccgauccucaacaugguggacaccaagaaguccagccugaacaucagcggcuacaacuucucccugggggccgccgugaaggccggcgccugcaugcucgacgggggcaacaugcuggagacgaucaaggucacgccccagaccaucgacggcauccucaagagcauccugaaggugaagaagucccuggggauguucgugagcgacacccccggcgagcggaaccccuacgagaacauccuguacaagaucugccucuccggggacggcuggccguacaucgcgagccgcaccuccaucgucgggcgggccugggagaacaccaccguggaccuggagagcgacggcaagccccagaaggugggcaccgucggguccaacaagagccugcaguccgccggcuuccccacggggcucaccuacagccagcugaugacccugaaggacuccaugaugcagcuggaccccagcgccaagaccuggaucgacaucgagggccgcccggaggaccccguggagaucgcccucuaccagcccauguccgggugcuacauccacuucuuccgggagcccacggaccugaagcaguucaagcaggacgcgaaguacagccacggcaucgacgucgccgaccuguucccggcccagcccggccucaccuccgccgugaucgaggcccugccccgcaacauggugcugaccugccaggggagcgacgacaucaagcggcuccuggacagccagggccgccgcgacaucaagcugaucgacaucgcgcucuccaaggccgacagccggcgcuucgagaacgccgucugggaccagugcaaggaccugugccacaugcacaccggggugguggucgagaagaagcggcgcggcgggaaggaggagaucacgccccacugcgcccugauggacugcaucauguacgacgccgcgguguccggcggccucaacaucccggugcugcgggccguccugccccgcgacaugguguuccggaccagcucccccaaggugguccucuga

SEQ ID NO: 8091 - RNA, 1710 nt, Artificial Sequence
  derived and/or modified CDS sequence (opt1) from LASV(ISTH2316-NIG-2012;Clade II)__AIT17565__NP
augagcgccuccaaggagaucaagagcuuccuguggacccagucccuccgccgggagcugagcggcuacugcuccagcaucaagcuccagguggucaaggacgcccaggcgcugcugcacgggcuggacuucuccgaggugagcaacgugcagcgccucaugcggaagcagaagcgcgacgacuccgaccugaagcggcugcgcgaccucaaccaggccgucaacaaccugguggagcucaagagcacccagcagaaguccauccugcgggugggcacgcugaccagcgacgaccugcucacccuggccgccgaccuggagaagcucaaguccaaggucauccgcaccgagcggccccugagcuccgggguguacaugggcaaccugagcacgcagcagcucgagcagcgccgggcccugcugaacaugaucgggauggugggcggcgcgcaggggacccagccgggccgcgacggggucgugcgggugugggacgucaagaaccccgaccuccugaacaaccaguucggcaccaugcccucccugacccucgccugccugacgaagcagggccagguggaccugaacgacgccgugcucgcccugaccgaccuggggcucaucuacaccgcgaaguaccccaacagcuccgaccuggaccgccugagccagagccacccgauccucaacauggucgacaccaagaaguccagccugaacaucuccggcuacaacuucagccugggggccgccgugaaggccggcgccugcaugcucgacgggggcaacaugcuggagacgaucaaggugacgccccagaccauggacggcauccugaaguccauccucaaggucaagcggagccuggggauguucguguccgacgcgcccggcgagcgcaaccccuacgagaacauccuguacaagaucugccucagcggggacggcuggccguacaucgccucccggaccagcaucguggggcgcgccugggagaacaccaccgucgaccuggaguccgacggcaagccccagaaggugggcaccgccgggagcaacaagucccugcagagcgccggcuuccccaccgggcucacguacucccagcugaugacccugaaggacagcaugaugcagcuggaccccuccgcgaagaccuggaucgacaucgagggccggccggaggaccccguggagaucgcccucuaccagcccaugagcgggugcuacauccacuucuuccgcgagcccaccgaccugaagcaguucaagcaggacgccaaguacucccacggcaucgacgucgccgaccuguucccggcccagcccggccucacgagcgcggugaucgaggcccugccccggaacaugguccugaccugccaggggagcgacgacaucaagcgccuccuggacucccagggccgccgggacaucaagcugaucgacaucgcccucagcaaggccgacucccgcaaguucgagaacgccgugugggaccagugcaaggaccugugccacaugcacaccgggguggucguggagaagaagaagcggggcgggaaggaggagaucacgccccacugcgcgcugauggacugcaucauguacgacgccgccgugagcggcggccucaacaucccgguccugcgcgccgugcugccccgggacaugguguuccgcaccuccagccccaaggucgugcucuga

SEQ ID NO: 8092 - RNA, 1710 nt, Artificial Sequence
  derived and/or modified CDS sequence (opt1) from LASV(ISTH2334-NIG-2012;Clade II)__AIT17569__NP
augagcgccuccaaggaggugaaguccuuccuguggacccagagccuccgccgggagcugagcggcuacugcuccaacaucaagcugcaggucgugaaggacgcccaggcgcuccugcacgggcuggacuucagcgagguguccaacguccagcgccucaugcggaagcagaagcgcgacgacagcgaccugaagcggcugcgcgaccucaaccaggccgugaacaaccugguggagcugaaguccacccagcagaaguccauccuccgggucggcacccugaccagcgacgaccugcucacccuggccgccgaccuggagaagcucaagagcaaggugauccgcaccgagcggccccuguccagcgggguguacaugggcaaccuguccacgcagcagcucgagcagcgccgggcccugcugaacaugaucgggauggucggcggcgcgcaggggacccagccgggccgcgacgggguggugcgggucugggacgugaagaaccccgaccuccugaacaaccaguucggcaccaugcccagccugacccucgccugccugacgaagcagggccagguggaccugaacgacgccguccucgcccugaccgaccuggggcucaucuacaccgcgaaguuccccaacuccagcgaccuggaccgccugucccagagccacccgauccucaacaugguggacaccaagaaguccagccugaacaucagcggcuacaacuucucccugggggccgccgugaaggccggcgccugcaugcucgacgggggcaacaugcuggagacgaucaaggucacgccccagaccauggacggcauccucaagagcauccugaaggugaagaagucccuggggauguucgugagcgacacccccggcgagcggaaccccuacgagaacauccuguacaagaucugccucuccggggacggcuggccguacaucgcgagccgcaccuccaucgucgggcgggccugggagaacaccaccguggaccuggagagcgacggcaagccccagaaggugggcaccacgggguccaacaagagccugcaguccgccggcuuccccaccgggcucaccuacagccagcugaugacccugaaggacuccaugaugcagcuggaccccagcgccaagacguggaucgacaucgagggccgcccggaggaccccgucgagaucgcccucuaccagcccauguccgggugcuacauccacuucuuccgggagcccaccgaccugaagcaguucaagcaggacgcgaaguacagccacggcaucgacguggccgaccuguucccggcccagcccggccucaccuccgccgucaucgaggcccugccccgcaacauggugcugaccugccaggggagcgacgacaucaagcggcuccuggacagccagggccgccgcgacaucaagcugaucgacaucgcgcucuccaaggccgacagccggcgcuucgagaacgccgugugggaccagugcaaggaccugugccacaugcacacgggggucgugguggagaagaagaagcggggcgggaaggaggagaucacgccccacugcgcccugauggacugcaucauguacgacgccgcggucuccggcggccucaaccugccggugcugcgcgccgugcucccccgggacauggucuuccgcaccagcucccccaagguggugcuguga

SEQ ID NO: 8093 - RNA, 1710 nt, Artificial Sequence
  derived and/or modified CDS sequence (opt1) from LASV(ISTH2358-NIG-2012;Clade II)__AIT17573__NP
augagcgccuccaaggaggugaaguccuuccuguggacccagagccuccgccgggagcugagcggcuacugcuccaacaucaagcugcaggucgugaaggacgcccaggcgcuccugcacgggcuggacuucagcgagguguccaacguccagcgccucaugcggaagcagaagcgcgacgacagcgaccugaagcggcugcgcgaccucaaccaggccgugaacaaccugguggagcugaaguccacccagcagaaguccauccuccgggucggcacgcugaccagcgacgaccugcucacccuggccgccgaccuggagaagcucaagagcaaggugauccgcaccgagcggccccuguccagcgggguguacaugggcaaccuguccacgcagcagcucgagcagcgccgggcccugcugaacaugaucgggauggucggcggcgcgcaggggacccagccgggccgcgacgggguggugcgggucugggacgugaagaaccccgaccuccugaacaaccaguucggcaccaugcccagccugacccucgccugccugacgaagcagggccagguggaccugaacgacgccguccucgcccugaccgaccuggggcucaucuacaccgcgaaguaccccaacuccagcgaccuggaccgccugucccagagccacccgauccucaacaugguggacaccaagaaguccagccugaacaucagcggcuacaacuucucccugggggccgccgugaaggccggcgccugcaugcucgacgggggcaacaugcuggagacgaucaaggucacgccccagaccauggacggcauccucaagagcauccugaaggugaagaagucccuggggauguucgugagcgacacccccggcgagcggaaccccuacgagaacauccuguacaagaucugccucuccggggacggcuggccguacaucgcgagccgcaccuccaucgucgggcgggccugggagaacaccaccguggaccuggagagcgacggcaagccccagaaggugggcaccgccggguccaacaagagccugcaguccgccggcuuccccacggggcucaccuacagccagcugaugacccugaaggacuccaugaugcagcuggaccccagcgccaagaccuggaucgacaucgagggccgcccggaggaccccgucgagaucgcgcucuaccagcccauguccgggugcuacauccacuucuuccgggagcccacggaccugaagcaguucaagcaggacgccaaguacagccacggcaucgacaucgccgaccuguucccggcccagcccggccucaccuccgccgugaucgaggcgcugccccgcaacaugguccugaccugccaggggagcgacgacaucaagcggcuccuggacagccagggccgccgcgacaucaagcugaucgacaucgcccucuccaaggccgacagccggcgcuucgagaacgccgugugggaccagugcaaggaccugugccacaugcacaccgggguggucguggagaagaagaagcggggcgggaaggaggagaucacgccccacugcgcccugauggacugcaucauguacgacgcggccguguccggcggccucaacaucccgguccugcgcgccgugcugccccgggacaugguguuccgcaccagcucccccaaggucgugcucuga

SEQ ID NO: 8094 - RNA, 1710 nt, Artificial Sequence
  derived and/or modified CDS sequence (opt1) from LASV(ISTH2376-NIG-2012;Clade II)__AIT17577__NP
augagcgccuccaaggaggugaaguccuuccuguggacccagagccuccgccgggagcugagcggcuacugcuccagcaucaagcugcaggucgugaaggacgcccaggcgcuccugcacgggcuggacuucuccgaggugagcaacguccagcgccucaugcggaagcagaagcgcgacgacuccgaccugaagcggcugcgcgaccucaaccaggccgugaacaaccugguggagcucaagagcacccagcagaaguccauccugcgggucggcacgcugaccagcgacgaccugcucacccuggccgccgaccuggagaagcucaaguccaaggugauccgcaccgagcggccccugagcuccgggguguacaugggcaaccugagcacgcagcagcucgagcagcgccgggcccugcugaacaugaucgggauggucggcggcgcgcaggggacccagccgggccgcgacgggguggugcgggucugggacgugaagaaccccgaccuccugaacaaccaguucggcaccaugcccucccugacccucgccugccugacgaagcagggccagguggaccugaacgacgccguccucgcccugaccgaccuggggcucaucuacaccgcgaaguaccccaacagcuccgaccuggaccgccugagccagagccacccgauccucaacaugguggacaccaagaaguccagccugaacaucuccggcuacaacuucagccugggggccgccgugaaggccggcgccugcaugcucgacgggggcaacaugcuggagacgaucaaggucacgccccagaccauggacggcauccugaaguccauccucaaggugaagcggagccuggggauguucguguccgacacccccggcgagcgcaaccccuacgagaacauccuguacaagaucugccucagcggggacggcuggccguacaucgcgucccggaccagcaucgccgggcgcgccugggagaacaccaccgucgaccuggaguccgacggcaagccccagaaggugggcgccgccgggagcaacaagucccugcagagcgcgggcuuccccaccgggcucacguacucccagcugaugacccugaaggacagcaugaugcagcuggaccccuccgccaagaccuggaucgacaucgagggccggccggaggaccccguggagaucgcccucuaccagcccaugagcgggugcuacauccacuucuuccgcgagcccaccgaccugaagcaguucaagcaggacgccaaguacucccacggcaucgacgucgccgaccuguucccggcgcagcccggccucacgagcgccgugaucgaggcccugccccggaacaugguccugaccugccaggggagcgacgacaucaagcgccuccuggacucccagggccgccgggacaucaagcugaucgacaucgcccucagcaaggccgacucccgccgguucgagaacgcggugugggaccagugccgcgaccugugccacaugcacaccgggguggucguggagaagaagaagcggggcgggaaggaggagaucacgccccacugcgcccugauggacugcaucauguacgacgccgccgugagcggcggccucaacaucccgguccugcgcgcggugcugccccgggacaugguguuccgcaccuccagccccaaggucgugcucuga

SEQ ID NO: 8095 - RNA, 1710 nt, Artificial Sequence
  derived and/or modified CDS sequence (opt1) from LASV(Lassa virus/H.sapiens-wt/NGA/2015/ISTH_0543;Clade II)__AVO03640__NP
augagcgccuccaaggaggugaaguccuuccuguggacccagagccuccgccgggagcugagcggcuacugcuccaacaucaagcugcaggucgugaaggacgcccaggcgcuccugcacgggcuggacuucagcgagguguccaacguccagcgccucaugcggaagcagaagcgcgacgacagcgaccugaagcggcugcgcgaccucaaccaggccgugaacaaccugguggagcugaaguccacccagcagaaguccauccuccgggucggcacgcugaccagcgacgaccugcucacccuggccgccgaccuggagaagcucaagagcaaggugauccgcaccgagcggccccuguccagcgggguguacaugggcaaccuguccacgcagcagcucgagcagcgccgggcccugcugaacaugaucgggauggucggcggcgcgcaggggacccagccgggccgcgacgggguggugcgggucugggacgugaagaaccccgaccuccugaacaaccaguucggcaccaugcccagccugacccucgccugccugacgaagcagggccagguggaccugaacgacgccguccucgcccugaccgaccuggggcucaucuacaccgcgaaguaccccaacuccagcgaccuggaccgccugucccagagccacccgauccucaacaugguggacaccaagaaguccagccugaacaucagcggcuacaacuucucccugggggccgccgugaaggccggcgccugcaugcucgacgggggcaacaugcuggagacgaucaaggucacgccccagaccauggacggcauccucaagagcauccugaaggugaagaagucccuggggauguucgugagcgacacccccggcgagcggaaccccuacgagaacauccuguacaagaucugccucuccggggacggcuggccguacaucgcgagccgcaccuccaucgucgggcgggccugggagaacaccaccguggaccuggagagcgacggcaagccccagaaggugggcuccgccgggagcaacaagucccugcagagcgccggcuuccccaccgggcucacguacucccagcugaugacccugaaggacagcaugaugcagcuggaccccuccgccaagaccuggaucgacaucgagggccgcccggaggaccccgucgagaucgcgcucuaccagcccaugagcgggugcuacauccacuucuuccgggagcccaccgaccugaagcaguucaagcaggacgccaaguacucccacggcaucgacguggccgaccuguucccggcccagcccggccucacgagcgccgucaucgaggcgcugccccgcaacauggugcugaccugccaggggagcgacgacaucaagcggcuccuggacucccagggccgcaaggacaucaagcugaucgacaucgcccucagcaaggccgacucccgccgguucgagaacgccgugugggaccagugcaaggaccugugccacaugcacaccggggucgugguggagaagaagaagcgcggcgggaaggaggagaucacgccccacugcgcccugauggacugcaucauguacgacgcggccgucagcggcggccucaacaucccggugcugcgggccgugcugccccgcgacauggucuuccggaccuccagccccaagguggugcucuga

SEQ ID NO: 8096 - RNA, 1710 nt, Artificial Sequence
  derived and/or modified CDS sequence (opt1) from LASV(Lassa virus/H.sapiens-wt/NGA/2015/ISTH_0547;Clade II)__AVO03584__NP
augagcgccuccaaggaggugaaguccuuccuguggacccagagccuccgccgggagcugagcggcuacugcuccagcaucaagcugcaggucgugaaggacgcccaggcgcuccugcacgggcuggacuucuccgaggugagcaacguccagcgccucaugcggaagcagaagcgcgacgacuccgaccugaagcggcugcgcgaccucaaccaggccgugaacaaccugguggagcucaagagcacccagcagaaguccauccugcgggucggcacgcugaccagcgacgaccugcucacccuggccgccgaccuggagaagcucaaguccaaggugauccgcaccgagcggccccugagcuccgggguguacaugggcaaccugagcacgcagcagcucgagcagcgccgggcccugcugaacaugaucgggauggucggcggcgcgcaggggacccagccgggccgcgacgggguggugcgggucugggacgugaagaaccccgaccuccugaacaaccaguucggcaccaugcccucccugacccucgccugccugacgaagcagggccagguggaccugaacgacgccguccucgcccugaccgaccuggggcucaucuacaccgcgaaguaccccaacagcuccgaccuggaccgccugagccagagccacccgauccucaacaugguggacaccaagaaguccagccugaacaucuccggcuacaacuucagccugggggccgccgugaaggccggcgccugcaugcucgacgggggcaacaugcuggagacgaucaaggucacgccccagaccauggacggcauccugaaguccauccucaaggugaagcggagccuggggauguucguguccgacacccccggcgagcgcaaccccuacgagaacauccuguacaagaucugccucagcggggacggcuggccguacaucgcgucccggaccagcaucgucgggcgcgccugggagaacaccaccguggaccuggaguccgacggcaagccccagaaggugggcgucgccgggagcaacaagucccugcagagcgccggcuuccccaccgggcucacguacucccagcugaugacccugaaggacagcaugaugcagcuggaccccuccgccaagaccuggaucgacaucgagggccggccggaggaccccguggagaucgcgcucuaccagcccaugagcgggugcuacauccacuucuuccgcgagcccaccgaccugaagcaguucaagcaggacgccaaguacucccacggcaucgacgucgccgaccuguucccggcccagcccggccucacgagcgccgugaucgaggcgcugccccggaacauggugcugaccugccaggggagcgacgacaucaagcgccuccuggacucccagggccgccgggacaucaagcugaucgacaucgcccucagcaaggccgacucccgccgguucgagaacgccgucugggaccagugcaaggaccugugccacaugcacaccggggugguggucgagaagaagaagcgcggcgggaaggaggagaucacgccccacugcgcccugauggacugcaucauguacgacgcggccgugagcggcggccucaacaucccggugcugcgggccguccugccccgcgacaugguguuccggaccuccagccccaaggugguccucuga

SEQ ID NO: 8097 - RNA, 1710 nt, Artificial Sequence
  derived and/or modified CDS sequence (opt1) from LASV(Lassa virus/H.sapiens-wt/NGA/2015/ISTH_0574;Clade II)__AVO03658__NP
augagcgccuccaaggaggugaaguccuuccuguggacccagagccuccgccgggagcugagcggcuacugcuccaacaucaagcugcaggucgugaaggacgcccaggcgcuccugcacgggcuggacuucagcgagguguccaacguccagcgccucaugcggaagcagaagcgcgacgacagcgaccugaagcggcugcgcgaccucaaccaggccgugaacaaccugguggagcugaaguccacccagcagaaguccauccuccgggucggcacccugaccagcgacgaccugcucacccuggccgccgaccuggagaagcucaagagcaaggugauccgcaccgagcggccccuguccagcgggguguacaugggcaaccuguccacgcagcagcucgagcagcgccgggcccugcugaacaugaucgggauggucggcggcacccaggggacccagccgggccgcgacgggguggugcgggucugggacgugaagaaccccgaccuccugaacaaccaguucggcaccaugcccagccugacgcucgcgugccugaccaagcagggccagguggaccugaacgacgccguccucgcccugaccgaccuggggcucaucuacaccgccaaguaccccaacuccagcgaccuggaccgccugucccagagccacccgauccucaacaugguggacacgaagaaguccagccugaacaucagcggcuacaacuucucccugggggcggccgugaaggccggcgccugcaugcucgacgggggcaacaugcuggagaccaucaaggucacgccccagaccauggacggcauccucaagagcauccugaaggugaagaagucccuggggauguucgugagcgacacccccggcgagcggaaccccuacgagaacauccuguacaagaucugccucuccggggacggcuggccguacaucgccagccgcaccuccaucgucgggcgggcgugggagaacaccaccguggaccuggagagcgagggcaagccccagaaggugggcacggccggguccaacaagagccugcaguccgccggcuuccccaccgggcucaccuacagccagcugaugacccugaaggacuccaugaugcagcuggaccccagcgccaagacguggaucgacaucgagggccgcccggaggaccccgucgagaucgcccucuaccagcccauguccgggugcuacauccacuucuuccgggagcccaccgaccugaagcaguucaagcaggacgcgaaguacagccacggcaucgacguggccgaccuguucccggcccagcccggccucaccuccgccgucaucgaggcccugccccgcaacauggugcugaccugccaggggagcgacgacaucaagcggcuccuggacagccagggccgccgcgacaucaagcugaucgacaucucccucagcaaggcggacucccggcgcuucgagaacgccgugugggaccagugcaaggaccugugccacaugcacacgggggucgugguggagaagaagaagcggggcgggaaggaggagaucacgccccacugcgcccugauggacugcaucauguacgacgccgccgucagcggcggccucaacaucccggugcugcgcgcggugcugccccgggacauggucuuccgcaccuccagccccaagguggugcucuga

SEQ ID NO: 8098 - RNA, 1710 nt, Artificial Sequence
  derived and/or modified CDS sequence (opt1) from LASV(Lassa virus/H.sapiens-wt/NGA/2015/ISTH_0682;Clade II)__AVO03626__NP
augagcgccuccaaggaggugaaguccuuccuguggacccagagccuccgccgggagcugagcggcuacugcuccagcaucaagcugcaggucgugaaggacgcccaggcgcuccugcacgggcuggacuucuccgaggugagcaacguccagcgccucaugcggaagcagaagcgcgacgacuccgaccugaagcggcugcgcgaccucaaccaggccgugaacaaccugguggagcucaagagcacccagcagaaguccguccugcgggugggcacccugaccagcgacgaccugcucacccuggccgccgaccuggagaagcucaaguccaaggugauccgcaccgagcggccccugagcuccggggucuacaugggcaaccugagcacgcagcagcucgagcagcgccgggcccugcuguccaugaucgggauggugggcggcacccaggggacccagccgggccgcgacggggugguccgggugugggacgugaagaaccccgaccuccugaacaaccaguucggcaccaugcccagccugacgcucgcgugccugaccaagcaggggcaggucgaccugaacgacgccgugcucgcccugaccgaccugggccucaucuacaccgccaaguaccccaacuccagcgaccuggaccgccugagccagucccacccgauccucaacaugguggacacgaagaaguccagccugaacaucagcggcuacaacuucucccugggggcggccgucaaggccggcgccugcaugcucgacgggggcaacaugcuggagaccaucaaggugacgccccagaccauggacggcauccucaagagcauccugaaggugaagaagucccuggggauguucgucagcgacacccccggcgagcggaaccccuacgagaacauccuguacaagaucugccucuccggggacggcuggccguacaucgccagccgcaccuccaucguggggcgggcgugggagaacaccaccguggaccuggagagcaacggcaagccccagaaggucggcacggccggguccaacaagagccugcaguccgccggcuuccccaccgggcucaccuacagccagcugaugacccugaaggacuccaugaugcagcuggaccccagcgccaagacguggaucgacaucgagggccgcccggaggaccccguggagaucgcccucuaccagcccauguccgggugcuacauccacuucuuccgggagcccaccgaccugaagcaguucaagcaggacgcgaaguacagccacggcaucgacgucgccgaccuguucccggcccagcccggccucaccagcgccgugaucgaggcccugccccgcaacauggugcugaccugccagggguccgacgacaucaagcggcuccuggacagccagggccgccgcgacaucaagcugaucgacaucucccucagcaaggcggacucccggaaguucgagaacgccgucugggaccagugcaaggaccugugccacaugcacacgggggugguggucgagaagaagaagcgcggcgggaaggaggagaucacgccccacugcgcccugauggacugcaucauguacgacgccgccgugagcggcggccucaacaucccggugcugcgggcgguccugccccgcgacaugguguuccggaccuccagccccaaggugguccucuga

SEQ ID NO: 8099 - RNA, 1710 nt, Artificial Sequence
  derived and/or modified CDS sequence (opt1) from LASV(Lassa virus/H.sapiens-wt/NGA/2015/ISTH_0687;Clade II)__AVO03582__NP
augagcgccuccaaggaggugaaguccuuccuguggacccagagccuccgccgggagcugagcggcuacugcuccagcaucaagcugcaggucgugaaggacgcccaggcgcuccugcacgggcuggacuucuccgaggugagcaacguccagcgccucaugcggaagcagaagcgcgacgacuccgaccugaagcggcugcgcgaccucaaccaggccgugaacaaccugguggagcucaagagcacccagcagaaguccauccugcgggucggcacgcugaccagcgacgaccugcucacccuggccgccgaccuggagaagcucaaguccaaggugauccgcaccgagcggccccugagcuccgggguguacaugggcaaccugagcacgcagcagcucgagcagcgccgggcccugcugaacaugaucgggauggucggcggcgcgcaguccacccagccggggcgcgacggcguggugcgggucugggacgugaagaaccccgaccuccugaacaaccaguucgggaccaugcccagccugacccucgccugccugacgaagcagggccagguggaccugaacgacgccguccucgcccugaccgaccuggggcucaucuacaccgcgaaguaccccaacuccagcgaccuggaccgccugagccagucccacccgauccucaacaugguggacaccaagaaguccagccugaacaucagcggcuacaacuucucccugggcgccgccgugaaggccggggccugcaugcucgacggcgggaacaugcuggagacgaucaaggucacgccccagaccauggacggcauccucaagagcauccugaaggugaagcggucccugggcauguucgugagcgacacccccggggagcgcaaccccuacgagaacauccuguacaagaucugccucuccggcgacggguggccguacaucgcgagccggaccuccaucgucggccgcgccugggagaacaccaccguggaccuggagagcgacgggaagccccagaaggugggcgccaccggcuccaacaagagccugcaguccgccggguuccccacgggccucaccuacagccagcugaugacccugaaggacuccaugaugcagcuggaccccagcgccaagaccuggaucgacaucgaggggcggccggaggaccccgucgagaucgcgcucuaccagcccaucuccggcugcuacauccacuucuuccgcgagcccacggaccugaagcaguucaagcaggacgccaaguacagccacgggaucgacguggccgaccuguucccggcccagcccggccucaccagcgccgucaucgaggcgcugccccggaacauggugcugaccugccagggcuccgacgacaucaagcgccuccuggacagccaggggcgccgggacaucaagcugaucgacaucgcccucuccaaggccgacagccgccgguucgagaacgccgugugggaccagugcaaggaccugugccacaugcacaccggcgucgugguggagaagaagaagcgcgggggcaaggaggagaucacgccccacugcgcccugauggacugcaucauguacgacgcggccgucuccgggggccucaacaucccggugcugcgggccgugcugccccgcgacauggucuuccggaccagcucccccaagguggugcucuga

SEQ ID NO: 8100 - RNA, 1710 nt, Artificial Sequence
  derived and/or modified CDS sequence (opt1) from LASV(Lassa virus/H.sapiens-wt/NGA/2015/ISTH_0736;Clade II)__AVO03574__NP
augagcgccuccaaggaggugaaguccuuccuguggacccagagccuccgccgggagcugagcggcuacugcuccaacaucaagcugcaggucgugaaggacgcccaggcgcuccugcacgggcuggacuucagcgagguguccaacguccagcgccucaugcggaagcagaagcgcgacgacagcgaccugaagcggcugcgcgaccucaaccaggccgugaacaaccugguggagcugaaguccacccagcagaaguccguccuccgggugggcacgcugaccagcgacgaccugcucacccuggccgccgaccuggagaagcucaagagcaaggugauccgcaccgagcggccccuguccagcggggucuacaugggcaaccuguccacgcagcagcucgagcaccgccgggcccugcugaacaugaucgggauggugggcggcgcgcaggggacccagccgggccgcgacggggugguccgggugugggacgugaagaaccccgaccuccugaacaaccaguucggcaccaugcccagccugacccucgccugccugacgaagcaggggcaggucgaccugaacgacgccgugcucgcccugaccgaccugggccucaucuacaccgcgaaguaccccaacuccagcgaccuggaccgccugucccagagccacccgauccucaacaugguggacaccaagaaguccagccugaacaucagcggcuacaacuucucccugggggccgccgucaaggccggcgccugcaugcucgacgggggcaacaugcuggagacgaucaaggugacgccccagaccauggacggcauccucaagagcauccugaaggugaagcggucccuggggauguucgucagcgacacccccggcgagcgcaaccccuacgagaacauccuguacaagaucugccucuccggggacggcuggccguacaucgcgagccggaccuccaucguggggcgcgccugggagaacaccaccguggaccuggagagcgacggcaagccccagaaggucggcaccgccggguccaacaagagccugcaguccgccggcuuccccacggggcucaccuacagccagcugaugacccugaaggacuccaugaugcagcuggaccccagcgccaagaccuggaucgacaucgagggccggccggaggaccccguggagaucgcgcucuaccagcccaucuccgggugcuacauccacuucuuccgcgagcccacggaccugaagcaguucaagcaggacgccaaguacagccacggcaucgacgucgccgaccuguucccggcccagcccggccucaccuccgccgugaucgaggcgcugccccggaacauggugcugaccugccaggggagcgacgacaucaagcgccuccuggacagccagggccgccgggacaucaagcugaucgacaucgcccucuccaaggccgacagccgccgguucgagaacgccgucugggaccagugcaaggaccugugccacaugcacaccggggugguggucgagaagaagaagcgcggcgggaaggaggagaucacgccccacugcgcccugauggacugcaucauguacgacgcggccguguccggcggccucaacaucccggugcugcgggccguccugccccgcgacaugguguuccggaccagcucccccaaggugguccucuga

SEQ ID NO: 8101 - RNA, 1710 nt, Artificial Sequence
  derived and/or modified CDS sequence (opt1) from LASV(Lassa virus/H.sapiens-wt/NGA/2015/ISTH_0789;Clade II)__AVO03552__NP
augagcgccuccaaggaggugaaguccuuccuguggacccagucccuccgccgggagcugagcggcuacugcuccaacaucaagcugcaggucgugaaggacgcccaggcgcuccugcacgggcuggacuucagcgagguguccaacguccagcgccucaugcggaagcagaagcgcgacgacggcgaccugaagcggcugcgcgaccucaaccaggccgugaacaaccugguggagcucaagagcacccagcagaaguccguccugcggguggggacgcugagcuccgacgaccugcucauccuggccgccgaccuggagaagcucaagagcaaggugauccgcaccgagcggccccuguccagcggcgucuacauggggaaccuguccagccagcagcucgaccagcgccgggcccugcugaacaugaucggcaugaccggcgggggccagggggcgaacgccggccgcgacgggaucgugcgggugugggacgucaagaacgccgagcuccugaacaaccaguucggcaccaugccgucccugacgcucgccugccugaccaagcagggccagguggaccugaacgacgcggugcaggcccucaccgaccuggggcugaucuacaccgccaaguaccccaacagcuccgaccucgaccgccugagccagagccaccccauccugaacaugaucgacacgaagaaguccagccucaacaucuccggcuacaacuucagccugggggccgccgucaaggcgggcgccugcaugcuggacggcgggaacaugcucgagaccaucaaggugagcccccagaccauggacggcauccucaagagcauccugaaggugaagcggucccuggggauguucgucagcgacgccccgggcgagcgcaaccccuacgagaacauccuguacaagaucugccuguccggggacggcuggcccuacaucgccagccggaccuccaucaucggccgcgccugggagaacacggugguggaccucgagagcgacaacaagccccagaagcuggggaacuccggcagcaaccggucccugcagagcgcgggguacccggccggccucaccuacucccagcugaugacccugaaggacagcaugcugcagcucgaccccaacgccaagaccuggauggacgucgaggggcgccccgacgaccccguggagaucgcccuguaccagccguccagcggcugcuacauccacuucuuccgggagcccacggaccugaagcaguucaagcaggacgccaaguacagccacggcaucgacgugggggaccucuucgcggcccagcccggccugaccuccgccgucaucgaggcccugccccgcaacauggugaucacgugccaggggagcgaggacaucaagaagcuccuggagucccagggccgcaaggacaucaagcuggucgacaucagcauguccaagcucgacagccggaaguucgagaacgccgugugggaccaguacaaggaccugugccacaugcacaccgggaucguggucgagaagaagaagcgcggcggcaaggaggagaucaccccgcacugcgcgcugauggacugcaucauguucgacgccgccguggucgggggccucgacgccaagauccugcgggcggugcugccccgcgacaugguguuccggaccuccacccccaaggugguccucuga

SEQ ID NO: 8102 - RNA, 1710 nt, Artificial Sequence
  derived and/or modified CDS sequence (opt1) from LASV(Lassa virus/H.sapiens-wt/NGA/2015/ISTH_0821;Clade II)__AVO03642__NP
augagcgccuccaaggaggugaaguccuuccuguggacccagagccuccgccgggagcugagcggcuacugcuccaacaucaagcugcaggucgugaaggacgcccaggcgcuccugcacgggcuggacuucagcgagguguccaacguccagcgccucaugcggaagcagaagcgcgacgacagcgaccugaagcggcugcgcgaccucaaccaggccgugaacaaccugguggagcugaaguccacccagcagaaguccauccuccgggucggcacgcugaccagcgacgaccugcucacccuggccgccgaccuggagaagcucaagagcaaggugauccgcaccgagcggccccuguccagcgggguguacaugggcaaccuguccacgcagcagcucgagcagcgccgggcccugcugaacaugaucgggauggucggcggcgcgcaggggacccagccgggccgcgacgggguggugcgggucugggacgugaagaaccccgaccuccugaacaaccaguucggcaccaugcccagccugacccucgccugccugacgaagcagggccagguggaccugaacgacgccguccucgcccugaccgaccuggggcucaucuacaccgcgaaguaccccaacuccagcgaccuggaccgccugucccagagccacccgauccucaacaugguggacaccaagaaguccagccugaacaucagcggcuacaacuucucccugggggccgccgugaaggccggcgccugcaugcucgacgggggcaacaugcuggagacgaucaaggucacgccccagaccauggacggcauccucaagagcauccugaaggugaagcggucccuggggauguucgugagcgacacccccggcgagcgcaaccccuacgagaacauccuguacaagaucugccucuccggggacggcuggccguacaucgcgagccggaccuccaucgucgggcgcgccugggagaacaccaccguggaccuggagagcgacggcaagccccagaaggugggcaucgccggguccaacaagagccugcaguccgccggcuuccccaccgggcucacguacagccagcugaugacccugaaggacuccaugaugcagcuggaccccagcgccaagaccuggaucgacaucgagggccggccggaggaccccgucgagaucgcgcucuaccagcccauguccgggugcuacauccacuucuuccgcgagcccaccgaccugaagcaguucaagcaggacgccaaguacagccacggcaucgacguggccgaccuguucccggcccagcccggccucacguccgccgucaucgaggcgcugccccggaacauggugcugaccugccaggggagcgacgacaucaagaagcuccuggacagccagggccgcaaggacaucaagcugaucgacaucgcccucuccaagguggacagccgccgguucgagaacgccgucugggaccagugcaaggaccugugccacaugcacaccggggugguggucgagaagaagaagcgcggcgggaaggaggagaucacgccccacugcgcccugauggacugcaucauguacgacgccgcgguguccggcggccucaacaucccggugcugcgggccguccugccccgcgacaugguguuccggaccagcucccccaaggugguccucuga

SEQ ID NO: 8103 - RNA, 1710 nt, Artificial Sequence
  derived and/or modified CDS sequence (opt1) from LASV(Lassa virus/H.sapiens-wt/NGA/2015/ISTH_0831;Clade II)__AVO03546__NP
augagcgccuccaaggaggugaaguccuuccuguggacccagagccuccgccgggagcuggccggcuacugcagcaacaucaagcugcaggucgugaaggacgcgcaggcccuccugcacgggcuggacuucuccgaggugagcaacguccagcgccucaugcggaagcagaagcgcgacgacuccgaccugaagcggcugcgcgaccucaaccaggccgugaacaaccugguggagcucaagagcacccagcagaaguccauccugcgggucggcacccugagcuccgacgaccugcucacccuggccgccgaccuggagaagcucaagagcaaggugauccgcaccgagcggccccuguccagcgggguguacaugggcaaccuguccacccagcagcucgaccagcgccgggcgcugcugaacaugaucgggauggucggcggcagccaggggacguccgccggccgcgacgggaucgugcgggugugggacguccgcaacccggagcuccugaacaaccaguucggcaccaugcccagccugacccucgccugccugaccaagcagggccagguggaccugaacgacgccgugcaggcgcucacggaccuggggcugaucuacaccgccaaguaccccaacuccagcgaccucgaccggcugagccagucccaccccauccugaacaugaucgacaccaagaaguccagcaucaacaucagcggcuacaacuucucccucggggccgccgucaaggccggcgcgugcaugcuggacgggggcaacaugcuggagaccaucaaggugagcccgcaguccauggacggcauccucaagagcauccugaaggugaagcgcucccuggggauguucgucagcgacacgcccggcgagcggaaccccuacgagaacauccucuacaagaucugccuguccggggacggcuggcccuacaucgccagccgcaccuccaucaccgggcgggccugggagaacaccgugguggaccuggagagcgacaacaagccgaagaagcccggcaacaacgaguccaaccgcagccuccaguccgccggcuuccccgccgggcugacguacagccagcugaugacccucaaggacuccaugcugcagcuggaccccaacgcgaagaccuggauggacaucgagggccggccggacgaccccgucgagaucgcccuguaccagcccaacagcgggugcuacauccacuucuuccgcgagcccaccgaccucaagcaguucaagcaggacgccaaguacagccacggcaucgacaucuccgaccuguucgccgcccagccggggcugacgagcgcggugaucgaggcccucccccgcaacauggugaucacgugccagggcuccgaggacaucaagaagcugcuggagagccagggccggaaggacauccgccucgucgacaucucccugagcaaggccgacucccggaaguucgagaacgccgugugggaccaguacaaggaccugugccacaugcacaccgggaucgucguggagaagaagaagaagggcgggaaggaggagaucacgccccacugcgcccucauggacugcaucauguucgacgcggccgugaugaacggccuggacgcccgcguccugcgggccgugcucccccgcgacaugguguuccggaccagcaccccgcgcgucgugcuguga

SEQ ID NO: 8104 - RNA, 1710 nt, Artificial Sequence
  derived and/or modified CDS sequence (opt1) from LASV(Lassa virus/H.sapiens-wt/NGA/2016/ISTH_0009;Clade II)__AVO03572__NP
augagcgccuccaaggaggugaaguccuuccuguggacccagagccuccgccgggagcugagcggcuacugcuccaacaucaagcugcaggucgugaaggacgcccaggcgcuccugcacgggcuggacuucagcgagguguccaacguccagcgccucaugcggaagcagaagcgcgacgacagcgaccugaagcggcugcgcgaccucaaccaggccgugaacaaccugguggagcugaaguccacccagcagaaguccauccuccgggucggcacgcugaccagcgacgaccugcucacccuggccgccgaccuggagaagcucaagagcaaggugauccgcaccgagcggccccuguccagcgggguguacaugggcaaccuguccacgcagcagcucgagcagcgccgggcccugcugaacaugaucgggauggucggcggcgcgcaggggacccagccgggccgcgacgggguggugcgggucugggacgugaagaaccccgaccuccugaacaaccaguucggcaccaugcccagccugacccucgccugccugacgaagcagggccagguggaccugaacgacgccguccucgcccugaccgaccuggggcucaucuacaccgcgaaguaccccaacuccagcgaccuggaccgccugucccagagccacccgauccucaacaugguggacaccaagaaguccagccugaacaucagcggcuacaacuucucccugggggccgccgugaaggccggcgccugcaugcucgacgggggcaacaugcuggagacgaucaaggucacgccccagaccauggacggcauccucaagagcauccugaaggugaagaagucccuggggauguucgugagcgacacccccggcgagcggaaccccuacgagaacauccuguacaagaucugccucuccggggacggcuggccguacaucgcgagccgcaccuccaucgucgggcgggccugggagaacaccaccguggaccuggagagcgacggcaagccccagaaggugggcuccgccgggagcaacaagucccugcagagcgccggcuuccccaccgggcucacguacucccagcugaugacccugaaggacagcaugaugcagcuggaccccuccgccaagaccuggaucgacaucgagggccgcccggaggaccccgucgagaucgcgcucuaccagcccaugagcgggugcuacauccacuucuuccgggagcccaccgaccugaagcaguucaagcaggacgccaaguacucccacggcaucgacguggccgaccuguucccggcccagcccggccucacgagcgccgucaucgaggcgcugccccgcaacauggugcugaccugccaggggagcgacgacaucaagcggcuccuggacucccagggccgccgcgacaucaagcugaucgacaucgcccucagcaaggccgacucccggcgcuucgagaacgccgugugggaccagugcaaggaccugugccacaugcacaccggggucgugguggagaagaagaagcggggcgggaaggaggagaucacgccccacugcgcccugauggacugcaucauguacgacgcggccgucagcggcggccucaacaucccggugcugcgcgccgugcugccccgggacauggucuuccgcaccuccagccccaagguggugcucuga

SEQ ID NO: 8105 - RNA, 1710 nt, Artificial Sequence
  derived and/or modified CDS sequence (opt1) from LASV(Lassa virus/H.sapiens-wt/NGA/2016/ISTH_0017;Clade II)__AVO03568__NP
augagcgccuccaaggaggugaaguccuuccuguggacccagagccuccgccgggagcugagcggcuacugcuccagcaucaagcugcaggucgugaaggacgcccaggcgcuccugcacgggcuggacuucuccgaggugagcaacguccagcgccucaugcggaagcagaagcgcgacgacuccgaccugaagcggcugcgcgaccucaaccaggccgugaacaaccugguggagcucaagagcacccagcagaaguccauccugcgggucggcacgcugaccagcgacgaccugcucacccuggccgccgaccuggagaagcucaaguccaaggugauccgcaccgagcggccccugagcuccgggguguacaugggcaaccugagcacgcagcagcucgagcagcgccgggcccugcugaacaugaucgggauggcgggcggcgcccaggggacccagccgggccgcgacggggucgugcgggugugggacgucaagaaccccgaccuccugaacaaccaguucggcaccaugcccucccugacccucgccugccugacgaagcagggccagguggaccugaacgacgccgugcucgcgcugaccgaccuggggcucaucuacaccgccaaguaccccaacagcuccgaccuggaccgccugagccagagccacccgauccucaacauggucgacaccaagaaguccagccugaacaucuccggcuacaacuucagccugggggccgccgugaaggccggcgcgugcaugcucgacgggggcaacaugcuggagacgaucaaggugacgccccagaccauggacggcauccugaaguccauccucaaggucaagcggagccuggggauguucguguccgacgcccccggcgagcgcaaccccuacgagaacauccuguacaagaucugccucagcggggacggcuggccguacaucgccucccggaccagcaucguggggcgcgccugggagaacaccaccgucgaccuggaguccgacggcaagccccagaaggugggcgccaccgggagcaacaagucccugcagagcgcgggcuuccccaccgggcucacguacucccagcugaugacccugaaggacagcaugaugcagcuggaccccuccgccaagaccuggaucgacaucgagggccggccggaggaccccguggaggucgcccucuaccagcccgugagcgggugcuacauccacuucuuccgcgagcccaccgaccugaagcaguucaagcaggacgccaaguacucccacggcaucgacgucgccgaccuguucccggcgcagcccggccucacgagcgccgugaucgaggcccugccccggaacauggugcugaccugccaggggagcgacgacaucaagaagcuccuggacucccagggccgcaaggacaucaagcugaucgacaucgcccucagcaaggccgacucccgccgguucgagaacgcggucugggaccagugcaaggaccugugccacaugcacaccggggugguggucgagaagaagaagcgcggcgggaaggaggagaucacgccccacugcgcccugauggacugcaucauguacgacgccgccgugagcggcggccucaacaucccggugcugcgggcgguccugccccgcgacaugguguuccggaccuccagccccaaggugguccucuga

SEQ ID NO: 8106 - RNA, 1710 nt, Artificial Sequence
  derived and/or modified CDS sequence (opt1) from LASV(Lassa virus/H.sapiens-wt/NGA/2016/ISTH_0035;Clade II)__AVO03620__NP
augagcgccuccaaggaggugaaguccuuccuguggacccagagccuccgccgggagcugagcggcuacugcuccagcaucaagcugcaggucgugaaggacgcccaggcgcuccugcacgggcuggacuucuccgaggugagcaacguccagcgccucaugcggaagcagaagcgcgacgacuccgaccugaagcggcugcgcgaccucaaccaggccgugaacaaccugguggagcucaagagcacccagcagaaguccauccugcgggucggcacccugaccagcgacgaccugcucacccuggccgccgaccuggagaagcucaaguccaaggugauccgcaccgagcggccccugagcuccgggguguacaugggcaaccugagcucccagcagcucgagcagcgccgggcccugcugaacaugaucgggauggucggcggcgcgcaggggacgcagccgggccgcgacgggguggugcgggucugggacgugaagaaccccgaccuccugaacaaccaguucggcaccaugcccagccugacccucgccugccugaccaagcagggccagguggaccugaacgacgccguccucgcccugacggaccuggggcucaucuacaccgcgaaguaccccaacuccagcgaccuggaccgccugagccagucccacccgauccucaacaugguggacaccaagaaguccagccugaacaucagcggcuacaacuucucccugggggccgccgugaaggccggcgccugcaugcucgacgggggcaacaugcuggagaccaucaaggucacgccccagaccauggacggcauccucaagagcauccugaaggugaagcggucccuggggauguucgugagcgacacccccggcgagcgcaaccccuacgagaacauccuguacaagaucugccucuccggggacggcuggccguacaucgcgagccggaccuccaucgucgggcgcgccugggagaacacgaccguggaccuggagagcgacggcaagccccagaaggugggcuccgccgggagcaacaagucccugcagagcgccggcuuccccaccgggcucaccuacucccagcugaugacgcugaaggacagcaugaugcagcuggaccccuccgccaagaccuggaucgacaucgagggccggccggaggaccccgucgagaucgcgcucuaccagcccaucagcgggugcuacauccacuucuuccgcgagcccaccgaccugaagcaguucaagcaggacgccaaguacagccacggcaucgacguggccgaccuguucccggcccagcccggccucaccuccgccgucaucgaggcgcugccccggaacauggugcugacgugccaggggagcgacgacaucaagcgccuccuggacucccagggccgccgggacaucaagcugaucgacaucgcccucagcaaggccgacucccgccgguucgagaacgccgugugggaccagugcaaggaccugugccacaugcacaccggggucgugguggagaagaagaagcgcggcgggaaggaggagaucacgccccacugcgcccugauggacugcaucauguacgacgcggccgucagcggcggccucaacaucccggugcugcgggccgugcugccccgcgacauggucuuccggaccuccagccccaagguggugcucuga

SEQ ID NO: 8107 - RNA, 1710 nt, Artificial Sequence
  derived and/or modified CDS sequence (opt1) from LASV(Lassa virus/H.sapiens-wt/NGA/2016/ISTH_0104;Clade II)__AVO03632__NP
augagcgccuccaaggaggugaaguccuuccuguggacccagagccuccgccgggagcugagcggcuacugcuccaacaucaagcugcaggucgugaaggacgcccaggcgcuccugcacgggcuggacuucagcgagguguccaacguccagcgccucaugcggaagcagaagcgcgacgacagcgaccugaagcggcugcgcgaccucaaccaggccgugaacaaccugguggagcugaaguccacccagcagaaguccauccuccgggucggcacccugaccagcgacgaccugcucacccuggccgccgaccuggagaagcucaagagcaaggugauccgcaccgagcggccccuguccagcgggguguacaugggcaaccuguccacgcagcagcucgagcagcgccgggcccugcugaacaugaucgggauggucggcggcacccagagcacccagccggggcgcgacggcguggugcgggucugggacgugaagaaccccgaccuccugaacaaccaguucgggaccaugcccucccugacgcucgcgugccugaccaagcagggccagguggaccugaacgacgccguccucgcccugaccgaccuggggcucaucuacaccgccaaguaccccaacagcuccgaccuggaccgccugagccagagccacccgauccucaacaugguggacacgaagaaguccagccugaacaucuccggcuacaacuucagccugggcgcggccgugaaggccggggccugcaugcucgacggcgggaacaugcuggagaccaucaaggucacgccccagaccauggacggcauccugaaguccauccucaaggugaagcggagccugggcauguucguguccgacacccccggggagcgcaaccccuacgagaacauccuguacaagaucugccucagcggcgacggguggccguacaucgccucccggaccagcaucgucggccgcgcgugggagaacaccaccguggaccuggaguccgacgggaagccccagaaggugggcacgaccggcagcaacaagucccugcagagcgccggguuccccaccggccucaccuacucccagcugaugacgcugaaggacagcaugaugcagcuggaccccuccgccaagaccuggaucgacaucgaggggcggccggaggaccccgucgagaucgcccucuaccagcccaugagcggcugcuacauccacuucuuccgcgagcccaccgaccugaagcaguucaagcaggacgccaaguacucccacgggaucgacguggcggaccuguucccggcccagcccggccucaccagcgccgucaucgaggcccugccccggaacauggugcugacgugccagggcagcgacgacaucaagaagcuccuggacucccaggggcgccgcgacaucaagcugaucgacaucagccucuccaaggccgacagccggaaguucgagaacgcggugugggaccagugcaaggaccugugccacaugcacaccggcgucgugguggagaagaagaagcgcgggggcaaggaggagaucacgccccacugcgcccugauggacugcaucauguucgacgccgccgucuccgggggccucaacaucccggugcugcgggccgugcugccccgcgacauggucuuccggaccagcucccccaagguggugcucuga

SEQ ID NO: 8108 - RNA, 1710 nt, Artificial Sequence
  derived and/or modified CDS sequence (opt1) from LASV(Lassa virus/H.sapiens-wt/NGA/2016/ISTH_0133;Clade II)__AVO03636__NP
augagcgccuccaaggaggugaaguccuuccuguggacccagagccuccgccgggagcugagcggcuacugcuccaacaucaagcugcaggucgugaaggacgcccaggcgcuccugcacgggcuggacuucagcgagguguccaacguccagcgccucaugcggaagcagaagcgcgacgacagcgaccugaagcggcugcgcgaccucaaccaggccgugaacaaccugguggagcugaaguccacccagcagaaguccauccuccgggucggcacgcugaccagcgacgaccugcucacccuggccgccgaccuggagaagcucaagagcaaggugauccgcaccgagcggccccuguccagcgggguguacaugggcaaccuguccgcccagcagcucgagcagcgccgggcgcugcugaacaugaucgggauggucggcggcacgcaggggacccagccgggccgcgacgggguggugcgggucugggacgugaagaaccccgaccuccugaacaaccaguucggcaccaugcccagccugacccucgccugccugacgaagcagggccagguggaccugaacgacgccguccucgcccugaccgaccuggggcucaucuacaccgcgaaguaccccaacgccuccgaccuggaccgccugagccagucccacccgauccucaacaugguggacaccaagaaguccagccugaacaucagcggcuacaacuucagccugggggccgccgugaaggccggcgcgugcaugcucgacgggggcaacaugcuggagacgaucaaggucacgccccagaccauggacggcauccugaaguccgugcucaaggugaagaagucccuggggauguucgucagcgacacccccggcgagcggaaccccuacgagaacauccuguacaagaucugccucagcggggacggcuggccguacaucgccucccgcaccagcaucguggggcgggccugggagaacaccaccguggaccuggaguccgacggcaagccccagaagaucggccccgccgggagcaacaagucccugcagagcgccggcuuccccgcggggcucaccuacucccagcugaugacgcugaaggacagcaugaugcagcuggacccguccgccaagaccuggaucgacaucgagggccgccccgaggaccccgucgagaucgcccucuaccagcccaugagcgggugcuacauccacuucuuccgggagccgaccgaccugaagcaguucaagcaggacgccaaguacucccacggcaucgacgugaccgaccuguucagcgcccagcccggccucacguccgcggucaucgaggcccugccccgcaacauggugcugaccugccaggggagcgacgacaucaagcggcuccuggacagccagggccgccgcgacaucaagcugaucgacaucucccucagcaagguggacucccggcgcuucgagaacgccgucugggaccagugcaaggaccugugccacaugcacaccggggugguggucgagaagaagaagcggggcgggaaggaggagaucacgccccacugcgcccugauggacugcaucauguacgacgccgcggugagcggcggccucaacaucccggugcugcgcgccguccugccccgggacaugguguuccgcaccuccagccccaaggugguccucuga

SEQ ID NO: 8109 - RNA, 1710 nt, Artificial Sequence
  derived and/or modified CDS sequence (opt1) from LASV(Lassa virus/H.sapiens-wt/NGA/2016/ISTH_0146;Clade II)__AVO03634__NP
augagcgccuccaaggaggugaaguccuuccuguggacccagagccuccgccgggagcugagcggcuacugcuccaacaucaagcugcaggucgugaaggacgcccaggcgcuccugcacgggcuggacuucagcgagguguccaacguccagcgccucaugcggaagcagaagcgcgacgacagcgaccugaagcggcugcgcgaccucaaccaggccgugaacaaccugguggagcugaaguccacccagcagaaguccauccuccgggucggcacgcugaccagcgacgaccugcucacccuggccgccgaccuggagaagcucaagagcaaggugauccgcaccgagcggccccuguccagcgggguguacaugggcaaccuguccgcccagcagcucgagcagcgccgggcgcugcugaacaugaucgggauggccggcggcgcccagagcacgcagccggggcgcgacggcgucgugcgggugugggacgucaagaaccccgaccuccugaacaaccaguucgggaccaugcccucccugacccucgccugccugaccaagcagggccagguggaccugaacgacgcggugcucgcccugacggaccuggggcucaucuacaccgccaaguaccccaacagcuccgaccuggaccgccugagccagagccacccgauccucaacauggucgacaccaagaaguccagccugaacaucuccggcuacaacuucagccugggcgccgccgugaaggcgggggccugcaugcucgacggcgggaacaugcuggagaccaucaagaucacgccccagaccauggacggcauccugaaguccauccucaaggugaagcggagccugggcauguucgucuccgacacccccggggagcgcaaccccuacgagaacauccuguacaagaucugccucagcggcgacggguggccguacaucgccucccggaccagcaucgugggccgcgccugggagaacacgaccguggaccuggaguccgacgggaagccccagaaggucggcaccaucggcagcaacaagucccugcagagcgccggguuccccaccggccucacguacucccagcugaugacccugaaggacagcaugaugcagcuggaccccuccgcgaagaccuggaucgacaucgaggggcggccggaggaccccguggagaucgcccucuaccagcccaugagcggcugcuacauccacuucuuccgcgagcccaccgaccugaagcaguucaagcaggacgccaaguacucccacgggaucgacguggccgaccuguucccggcccagcccggccucacgagcgcggucaucgaggcccugccccggaacauggugcugaccugccagggcagcgacgacaucaagcgccuccuggacucccaggggcgccgggacaucaagcugaucgacaucgcccucagcaaggccgacucccgccgguucgagaacgccgucugggaccagugcaaggaccugugccacaugcacaccggcgugguggucgagaagaagaagcgcgggggcaaggaggagaucacgccccacugcgcgcugauggacugcaucauguacgacgccgccgugagcgggggccucaacaucccggugcugcgggccguccugccccgcgacaugguguuccggaccuccagccccaaggugguccucuga

SEQ ID NO: 8110 - RNA, 1710 nt, Artificial Sequence
  derived and/or modified CDS sequence (opt1) from LASV(Lassa virus/H.sapiens-wt/NGA/2016/ISTH_0187;Clade II)__AVO03550__NP
augagcguguccaaggaggucaagagcuuccuguggacccagucccuccgccgggagcugagcggcuacugcuccaacaucaagcuccagguggugaaggacgcccaggcccugcugcacgggcuggacuucagcgaggucuccaacgugcagcgccucaugcggaagcagcgccgggacgacggcgaccugaagcgccugcgggaccucaaccaggcggugaacaaccuggucgagcucaagagcacccagcagaaguccgugcugcgcguggggacccugagcuccgacgaccugcucguccuggccgccgaccuggagaagcucaagagcaaggugauccggaccgagcgcccccuguccagcggcguguacauggggaaccuguccagccagcagcucgaccagcggcgcgcccugcugaacaugaucggcaugaccggcgggaaccggggcggguccgccagcuccgacggcaucguccgcgugugggacgugaagaacgcggagcuccugaacaaccaguucgggaccaugccgagccugacgcucgccugccugaccaagcagggccaggucgaccugaacgacgccgugcaggcccucaccgaccugggccugaucuacaccgcgaaguaccccaacagcuccgaccucgaccggcuggcccagagccaccccauccugaacaugaucgacacgaagaaguccagccucaacaucuccggguacaacuucagccugggcgccgccgugaaggccggggcgugcaugcuggacggcggcaacaugcucgagaccaucaaggucagcccccagaccaucgacgggauccugaagaccauccugaaggugaagaagucccucggcauguucaucuccgacgugccgggggagcgcaaccccuacgagaacauccuguacaagaucugccugagcggcgacggguggcccuacaucgccucccggacgagcaucgucggccgcgccugggagaacaccgugguggaccucgaguccgacaacaagccccagaagaccggcaacgggggcagcaacaagucccugcagagcgccggguucgccgcgggccugaccuacucccagcucaugacgcugaaggacagcaugcugcagcuggacccgaacuccaagaccuggauggacaucgaggggcggcccgaggaccccgucgagaucgcccucuaccagcccagcagcggcugcuacauccacuucuuccgcgagccgaccgaccugaagcaguucaagcaggacgccaaguacucccacggcaucgacgugaccgaccuguucgccgcccagcccgggcucacgagcgcggucaucgaggcccugccccggaacauggugaucacgugccagggcuccgaggacauccgcaagcugcucgagagccaggggcgccgggacaucaagcugaucgacaucucccugaacaaggccgacagccgcaaguucgagaacgccgugugggaccaguucaaggaccucugccacaugcacaccggcgucgugguggagaagaagaagcgcgggggcaaggaggagaucacgccccacugcgcccugauggacugcaucauguucgacgcggccgucuccggcgggcuggacaccaaggugcuccgggccgugcugccgcgggacauggucuuccgcaccagcacccccaagguggugcuguga

SEQ ID NO: 8111 - RNA, 1710 nt, Artificial Sequence
  derived and/or modified CDS sequence (opt1) from LASV(Lassa virus/H.sapiens-wt/NGA/2016/ISTH_0419;Clade II)__AVO03540__NP
augagcgccuccaaggaggugaaguccuuccuguggacccagagccuccgccgggagcugagcggcuacugcuccaacaucaagcugcaggucgugaaggacgcccaggcgcuccugcacgggcuggacuucagcgagguguccaacguccagcgccucaugcggaagcagaagcgcgacgacggcgaccugaagcggcugcgcgaccucaaccaggccgugaacaaccugguggagcucaagagcacccagcagaaguccguccugcggguggggacccugagcuccgacgaccugcucacccuggccgccgaccuggagaagcucaagagcaaggugauccgcaccgagcggccccuguccagcggcgucuacauggggaaccuguccagccagcagcucgaccagcgccgggcccugcugaacaugaucggcaugaccggcgggggccagggggcguccgccggccgcgacgggaucgugcgggugugggacgucaagaacgccgagcuccugaacaaccaguucggcacgaugccgagccugacccucgccugccugaccaagcagggccagguggaccugaacgacgcggugcaggcccucaccgaccuggggcugaucuacacggccaaguaccccaacuccagcgaccucgaccgccugagccagucccaccccauccugaacaugaucgacaccaagaaguccagccucaacaucagcggcuacaacuucucccugggggccgccgucaaggcgggcgccugcaugcuggacggcgggaacaugcucgagaccauccgggugagcccccagaccauggacggcauccugaaguccauccugaaggugaagcgcagccucgggauguucgucuccgacaucccgggcgagcggaaccccuacgagaacauccuguacaagaucugccugagcggggacggcuggcccuacaucgccucccgcacgagcaucaccggccgggccugggagaacaccaucguggaccucgaguccgacagccgcccccagaagccggggaacuccggcagcaaccggucccugcagagcgccggguuccccgcgggccugaccuacucccagcucaugacgcugaaggacagcaugcugcagcuggaccccaacgccaagaccuggauggacaucgaggggcgccccgacgacccgguggagaucgcccucuaccagcccagcuccggcugcuacauccacuucuuccgcgagcccaccgaccugaagcaguucaagcaggacgccaaguacagccacggcaucgacgucggggaccuguucaccgcccagcccggccucacguccgcggugcuggaggcccugccgcggaacauggugaucacgugccaggggagcgaggacaucaagaagcuccuggagucccagggccgcaaggacaucaagcuggucgacaucagcauguccaagcccgacagccggaaguucgagaacgccgugugggaccaguacaaggaccucugccacaugcacaccgggaucgucguggagaagaagaagcgcggcggcaaggaggagaucacgccccacugcgcccugauggacugcaucauguucgacgccgcgguggucgggggccuggacgccaagauccuccgggccgugcugccccgcgacaugguguuccggaccuccaccccgaaggucgugcuguga

SEQ ID NO: 8112 - RNA, 1710 nt, Artificial Sequence
  derived and/or modified CDS sequence (opt1) from LASV(Lassa virus/H.sapiens-wt/NGA/2016/ISTH_0447;Clade II)__AVO03560__NP
augagcgccuccaaggaggugcgcagcuuccuguggacccagucccuccggcgcgagcugagcggcuacugcuccagcaucaagcugcaggucgugaaggacgcccaggcgcuccugcacgggcuggacuucuccgaggugagcaacguccagcggcucaugcgcaagcagaagcgggacgacuccgaccugaagcgccugcgggaccucaaccaggccgugaacaaccugguggagcucaagagcacccagcagaaguccauccugcgcgucggcacgcugaccagcgacgaccugcucacccuggccgccgaccuggagaagcucaaguccaaggugauccggaccgagcgcccccugagcuccgggguguacaugggcaaccugagcucccagcagcucgagcagcggcgcgcccugcugaacaugaucgggauggucggcggcgcgcaggggacgcagccgggccgggacgggguggugcgcgucugggacgugaagaaccccgaccuccugaacaaccaguucggcaccaugcccagccugacccucgccugccugaccaagcagggccagguggaccugaacgacgccguccucgcccugacggaccuggggcucaucuacaccgcgaaguaccccaacuccagcgaccuggaccggcugagccagucccacccgauccucaacaugguggacaccaagaaguccagccugaacaucagcggcuacaacuucucccugggggccgccgugaaggccggcgccugcaugcucgacgggggcaacaugcuggagaccaucaaggucacgccccagaccauggacggcauccucaagagcauccugaaggugaagcgcucccuggggauguucgugagcgacacccccggcgagcggaaccccuacgagaacauccuguacaagaucugccucuccggggacggcuggccguacaucgcgagccgcaccuccaucgucgggcgggccugggagaacacgaccguggaccuggagagcgacggcaagccccagaaggugggcgccgccggguccaccaagagccugcaguccgccggcuuccccaccgggcucacguacagccagcugaugacccugaaggacuccaugaugcagcuggaccccagcgcgaagaccuggaucgacaucgagggccgcccggaggaccccgucgagaucgcccucuaccagcccauguccgggugcuacauccacuucuuccgggagcccaccgaccugaagcaguucaagcaggacgccaaguacagccacggcaucgacguggccgaccuguucccggcccagcccggccucacgagcgcggucaucgaggcccugccccgcaacauggugcugaccugccagggguccgacgacaucaagcgccuccuggacagccagggccggcgcgacaucaagcugaucgacaucgcccucuccaagguggacagccggcgcuucgagaacgccgucugggaccagugcaaggaccugugccacaugcacaccggggugguggucgagaagaagaagcggggcgggaaggaggagaucacgccccacugcgcccugauggacugcaucauguacgacgcggccguguccggcggccucaacaucccggugcugcgcgccguccugccccgggacaugguguuccgcaccagcucccccaaggugguccucuga

SEQ ID NO: 8113 - RNA, 1710 nt, Artificial Sequence
  derived and/or modified CDS sequence (opt1) from LASV(Lassa virus/H.sapiens-wt/NGA/2016/ISTH_0543;Clade II)__AVO03596__NP
augagcgccuccaaggaggugaaguccuuccuguggacccagagccuccgccgggagcugagcggcuacugcuccaacaucaagcugcaggucgugaaggacgcccaggcgcuccugcacgggcuggacuucagcgagguguccaacguccagcgccucaugcggaagcagaagcgcgacgacggcgaccugaagcggcugcgcgaccucaaccaggccgugaacaaccugguggagcucaagagcacccagcagaaguccguccugcggguggggacgcugaccagcgacgaccugcucauccuggccgccgaccuggagaagcucaaguccaaggugauccgcaccgagcggccccugagcuccggcgucuacauggggaaccugagcacccagcagcucgagcagcgcaaggcccugcuguccaugaucggcauggugggcggggcgcagggcacgcagccggggcgggacggcgugguccgcgugugggacgugaagaaccccgaccuccugaacaaccaguucgggaccaugcccagccugacccucgccugccugaccaagcagggccaggucgaccugaacgacgccgugcucgcccugacggaccugggccucaucuacaccgcgaaguaccccaacuccagcgaccuggaccggcugucccagagccacccgauccucaacaugguggacaccaagaaguccagccugaacaucagcggguacaacuucucccugggcgccgccgucaaggccggggccugcaugcucgacggcggcaacaugcuggagaccaucaaggugacgccccagaccauggacgggauccucaagagcauccugaaggugaagcgcucccugggcauguucgucagcgacacccccggggagcggaaccccuacgagaacauccuguacaagaucugccucuccggcgacggguggccguacaucgcgagccgcaccuccaucgugggccgggccugggagaacacgaccguggaccuggagagcgacggcaagccccagaaggucgggaccgccggcuccaacaagagccugcaguccgccggguuccccaccggccucacguacagccagcugaugacccugaaggacuccaugaugcagcuggaccccagcgccaagaccuggaucgacaucgaggggcgcccggaggaccccguggagaucgcgcucuaccagcccauguccggcugcuacauccacuucuuccgggagcccaccgaccugaagcaguucaagcaggacgccaaguacagccacggcaucgacgucacggaccuguucuccgcccagccggggcucaccagcgccgugaucgaggcccugccccgcaacauggugcugaccugccagggcagcgacgacaucaagaagcuccuggacucccaggggcggcgcgacaucaagcugaucgacaucagccucuccaaggcggacagccgccgguucgagaacgccgucugggaccagugcaaggaccugugccacaugcacaccggcgugguggucgagaagaagaagcgcgggggcaaggaggagaucacgccccacugcgcccugauggacugcaucauguucgacgccgccguguccggcgggcucaacauccccauccugcgggcggugcugccgcgcgacauggucuuccggaccagcucccccaagguggugcucuga

SEQ ID NO: 8114 - RNA, 1710 nt, Artificial Sequence
  derived and/or modified CDS sequence (opt1) from LASV(Lassa virus/H.sapiens-wt/NGA/2016/ISTH_0565;Clade II)__AVO03638__NP
augagcgccuccaaggaggugaaguccuuccuguggacccagagccuccgccgggagcugagcggcuacugcuccaacaucaagcugcaggucgugaaggacgcccaggcgcuccugcacgggcuggacuucagcgagguguccaacguccagcgccucaugcggaagcagaagcgcgacgacggcgaccugaagcggcugcgcgaccucaaccaggccgugaacaaccugguggagcucaagagcacccagcagaaguccguccugcggguggggacccugaccagcgacgaccugcucacccuggccgccgaccuggagaagcucaaguccaaggugauccgcaccgagcggccccugagcuccggcgucuacauggggaaccugagcacgcagcagcucgagcagcgcaaggcccugcuguccaugaucggcauggugggcggggcgcagggcacccagccggggcgggacggcgugguccgcgugugggacgugaagaaccccgaccuccugaacaaccaguucgggaccaugcccagccugacccucgccugccugacgaagcagggccaggucgaccugaacgacgccgugcucgcccugaccgaccugggccucaucuacaccgcgaaguaccccaacuccagcgaccuggaccggcugucccagagccacccgauccucaacaugguggacaccaagaaguccagccugaacaucagcggguacaacuucucccugggcgccgccgucaaggccggggccugcaugcucgacggcggcaacaugcuggagacgaucaaggugacgccccagaccauggacgggauccucaagagcauccugaaggugaagcgcucccugggcauguucgucagcgacacccccggggagcggaaccccuacgagaacauccuguacaagaucugccucuccggcgacggguggccguacaucgcgagccgcaccuccaucgugggccgggccugggagaacaccaccguggaccuggagagcgacggcaagccccagaaggucgggaccgccggcuccaacaagagccugcaguccgccggguuccccacgggccucaccuacagccagcugaugacccugaaggacuccaugaugcagcuggaccccagcgccaagaccuggaucgacaucgaggggcgcccggaggaccccguggagaucgcgcucuaccagcccauguccggcugcuacauccacuucuuccgggagcccacggaccugaagcaguucaagcaggacgccaaguacagccacggcaucgacgucaccgaccuguucuccgcccagccggggcucaccagcgccgugaucgaggcccugccccgcaacauggugcugaccugccagggcagcgacgacaucaagaagcuccuggacucccaggggcggcgcgacaucaagcugaucgacaucagccucuccaaggcggacagccgccgguucgagaacgccgucugggaccagugcaaggaccugugccacaugcacacgggcgugguggucgagaagaagaagcgcgggggcaaggaggagaucacgccccacugcgcccugauggacugcaucauguucgacgccgccguguccggcgggcucaacauccccauccugcgggcggugcugccgcgcgacauggucuuccggaccagcucccccaagguggugcucuga

SEQ ID NO: 8115 - RNA, 1710 nt, Artificial Sequence
  derived and/or modified CDS sequence (opt1) from LASV(Lassa virus/H.sapiens-wt/NGA/2016/ISTH_0610;Clade II)__AVO03586__NP
augagcgccuccaaggaggugaaguccuuccuguggacccagagccuccgccgggagcugagcggcuacugcuccaacaucaagcugcaggucgugaaggacgcccaggcgcuccugcacgggcuggacuucagcgagguguccaacguccagcgccucaugcggaagcagaagcgcgacgacagcgaccugaagcggcugcgcgaccucaaccaggccgugaacaaccugguggagcugaaguccacccagcagaaguccguccuccgggugggcacgcugaccagcgacgaccugcucacccuggccgccgaccuggagaagcucaagagcaaggugauccgcaccgagcggccccuguccagcggggucuacaugggcaaccuguccgcccagcagcucgagcagcgccgggcgcugcugaacaugaucgggauggugggcggcgcccaggggacgcagccgggccgcgacggggugguccgggugugggacgugaagaaccccgaccuccugaacaaccaguucggcaccaugcccagccugacccucgccugccugaccaagcaggggcaggucgaccugaacgacguggugcucgcccugacggaccugggccucaucuacaccgcgaaguaccccaacuccagcgaccuggaccgccugucccagagccacccgauccucaacauggucgacaccaagaaguccagccugaacaucagcggcuacaacuucucccugggggccgccgugaaggccggcgccugcaugcucgacgggggcaacaugcuggagaccaucaaggugacgccccagaccauggacggcauccucaagagcauccugaaggucaagaagucccuggggauguucgugagcgacacccccggcgagcggaaccccuacgagaacauccuguacaagaucugccucuccggggacggcuggccguacaucgcgagccgcaccuccaucauggggcgggccugggagaacacgaccguggaccuggagagcgacggcaagccccagaaggucggcaccgccggguccaacaagagccugcaguccgccggcuuccccaccgggcucacguacagccagcugaugacccugaaggacuccaugaugcagcuggaccccagcgccaagaccuggaucgacaucgagggccgcccggaggaccccguggagaucgcgcucuaccagcccauguccgggugcuacauccacuucuuccgggagcccaccgaccugaagcaguucaagcaggacgccaaguacagccacggcaucgacgucacggaccuguucuccgcccagccgggccucaccagcgccgugaucgaggcccugccccgcaacauggugcugaccugccaggggagcgacgacaucaagcggcuccuggacucccagggccgccgcgacaucaagcugaucgacaucgcgcucagcaaggccgacucccggcgcuucgagaacgccgucugggaccagugcaaggaccugugccacaugcacaccggggugguggucgagaagaagaagcggggcgggaaggaggagaucacgccccacugcgcccugauggacugcaucauguacgacgccgcggugagcggcggccucaacauccccgugcugcgcgccguccugccgcgggacaugguguuccgcaccuccagccccaaggugguccucuga

SEQ ID NO: 8116 - RNA, 1710 nt, Artificial Sequence
  derived and/or modified CDS sequence (opt1) from LASV(Lassa virus/H.sapiens-wt/NGA/2016/ISTH_0621;Clade II)__AVO03544__NP
augagcgccuccaaggaggugaaguccuuccuguggacccagagccuccgccgggagcugagcggcuacugcuccaacaucaagcugcaggucgugaaggacgcccaggcgcuccugcacgggcuggacuucagcgagguguccaacguccagcgccucaugcggaagcagaagcgcgacgacggcgaccugaagcggcugcgcgaccucaaccaggccgugaacaaccugguggagcucaagagcacccagcagaaguccguccugcggguggggacgcugagcuccgacgaccugcucauccuggccgccgaccuggagaagcucaagagcaaggugauccgcaccgagcggccccuguccagcggcgucuacauggggaaccuguccagccagcagcucgaccagcgccgggcccugcugaacaugaucggcaugaccggcgggucccagggcaccaacacggggcgcgacggcaucgugcggaucugggacgugaagaacgcggagcuccugaacaaccaguucgggaccaugccgagccugacccucgccugccugaccaagcagggccaggucgaccugaacgacgccgugcaggcccucacggaccugggccugaucuacaccgcgaaguaccccaacuccagcgaccucgaccgccugagccagucccaccccauccugaacaugaucgacaccaagaaguccagccucaacaucagcggguacaacuucucccugggcgccgccgugaaggccggggccugcaugcuggacggcggcaacaugcucgagaccaucaaggucagcccccagacgauggacgggauccugaaguccauccugaaggugaagaagucccucggcauguucgugagcgacaccccgggggagcggaaccccuacgagaacauccuguacaagaucugccugagcggcgacggguggcccuacaucgcgucccgcaccagcaucaccggccgggccugggagaacacgaucgucgaccucgagaccgacaacaagucccagaagcccggcaacagcggguccaaccgcagccugcaguccgccggcuucccggccgggcugaccuacagccagcucaugacccugaaggacuccaugcugcagcuggaccccaacgccaagacguggauggacaucgagggccggcccgacgaccccguggagaucgcgcucuaccagccgagcagcgggugcuacauccacuucuuccgcgagcccaccgaccugaagcaguucaagcaggacgccaaguacucccacggcaucgacgugagcgaccuguucgccgcccagcccggccucaccuccgccgucaucgaggcgcugccccggaacauggugaucacgugccaggggagcgaggacauccgcaagcugcucgagucccagggccgccgggacaucaagcugguggacaucagccuguccaagagcgacucccgcaaguucgagaacgucgugugggaccaguucaaggaccucugccacaugcacaccggggucgugguggagaagaagaagaagggcgggaaggaggagaucaccccgcacugcgcccugauggacugcaucauguucgacgccgccgucaugggcggccuggacgcccgggugcuccgcgcggugcugccccgggacauggucuuccgcaccagcacccccaagguggugcuguga

SEQ ID NO: 8117 - RNA, 1710 nt, Artificial Sequence
  derived and/or modified CDS sequence (opt1) from LASV(Lassa virus/H.sapiens-wt/NGA/2016/ISTH_0701;Clade II)__AVO03630__NP
augagcgccuccaaggaggugaaguccuuccuguggacccagagccuccgccgggagcugagcggcuacugcuccaacaucaagcugcaggucgugaaggacgcccaggcgcuccugcacgggcuggacuucagcgagguguccaacguccagcgccucaugcggaagcagaagcgcgacgacagcgaccugaagcggcugcgcgaccucaaccaggccgugaacaaccugguggagcugaaguccacccagcagaaguccauccuccgggucggcacgcugaccagcgacgaccugcucauccuggccgccgaccuggagaagcucaagagcaaggugauccgcaccgagcggccccuguccagcgggguguacaugggcaaccuguccacccagcagcucgagcagcgccgggcccugcugaaccucaucgggauggucggcggcgcgcaggggacgcagccgggccgcgacgggguggugcgggucugggacgugaagaaccccgaccugcugaacaaccaguucggcaccaugcccagccucacccuggccugccugaccaagcagggccagguggaccucaacgacgccguccuggcccugacggaccucgggcugaucuacaccgcgaaguaccccaacuccagcgaccuggaccgccucucccagagccacccgauccugaacaugguggacaccaagaaguccagccugaacaucagcggcuucaacuucucccucggggccgccgugaaggccggcgccugcaugcuggacgggggcaacaugcuggagaccaucaaggucacgccccagaccauggacggcauccucaagagcauccugaaggugaagcggucccuggggauguucgugagcgacacccccggcgagcgcaaccccuacgagaacauccucuacaagaucugccuguccggggacggcuggccguacaucgcgagccggaccuccaucgucgggcgcgccugggagaacacgaccguggaccuggagagcgacggcaagccccacaaggugggcaccgccggguccaacaagagccuccaguccgccggcuuccccaccgggcugacguacagccagcugaugacccugaaggacuccaugaugcagcucgaccccagcgccaagaccuggaucgacaucgagggccggccggaggaccccgucgagaucgcgcuguaccagcccauguccgggugcuacauccacuucuuccgcgagcccaccgaccugaagcaguucaagcaggacgccaaguacagccacggcaucgacguggccgaccucuucccggcccagcccggccugacguccgccgucaucgaggcgcugccccggaacauggugcugaccugccaggggagcgacgacaucaagcgccuccuggacagccagggccgccgggacaucaagcucaucgacaucgcccuguccaaggccgacagccgccgguucgagaacgccgugugggaccagugcaaggaccugugccacaugcacaccggggucgugguggagaagaagaagcgcggcgggaaggaggagaucacgccccacugcgcccucauggacugcaucauguacgacgcggccgucuccggcggccugaacaucccggugcugcgggccgugcucccccgcgacauggucuuccggaccagcucccccaagguggugcuguga

SEQ ID NO: 8118 - RNA, 1710 nt, Artificial Sequence
  derived and/or modified CDS sequence (opt1) from LASV(Lassa virus/H.sapiens-wt/NGA/2016/ISTH_0702;Clade II)__AVO03558__NP
augagcgccuccaaggaggugaaguccuuccuguggacccagagccuccgccgggagcugagcggcuacugcuccaacaucaagcugcaggucgugaaggacgcccaggcgcuccugcacgggcuggacuucagcgagguguccaacguccagcgccucaugcggaagcagaagcgcgacgacagcgaccugaagcggcugcgcgaccucaaccaggccgugaacaaccugguggagcugaaguccacccagcagaaguccauccuccgggucggcacccugaccagcgacgaccugcucacccuggccgccgaccuggagaagcucaagagcaaggugauccgcaccgagcggccccuguccagcgggguguacaugggcaaccuguccacgcagcagcucgagcagcgccgggcccugcugagcaugaucgggauggucggcggcacccaggggacccagccgggccgcgacgggguggugcgggucugggacgugaagaaccccgaccuccugaacaaccaguucggcaccaugcccucccugacgcucgcgugccugaccaagcagggccagguggaccugaacgacgccguccucgcccugaccgaccuggggcucaucuacaccgccaaguaccccaacagcuccgaccuggaccgccugagccagagccacccgauccucaacaugguggacacgaagaaguccagccugaacaucuccggcuacaacuucagccugggggcggccgugaaggccggcgccugcaugcucgacgggggcaacaugcuggagaccaucaaggucacgccccagaccauggacggcauccugaaguccauccucaaggugaagaagucccuggggauguucgugagcgacacccccggcgagcggaaccccuacgagaacauccuguacaagaucugccucagcggggacggcuggccguacaucgccucccgcaccagcaucgucgggcgggcgugggagaacaccaccguggaccuggaguccgacggcaagccccagaaggugggcacggccgggagcaacaagucccugcagagcgccggcuuccccaccgggcucaccuacucccagcugaugacccugaaggacagcaugaugcagcuggaccccuccgccaagacguggaucgacaucgagggccgcccggaggaccccgucgagaucgcccucuaccagcccaugagcgggugcuacauccacuucuuccgggagcccaccgaccugaagcaguucaagcaggacgcgaaguacucccacggcaucgacguggccgaccuguucccggcccagcccggccucaccagcgccgucaucgaggcccugccccgcaacauggugcugaccugccaggggagcgacgacaucaagcggcuccuggacucccagggccgccgcgacaucaagcugaucgacaucagccucuccaaggcggacagccggcgcuucgagaacgccgugugggaccagugcaaggaccugugccacaugcacacgggggucgugguggagaagaagaagcggggcgggaaggaggagaucacgccccacugcgcccugauggacugcaucauguacgacgccgccgucuccggcggccucaacaucccggugcugcgcgcggugcugccccgggacauggucuuccgcaccagcucccccaagguggugcucuga

SEQ ID NO: 8119 - RNA, 1710 nt, Artificial Sequence
  derived and/or modified CDS sequence (opt1) from LASV(Lassa virus/H.sapiens-wt/NGA/2016/ISTH_0717;Clade II)__AVO03548__NP
augagcguguccaaggaggucaagagcuuccuguggacccagucccuccgccgggagcugagcggcuacugcuccaacaucaagguccagguggugaaggacgcccaggcccugcuccacgggcuggacuucagcgagguguccaacgugcagcgccugaugcggaagcagaagcgcgacgacggcgaccucaagcggcugcgcgaccugaaccaggcggucaacaaccucguggagcugaaguccacccagcagaaguccgugcugcgggucgggacccucagcuccgacgaccugcuggugcucgccgccgaccuggagaagcucaagagcaaggugauccgcaccgagcggccccuguccagcggcaucuacauggggaaccuguccagccagcagcuggaccagcgcaaggcccuccugaacaugaucggcaugaccggcgggaacgucggccggaacaccacgggggacggcguggugcgcgucugggacgugaagaacgccgagcugcucaacaaccaguucgggaccaugccgucccugacccuggcgugccucaccaagcagggccagguggaccugaacgacgccguccuggcccucacggaccugggccugaucuacaccgccaaguaccccaacagcuccgaccucgaccggcuggcgcagagccaccccauccugagcaugaucgacaccaagaaguccagccucaacaucuccggguacaacuucagccugggcgccgccgugaaggccggggccugcaugcuggacggcggcaacaugcucgagaccaucaaggugagcccccagacgaucgacgggauccucaagagcauccugaaggucaagcgcucccugggcauguucaucagcgacaccccgggggagcggaaccccuacgagaacauccuguacaagaucugccuguccggcgacggguggcccuacaucgcgagccgcaccuccaucgugggccgggccugggagaacaccguggucgaccucgagagcgacaacaagccccagaagacgggcaacgggggcuccaacaagagccugcaguccgccggguucgccgccggccugaccuacagccagcucaugacccugaaggacuccaugcugcagcuggacccgaacgcgaagaccuggauggacaucgaggggcgccccgaggaccccguggagaucgcccucuaccagcccagcuccggcugcuacauccacuucuuccgggagccgacggaccugaagcaguucaagcaggacgccaaguacagccacggcaucgacgucaccgaccuguucgccgcccagcccgggcucaccagcgcggugaucgaggcccugccccgcaacauggugaucacgugccagggcuccgaggacauccggaagcugcucgagagccaggggcgccgcgacaucaagcugaucgacaucucccugagcaaggucgacucccggaaguucgagaacgccgugugggaccaguucaaggaccucugccacaugcacaccggcaucguggucgagaagaagaagcgcgggggcaaggaggagaucacgccccacugcgcccugauggacugcaucauguucgacgccgcggugagcggcgggguggacgccaagguccugcgggccgugcucccgcgcgacaugguguuccggaccuccacccccaaggucgugcuguga

SEQ ID NO: 8120 - RNA, 1710 nt, Artificial Sequence
  derived and/or modified CDS sequence (opt1) from LASV(Lassa virus/H.sapiens-wt/NGA/2016/ISTH_0753;Clade II)__AVO03610__NP
augagcgccuccaaggaggugaaguccuuccuguggacccagagccuccgccgggagcugagcggcuacugcuccagcaucaagcugcaggucgugaaggacgcccaggcgcuccugcacgggcuggacuucuccgaggugagcaacguccagcgccucaugcggaagcagaagcgcgacgacuccgaccugaagcggcugcgcgaccucaaccaggccgugaacaaccugguggagcucaagagcacccagcagaaguccauccugcgggucggcacgcugaccagcgacgaccugcucacccuggccgccgaccuggagaagcucaaguccaaggugauccgcaccgagcggccccugagcuccgggguguacaugggcaaccugagcacgcagcagcucgagcagcgccgggcccugcugaacaugaucgggauggucggcggcgcgcaggggacccagccgggccgcgacgggguggugcgggucugggacgugaagaaccccgaccuccugaacaaccaguucggcaccaugcccucccugacccucgccugccugacgaagcagggccagguggaccugaacgacgccguccucgcccugaccgaccuggggcucaucuacaccgcgaaguaccccaacagcuccgaccuggaccgccugagccagagccacccgauccucaacaugguggacaccaagaaguccagccugaacaucuccggcuacaacuucagccugggggccgccgugaaggccggcgccugcaugcucgacgggggcaacaugcuggagacgaucaaggucacgccccagaccauggacggcauccugaaguccgugcucaaggugaagcggagccuggggauguucgucuccgacacccccggcgagcgcaaccccuacgagaacauccuguacaagaucugccucagcggggacggcuggccguacaucgcgucccggaccagcaucguggggcgcgccugggagaacaccaccguggaccuggaguccgacggcaagccccagaaggucggcgccgccgggagcaacaagucccugcagagcgccggcuuccccaccgggcucacguacucccagcugaugacccugaaggacagcaugaugcagcuggaccccuccgcgaagaccuggaucgacaucgagggccggccggaggaccccguggagaucgcccucuaccagcccaugagcgggugcuacauccacuucuuccgcgagcccaccgaccugaagcaguucaagcaggacgccaaguacucccacggcaucgacgucgccgaccuguucccggcccagcccggccucacgagcgcggugaucgaggcccugccccggaacauggugcugaccugccaggggagcgacgacaucaagcgccuccuggacucccagggccgccgggacaucaagcugaucgacaucgcccucagcaaggccgacucccgccgguucgagaacgccgucugggaccagugcaaggaccugugccacaugcacaccggggugguggucgagaagaagaagcgcggcgggaaggaggagaucacgccccacugcgcgcugauggacugcaucauguacgacgccgccgugagcggcggccucaacaucccggugcugcgggccguccugccccgcgacaugguguuccggaccuccagccccaaggugguccucuga

SEQ ID NO: 8121 - RNA, 1710 nt, Artificial Sequence
  derived and/or modified CDS sequence (opt1) from LASV(Lassa virus/H.sapiens-wt/NGA/2016/ISTH_0759;Clade II)__AVO03594__NP
augagcgccuccaaggaggugaaguccuuccuguggacccagagccuccgccgggagcugagcggcuacugcuccagcaucaagcugcaggucgugaaggacgcccaggcgcuccugcacgggcuggacuucuccgaggugagcaacguccagcgccucaugcggaagcagaagcgcgacgacuccgaccugaagcggcugcgcgaccucaaccaggccgugaacaaccugguggagcucaagagcacccagcagaaguccauccugcgggucggcacgcugaccagcgacgaccugcucacccuggccgccgaccuggagaagcucaaguccaaggugacccgcacggagcggccccugagcuccgggguguacaugggcaaccugagcacccagcagcucgagcagcgccgggcccugcugaacaugaucgggauggucggcggcgcgcaggggacccagccgggccgcgacgggguggugcgggucugggacgugaagaaccccgaccuccugaacaaccaguucggcaccaugcccucccugacgcucgccugccugaccaagcagggccagguggaccugaacgacgccguccucgcccugaccgaccuggggcucaucuacaccgcgaaguaccccaacagcuccgaccuggaccgccugagccagagccacccgauccucaacaugguggacacgaagaaguccagccugaacaucuccggcuacaacuucagccugggggccgccgugaaggccggcgccugcaugcucgacgggggcaacaugcuggagaccaucaaggucacgccccagaccauggacggcauccugaaguccauccucaaggugaagcggagccuggggauguucguguccgacgcgcccggcgagcgcaaccccuacgagaacauccuguacaagaucugccucagcggggacggcuggccguacaucgccucccggaccagcaucgucgggcgcgccugggagaacaccaccguggaccuggaguccgacggcaagccccagaaggugggcaccgccgggagcaacaagucccugcagagcgccggcuuccccacggggcucaccuacucccagcugaugacccugaaggacagcaugaugcagcuggaccccuccgcgaagaccuggaucgacaucgagggccggccggaggaccccgucgagaucgcccucuaccagcccaugagcgggugcuacauccacuucuuccgcgagcccacggaccugaagcaguucaagcaggacgccaaguacucccacggcaucgacguggccgaccuguucccggcccagcccggccucaccagcgcggucaucgaggcccugccccggaacauggugcugaccugccaggggagcgacgacaucaagaagcuccuggacucccagggccgccgcgacaucaagcugaucgacaucgcccucagccgggccgacucccgccgguucgagaacgccgugugggaccagugcaaggaccugugccacaugcacaccggggucgugguggagaagaagaagcgcggcgggaaggaggagaucacgccccacugcgcgcugauggacugcaucauguacgacgccgccgucagcggcggccucaacaucccggugcugcgggccgugcugccccgcgacauggucuuccggaccuccagccccaagguggugcucuga

SEQ ID NO: 8122 - RNA, 1710 nt, Artificial Sequence
  derived and/or modified CDS sequence (opt1) from LASV(Lassa virus/H.sapiens-wt/NGA/2016/ISTH_0777;Clade II)__AVO03616__NP
augagcgccuccaaggaggugaaguccuuccuguggacccagagccuccgccgggagcugagcggcuacugcuccaacaucaagcugcaggucgugaaggacgcccaggcgcuccugcacgggcuggacuucagcgagguguccaacguccagcgccucaugcggaagcagaagcgcgacgacggcgaccugaagcggcugcgcgaccucaaccaggccgugaacaaccugguggagcucaagagcacccagcagaaguccguccugcggguggggacccugaccagcgacgaccugcucacccuggccgccgaccuggagaagcucaaguccaaggugauccgcaccgagcggccccugagcuccggcgucuacauggggaaccugagcacgcagcagcucgagcagcgcaaggugcugcuguccaugaucggcauggugggcgggacccagcgggcccagccgggcaaggacggggucgugcgcgugugggacgucaagaaccccgaccuccugaacaaccaguucggcaccaugcccagccugacccucgcgugccugacgaagcagggccagguggaccugaacgacaccgugcucgcccugaccgaccuggggcucaucuacaccgccaaguaccccaacuccagcgaccuggaccggcugucccagagccacccgauccucaacauggucgacacgaagaaguccagccugaacaucagcggcuacaacuucucccugggggccgcggugaaggccggcgccugcaugcucgacgggggcaacaugcuggagaccaucaaggugacgccccagaccauggacggcauccucaagagcauccugaaggucaagcgcucccuggggauguucgugagcgacacccccggcgagcggaaccccuacgagaacauccuguacaagaucugccucuccggggacggcuggccguacaucgccagccgcaccuccaucguggggcgggccugggagaacaccaccgucgaccuggagagcgacggcaagccccagaaggugggcacggcgggguccaacaagagccugcaguccgccggcuuccccaccgggcucaccuacagccagcugaugacccugaaggacuccaugaugcagcuggaccccagcgccaagacguggaucgacaucgagggccgcccggaggaccccgucgagaucgcccucuaccagcccguguccgggugcuacauccacuucuuccgggagcccaccgaccugaagcaguucaagcaggacgccaaguacagccacggcaucgacgugaccgaccuguucuccgcgcagccgggccucaccagcgccgucaucgaggcccugccccgcaacauggugcugacgugccaggggagcgacgacaucaagaagcuccuggacucccagggccggcgcgacaucaagcugaucgacaucagccucuccaaguucgacagccgcaaguucgagaacgccgugugggaccagugcaaggaccugugccacaugcacaccggggucgugguggagaagaagaagcggggcgggaaggaggagaucacgccccacugcgcccugauggacugcaucauguucgacgcggccgucuccggcggccucaacauccccauccugcgcgccgugcugccgcgggacaugguguuccgcaccagcucccccaaggucgugcucuga

SEQ ID NO: 8123 - RNA, 1707 nt, Artificial Sequence
  derived and/or modified CDS sequence (opt1) from LASV(Lassa virus/H.sapiens-wt/NGA/2016/ISTH_0779;Clade II)__AVO03656__NP
agcguguccaaggaggucaagagcuuccuguggacccagucccuccgccgggagcugagcggcuacugcuccaacaucaagcuccagguggugaaggacgcccaggcccugcugcacgggcuggacuucagcgaggucuccaacgugcagcgccucaugcggaagcagaagcgcgacgacaacgaccugaagcggcugcgcgaccucaaccaggcggugaacaaccuggucgagcucaagagcgugcagcagaaguccauccugcgggugggcacccugagcuccgacgaccugcucauccuggccgccgaccuggagaagcucaagagcaaggucauccgcaccgagcggccccuguccagcgggguguacaugggcaaccuguccagccagcagcucgagcagcgcaaggcccugcugaacaugaucgggaugaccggcggcucccagggggcccagccgggccgggacggggugguccgcgugugggacgugaagaacagcgaccuccugaacaaccaguucggcaccaugcccucccugacccucgcgugccugacgaagcaggggcaggucgaccugaacgacgccgugcucgcccugaccgaccugggccucaucuacaccgccaaguaccccaacaccagcgaccuggaccggcugagccagucccaccccauccucaacaugguggacacgaagaaguccagccugaacaucagcggcuacaacuucucccugggggcggccgucaaggccggcgccugcaugcucgacgggggcaacaugcuggagaccaucaaggugaccccgcagaccauggacggcauccucaagagcauccugaaggugaagcgcgcccuggggauguucgucuccgacacgcccggcgagcggaaccccuacgagaacauccuguacaagaucugccucagcggggagggcuggcccuacaucgcgucccgcaccagcaucaccgggcgggccugggagaacaccaucguggaccuggaguccgacagcaagccgcagaagaugggcacgaccggcuccaacaagagccugcaguccgccggguuccccgccggccucaccuacagccagcugaugacccugaaggacuccaugaugcagcuggaccccagcgccaagacguggaucgacaucgaggggcgccccgaggacccgguggagaucgcgcucuaccagcccaucuccggcugcuacauccacuucuuccgggagcccaccgaccugaagcaguucaagcaggacgccaaguacagccacgggaucgacgucgccgaccuguucagcgcccagcccggccucaccuccgccgugaucgaggcgcugccgcgcaacaugguccugaccugccagggcagcgacgacaucaagaagcuccuggacucccaggggcggcgcgacaucaagcugaucgacaucagccucaacaaggccgacucccgccgguucgagaacgccgugugggaccagugcaaggaccugugccacaugcacacgggcguggucguggagaagaagaagcgcgggggcaaggaggagaucacgccccacugcgcccugauggacugcaucauguucgacgccgcggugagcgggggccucaacauccccauccugcgggccguccugccccgcgacaugguguuccggaccuccagcccgaaggugguccucuga

SEQ ID NO: 8124 - RNA, 1710 nt, Artificial Sequence
  derived and/or modified CDS sequence (opt1) from LASV(Lassa virus/H.sapiens-wt/NGA/2016/ISTH_0917;Clade II)__AVO03536__NP
augagcgccuccaaggaggugaaguccuuccuguggacccagagccuccgccgggagcugagcggcuacugcuccaacaucaagcugcaggucgugaaggacgcccaggcgcuccugcacgggcuggacuucagcgagguguccaacguccagcgccucaugcggaagcagaagcgcgacgacagcgaccugaagcggcugcgcgaccucaaccaggccgugaacaaccugguggagcugaaguccacccagcagaaguccauccuccgggucggcacccugagcagcgacgaccugcucacccuggccaccgaccuggagaagcucaaguccaaggugauccgcaccgagcggccccugagcuccgggguguacaugggcaaccugagcacgcagcagcucgaccagcgccgggcccugcugaacaugaucgggauggucggcggcucccaggggaccagcgccggccgcgacgggaucgugcgggugugggacguccgcaacccggagcuccugaacaaccaguucggcaccaugcccucccugacccucgcgugccugacgaagcagggccagguggaccugaacgacgccgugcaggcccucaccgaccuggggcugaucuacaccgccaaguaccccaacagcagcgaccucgaccggcugucccagagccaccccauccugaacaugaucgacaccaagaaguccagcaucaacaucuccggcuacaacuucagccucggggcggccgucaaggccggcgccugcaugcuggacgggggcaacaugcuggagacgaucaagguguccccgcagagcaucgacggcauccucaaguccauccugaaggugaagcgcacccuggggauguucgucagcgacacccccggcgagcggaaccccuacgagaacauccucuacaagaucugccuguccggggacggcuggcccuacaucgccagccgcaccuccaucacggggcgggcgugggagaacaccgugguggaccuggagagcgacgacaagccgaagaagcccggcaacaacgaguccaaccgcagccuccaguccgccggcuuccccgccgggcugaccuacagccagcugaugacccucaaggacuccaugcugcagcuggaccccaacgccaagacguggauggacaucgagggccggccggacgaccccgucgagaucgcccuguaccagcccaacagcgggugcuacauccacuucuuccgcgagcccaccgaccucaagcaguucaagcaggacgcgaaguacagccacggcaucgacaucggggaccuguucgccucccagccgggccugaccagcgccgugaucgaggcccucccccgcaacauggugaucacgugccagggcuccgaggacaucaagaagcugcuggagagccaggggcggaaggacauccgccucgucgacaucucccugagcaaggccgacucccggaaguucgagaacgcggugugggaccaguacaaggaccugugccacaugcacaccggcaucgucguggagaagaagaagaagggcgggaaggaggagaucacgccccacugcgcccucauggacugcaucauguucgacgccgccgugaugggcgggcuggacgccaagguccugcgcgcggugcucccccgggacaugguguuccgcaccagcaccccgcgggucgugcuguga

SEQ ID NO: 8125 - RNA, 1710 nt, Artificial Sequence
  derived and/or modified CDS sequence (opt1) from LASV(Lassa virus/H.sapiens-wt/NGA/2016/ISTH_0919;Clade II)__AVO03660__NP
augagcgccuccaaggaggugaaguccuuccuguggacccagagccuccgccgggagcugagcggcuacugcuccaacaucaagcugcaggucgugaaggacgcccaggcgcuccugcacgggcuggacuucagcgagguguccaacguccagcgccucaugcggaagcagaagcgcgacgacagcgaccugaagcggcugcgcgaccucaaccaggccgugaacaaccugguggagcugaaguccacccagcagaaguccauccuccgggucggcacgcugaccagcgacgaccugcucacccuggccgccgaccuggagaagcucaagagcaaggugauccgcaccgagcggccccuguccagcgggguguacaugggcaaccuguccacgcagcagcucgagcagcgccgggcccugcugaaccucaucgggauggucggcggcgcgcagggggcccagccgggccgcgacgggguggugcgggucugggacgugaagaaccccgaccugcugaacaaccaguucggcaccaugcccagccucacccuggccugccugaccaagcagggccagguggaccucaacgacgucgugcuggcccugacggaccucgggcugaucuacaccgcgaaguaccccaacuccagcgaccuggaccgccucucccagagccacccgauccugaacaugguggacaccaagaaguccagccugaacaucagcggcuucaacuucucccucggggccgccgucaaggccggcgccugcaugcuggacgggggcaacaugcuggagaccaucaaggugacgccccagaccauggacggcauccucaagagcauccugaaggugaagaagucccuggggauguucgucagcgacacccccggcgagcggaaccccuacgagaacauccucuacaagaucugccuguccggggacggcuggccguacaucgcgagccgcaccuccaucguggggcgggccugggagaacacgaccguggaccuggagagcgacggcaagccccacaaggucggcaccgccggguccaacaagagccuccaguccgccggcuuccccaccgggcugacguacagccagcugaugacccugaaggacuccaugaugcagcucgaccccagcgccaagaccuggaucgacaucgagggccgcccggaggaccccguggagaucgcgcuguaccagcccauguccgggugcuacauccacuucuuccgggagcccaccgaccugaagcaguucaagcaggacgccaaguacagccacggcaucgacgucgccgaccucuucccggcccagcccggccugacguccgccgugaucgaggcgcugccccgcaacauggugcugaccugccaggggagcgacgacaucaagcggcuccuggacagccagggccgccgcgacaucaagcucaucgacaucgcccuguccaaggccgacagccggcgcuucgagaacgccgucugggaccagugcaaggaccugugccacaugcacaccggggugguggucgagaagaagaagcggggcgggaaggaggagaucacgccccacugcgcccucauggacugcaucauguacgacgcggccguguccggcggccugaacaucccggugcugcgcgccguccucccccgggacaugguguuccgcaccagcucccccaaggugguccuguga

SEQ ID NO: 8126 - RNA, 1710 nt, Artificial Sequence
  derived and/or modified CDS sequence (opt1) from LASV(Lassa virus/H.sapiens-wt/NGA/2016/ISTH_1006;Clade II)__AVO03644__NP
augagcgccuccaaggaggugaaguccuuccuguggacccagagccuccgccgggagcugagcggcuacugcuccaacaucaagcugcaggucgugaaggacgcccaggcgcuccugcacgggcuggacuucagcgagguguccaacguccagcgccucaugcggaagcagaagcgcgacgacagcgaccugaagcggcugcgcgaccucaaccaggccgugaacaaccugguggagcugaaguccacccagcagaaguccauccuccgggucggcacccugaccagcgacgaccugcucacccuggccgccgaccuggagaagcucaagagcaaggugauccgcaccgagcggccccuguccagcgggguguacaugggcaaccuguccacgcagcagcucgagcagcgccgggcccugcugaacaugaucgggauggucggcggcacccaggggacccagccgggccgcgacgggguggugcgggucugggacgugaagaaccccgaccuccugaacaaccaguucggcaccaugcccagccugacgcucgcgugccugaccaagcagggccagguggaccugaacgacgccguccucgcccugaccgaccuggggcucaucuacaccgccaaguaccccaacuccagcgaccuggaccgccugucccagagccacccgauccucaacaugguggacacgaagaaguccagccugaacaucagcggcuacaacuucucccugggggcggccgugaaggccggcgccugcaugcucgacgggggcaacaugcuggagaccaucaaggucacgccccagaccauggacggcauccucaagagcauccugaaggugaagaagucccuggggauguucgugagcgacacccccggcgagcggaaccccuacgagaacauccuguacaagaucugccucuccggggacggcuggccguacaucgccagccgcaccuccaucgucgggcgggcgugggagaacaccaccguggaccuggagagcgacggcaagccccagaaggugggcacggccggguccaacaagagccugcaguccgccggcuuccccaccgggcucaccuacagccagcugaugacccugaaggacuccaugaugcagcuggaccccagcgccaagacguggaucgacaucgagggccgcccggaggaccccgucgagaucgcccucuaccagcccauguccgggugcuacauccacuucuuccgggagcccaccgaccugaagcaguucaagcaggacgcgaaguacagccacggcaucgacguggccgaccuguucccggcccagcccggccucaccuccgccgucaucgaggcccugccccgcaacauggugcugaccugccaggggagcgacgacaucaagcggcuccuggacagccagggccgccgcgacaucaagcugaucgacaucucccucagcaaggcggacucccggcgcuucgagaacgccgugugggaccagugcaaggaccugugccacaugcacacgggggucgugguggagaagaagaagcggggcgggaaggaggagaucacgccccacugcgcccugauggacugcaucauguacgacgccgccgucagcggcggccucaacaucccggugcugcgcgcggugcugccccgggacauggucuuccgcaccuccagccccaagguggugcucuga

SEQ ID NO: 8127 - RNA, 1710 nt, Artificial Sequence
  derived and/or modified CDS sequence (opt1) from LASV(Lassa virus/H.sapiens-wt/NGA/2016/ISTH_1026;Clade II)__AVO03590__NP
augagcgccuccaaggaggugaaguccuuccuguggacccagagccuccgccgggagcugagcggcuacugcuccaacaucaagcugcaggucgugaaggacgcccaggcgcuccugcacgggcuggacuucagcgagguguccaacguccagcgccucaugcggaagcagaagcgcgacgacagcgaccugaagcggcugcgcgaccucaaccaggccgugaacaaccugguggagcugaaguccacccagcagaaguccauccuccgggucggcacgcugaccagcgacgaccugcucacccuggccgccgaccuggagaagcucaagagcaaggugauccgcaccgagcggccccuguccagcgggguguacaugggcaaccuguccgcccagcagcucgagcagcgccgggcgcugcugaaccucaucgggauggucggcggcgcccaggggacgcagccgggccgcgacgggguggugcgggucugggacgugaagaaccccgaccugcugaacaaccaguucggcaccaugcccagccucacccuggccugccugaccaagcagggccagguggaccucaacgacgccguccuggcgcugacggaccucgggcugaucuacaccgccaaguaccccaacuccagcgaccuggaccgccucucccagagccacccgauccugaacaugguggacaccaagaaguccagccugaacaucagcggcuucaacuucucccucggggccgccgugaaggccggcgcgugcaugcuggacgggggcaacaugcuggagaccaucaaggucacgccccagaccaucgacggcauccucaagagcauccugaaggugaagaagucccuggggauguucgugagcgacacccccggcgagcggaaccccuacgagaacauccucuacaagaucugccuguccggggacggcuggccguacaucgccagccgcaccuccaucgucgggcgggccugggagaacacgaccguggaccuggagagcgacggcaagccccacaaggugggcaccgccggguccaacaagagccuccaguccgccggcuuccccaccgggcugacguacagccagcugaugacccugaaggacuccaugaugcagcucgaccccagcgcgaagaccuggaucgacaucgagggccgcccggaggaccccgucgagaucgcccuguaccagcccauguccgggugcuacauccacuucuuccgggagcccaccgaccugaagcaguucaagcaggacgccaaguacagccacggcaucgacguggccgaccucuucccggcccagcccggccugacguccgcggucaucgaggcccugccccgcaacauggugcugaccugccaggggagcgacgacaucaagcggcuccuggacagccagggccgccgcgacaucaagcucaucgacaucgcccuguccaaggccgacagccggcgcuucgagaacgccgugugggaccagugcaaggaccugugccacaugcacaccggggucgugguggagaagaagaagcggggcgggaaggaggagaucacgccccacugcgcgcucauggacugcaucauguacgacgccgccgucuccggcggccugaacaucccggugcugcgcgccgugcucccccgggacauggucuuccgcaccagcucccccaagguggugcuguga

SEQ ID NO: 8128 - RNA, 1710 nt, Artificial Sequence
  derived and/or modified CDS sequence (opt1) from LASV(Lassa virus/H.sapiens-wt/NGA/2016/ISTH_1070;Clade II)__AVO03652__NP
augagcgccuccaaggaggugaaguccuuccuguggacccagagccuccgccgggagcugagcggcuacugcuccaacaucaagcugcaggucgugaaggacgcccaggcgcuccugcacgggcuggacuucagcgagguguccaacguccagcgccucaugcggaagcagaagcgcgacgacggcgaccugaagcggcugcgcgaccucaaccaggccgugaacaaccugguggagcucaagagcacccagcagaaguccguccugcggguggggacccugaccagcgacgaccugcucacccuggccgccgaccuggagaagcucaaguccaaggugauccgcaccgagcggccccugagcuccggcgucuacauggggaaccugagcacgcagcagcucgagcagcgccgggcccugcuguccaugaucggcauggugggcggggcgcagggcacccagccggggcgcgacggcgugguccgggugugggacgugaagaaccccgaccuccugaacaaccaguucgggaccaugcccagccugacccucgccugccugacgaagcagggccaggucgaccugaacgacguggugcucgcccugaccgaccugggccucaucuacaccgccaaguaccccaacuccagcgaccuggaccgccugucccagagccacccgauccucaacauggucgacaccaagaaguccagccugaacaucagcggguacaacuucucccugggcgcggccgugaaggccggggccugcaugcucgacggcggcaacaugcuggagacgaucaaggugacgccccagaccauggacgggauccucaagagcauccugaaggucaagaagucccugggcauguucgugagcgacacccccggggagcggaaccccuacgagaacauccuguacaagaucugccucuccggcgacggguggccguacaucgccagccgcaccgcgaucgugggccgggccugggagaacaccaccgucgaccuggaguccgacggcaagccccagaaggugggggccaccggcagcaacaagucccugcagagcgccggguuccccacgggccucaccuacucccagcugaugacccugaaggacagcaugaugcagcuggaccccuccgccaagaccuggaucgacaucgaggggcgcccggaggaccccgucgagaucgcgcucuaccagcccaugagcggcugcuacauccacuucuuccgggagcccacggaccugaagcaguucaagcaggacgccaaguacucccacggcaucgacgugaccgaccuguucagcgcccagccggggcucaccuccgccgugaucgaggcccugccccgcaacaugguccugaccugccagggcagcgacgacaucaagcggcuccuggacagccaggggcgccgcgacaucaagcugaucgacaucgcgcucuccaaggccgacagccggcgcuucgagaacgccgugugggaccagugcaaggaccugugccacaugcacacgggcguggucguggagaagaagaagcgcgggggcaaggaggagaucacgccccacugcgcccugauggacugcaucauguacgacgccgcgguguccggcgggcucaacauccccguccugcgggccgugcugccgcgggacaugguguuccgcaccagcucccccaaggucgugcucuga

SEQ ID NO: 8129 - RNA, 1710 nt, Artificial Sequence
  derived and/or modified CDS sequence (opt1) from LASV(Lassa virus/H.sapiens-wt/NGA/2016/ISTH_1150;Clade II)__AVO03628__NP
augagcgccuccaaggaggugaaguccuuccuguggacccagagccuccgccgggagcugagcggcuacugcuccagcaucaagcugcaggucgugaaggacgcccaggcgcuccugcacgggcuggacuucuccgaggugagcaacguccagcgccucaugcggaagcagaagcgcgacgacuccgaccugaagcggcugcgcgaccucaaccaggccgugaacaaccugguggagcucaagagcacccagcagaaguccauccugcgggucggcacccugaccagcgacgaccugcucacccuggccgccgaccuggagaagcucaaguccaaggugauccgcaccgagcggccccugagcuccgggguguacaugggcaaccugagcacgcagcagcucgagcagcgccgggcccugcuguccaugaucgggauggucggcggcgcgcaggggacccagccgggccgcgacgggguggugcgggucugggacgugaagaaccccgaccuccugaacaaccaguucggcaccaugcccagccugacccucgccugccugacgaagcagggccagguggaccugaacgacaccguccucgcccugaccgaccuggggcucaucuacaccgccaaguaccccaacuccagcgaccuggaccgccugagccagucccacccgauccucaacaugguggacaucaagaaguccagccugaacaucagcggcuacaacuucucccugggggcggccgugaaggccggcgccugcaugcucgacgggggcaacaugcuggagacgaucaaggucacgccccagaccauggacggcauccucaagagcauccugaaggugaagcggucccuggggauguucgugagcgacacccccggcgagcgcaaccccuacgagaacauccuguacaagaucugccucuccggggacggcuggccguacaucgccagccggaccuccaucgucgggcgcgcgugggagaacaccaccguggaccuggagagcgacggcaagccccagaaggugggcaccgccggguccaacaagagccugcaguccgccggcuuccccacggggcucaccuacagccagcugaugacccugaaggacuccaugaugcagcuggaccccagcgccaagaccuggaucgacaucgagggccggccggaggaccccgucgagaucgcccucuaccagcccauguccgggugcuacauccacuucuuccgcgagcccacggaccugaagcaguucaagcaggacgcgaaguacagccacggcaucgacgugaccgaccuguucagcgcccagccgggccucaccuccgccgucaucgaggcccugccccgggggauggugcugaccugccagggcagcgacgacaucaagaagcuccuggacucccaggggcgccgcgacaucaagcugaucgacaucagccucuccaaggccgacagccggcgcuucgagaacgcggugugggaccagugcaaggaccugugccacaugcacacgggcgucgugguggagaagaagaagcgcgggggcaaggaggagaucacgccccacugcgcccugauggacugcaucauguucgacgccgccgucuccggcgggcucaacauccccauccugcgggccgugcugccgcgggacaugguguuccgcaccagcucccccaaggucgugcucuga

SEQ ID NO: 8130 - RNA, 1710 nt, Artificial Sequence
  derived and/or modified CDS sequence (opt1) from LASV(Lassa virus/H.sapiens-wt/NGA/2016/ISTH_1174;Clade II)__AVO03556__NP
augagcgccuccaaggaggugaaguccuuccuguggacccagagccuccgccgggagcugagcggcuacugcuccaacaucaagcugcaggucgugaaggacgcccaggcgcuccugcacgggcuggacuucagcgagguguccaacguccagcgccucaugcggaagcagaagcgcgacgacagcgaccugaagcggcugcgcgaccucaaccaggccgugaacaaccugguggagcugaaguccacccagcagaaguccauccuccgggucggcacgcugaccagcgacgaccugcucacccuggccgccgaccuggagaagcucaagagcaaggugauccgcaccgagcggccccuguccagcgggguguacaugggcaaccuguccacgcagcagcucgagcagcgccgggcccugcugaacaugaucgggauggucggcggcgcgcagagcacccagccggggcgcgacggcguggugcgggucugggacgugaagaaccccgaccuccugaacaaccaguucgggaccaugcccucccugacccucgccugccugacgaagcagggccagguggaccugaacgacgccguccucgcccugaccgaccuggggcucaucuacaccgcgaaguaccccaacagcuccgaccuggaccgccugagccagagccacccgauccucaacaugguggacaccaagaaguccagccugaacaucuccggcuacaacuucagccugggcgccgccgugaaggccggggccugcaugcucgacggcgggaacaugcuggagacgaucaagaucacgccccagaccauggacggcauccugaaguccauccucaaggucaagcggagccugggcauguucguguccgacacccccggggagcgcaaccccuacgagaacauccuguacaaggugugccucagcggcgacggguggccguacaucgcgucccggaccagcaucgucggccgcgccugggagaacaccaccguggaccuggaguccgacgggaagccccagaaggugggcaccgucggcagcaacaagucccugcagagcgccggguuccccacgggccucaccuacucccagcugaugacccugaaggacagcaugaugcagcuggaccccuccgccaagaccuggaucgacaucgaggggcggccggaggaccccguggagaucgcccucuaccagcccaugagcggcugcuacauccacuucuuccgcgagcccacggaccugaagcaguucaagcaggacgcgaaguacucccacgggaucgacgucgccgaccuguucccggcccagcccggccucaccagcgccgugaucgaggcccugccccggaacauggugcugaccugccagggcagcgacgacaucaagcgccuccuggacucccaggggcgccgggacaucaagcugaucgacaucgcgcucagcaaggccgacucccgccgguucgagaacgccgucugggaccagugcaaggaccugugccacaugcacaccggcgugguggucgagaagaagaagcgcgggggcaaggaggagaucacgccccacugcgcccugauggacugcaucauguacgacgccgcggugagcgggggccucaacaucccggugcugcgggccguccugccccgcgacaugguguuccggaccuccagccccaaggugguccucuga

SEQ ID NO: 8131 - RNA, 1710 nt, Artificial Sequence
  derived and/or modified CDS sequence (opt1) from LASV(Lassa virus/H.sapiens-wt/NGA/2016/ISTH_1207;Clade II)__AVO03600__NP
augagcgccuccaaggaggugaaguccuuccuguggacccagagccuccgccgggagcugagcggcuacugcuccaacaucaagcugcaggucgugaaggacgcccaggcgcuccugcacgggcuggacuucagcgagguguccaacguccagcgccucaugcggaagcagaagcgcgacgacagcgaccugaagcggcugcgcgaccucaaccaggccgugaacaaccugguggagcugaaguccacccagcagaaguccauccuccgggucggcacgcugaccagcgacgaccugcucauccuggccgccgaccuggagaagcucaagagcaaggugauccgcaccgagcggccccuguccagcgggguguacaugggcaaccuguccacccagcagcucgagcagcgccgggcccugcugaacaugaucgggauggucgacggcgcgcagggcacgcagccggggcgcgacggcguggugcgggucugggacgugaagaaccccgaccuccugaacaaccaguucgggaccaugcccagccugacccucgccugccugaccaagcagggccagguggaccugaacgacgccguccucgcccugacggaccuggggcucaucuacaccgcgaaguaccccaacuccagcgaccuggaccgccugucccagagccacccgauccucaacaugguggacaccaagaaguccagccugaacaucagcggcuacaacuucucccugggcgccgccgugaaggccggggccugcaugcucgacggcgggaacaugcuggagaccaucaaggucacgccccagaccauggacggcauccucaagagcauccugaaggugaagaagucccugggcauguucgugagcgacacccccggggagcggaaccccuacgagaacauccuguacaagaucugccucuccggcgacggguggccguacaucgcgagccgcaccuccaucgucggccgggccugggagaacacgaccguggaccuggagagcgacgggaagucccagaaggugggcaccgccggcagcaacaagucccugcagagcgccggguuccccaccggccucacguacucccagcugaugacccugaaggacagcaugaugcagcuggaccccuccgccaagaccuggaucgacaucgaggggcgccccgaggacccggucgagaucgcgcucuaccagcccaugagcggcugcuacauccacuucuuccgggagcccaccgaccugaagcaguucaagcaggacgccaaguacucccacgggaucgacguggccgaccuguuccccgcccagccgggccucacgagcgccgucaucgaggcgcugccccgcaacauggugcugaccugccagggcagcgacgacaucaagcggcuccuggacucccaggggcgccgcgacaucaagcugaucgacaucgcccucagcaaggccgacucccggcgcuucgagaacgccgugugggaccagugcaaggaccugugccacaugcacaccggcgucgugguggagaagaagaagcgcgggggcaaggaggagaucacgccccacugcgcccugauggacugcaucauguacgacgcggccgucagcgggggccucaacauccccgugcugcgggccgugcugccgcgggacauggucuuccgcaccuccagccccaagguggugcucuga

SEQ ID NO: 8132 - RNA, 1710 nt, Artificial Sequence
  derived and/or modified CDS sequence (opt1) from LASV(Lassa virus/H.sapiens-wt/NGA/2016/ISTH_1306;Clade II)__AVO03624__NP
augagcgccuccaaggaggugaaguccuuccuguggacccagagccuccgccgggagcugagcggcuacugcuccaacaucaagcugcaggucgugaaggacgcccaggcgcuccugcacgggcuggacuucagcgagguguccaacguccagcgccucaugcggaagcagaagcgcgacgacggcgaccugaagcggcugcgcgaccucaaccaggccgugaacaaccugguggagcucaagagcacccagcagaaguccauccugcgggucgggacgcugaccagcgacgaccugcucacccuggccgccgaccuggagaagcucaaguccaaggugauccgcaccgagcggccccugagcuccggcguguacauggggaaccugagcacgcagcagcucgagcagcgccgggcccugcugaacaugaucggcauggucggcggggcgcagggcacccagccggggcgcgacggcguggugcgggucugggacgugaagaaccccgaccuccugaacaaccaguucgggaccaugcccucccugacccucgccugccugacgaagcagggccagguggaccugaacgacgccguccucgcccugaccgaccugggccucaucuacaccgcgaaguaccccaacagcuccgaccuggaccgccugagccagucccacccgauccucaacaugguggacaccaagaaguccagccugaacaucagcggguacaacuucagccugggcgccgccgugaaggccggggccugcaugcucgacggcggcaacaugcuggagacgaucaaggucacgccccagaccauggacgggauccugaaguccauccucaaggugaagaagucccugggcauguucgugagcgacacccccggggagcggaaccccuacgagaacauccuguacaagaucugccucagcggcgacggguggccguacaucgcgucccgcaccagcaucgucggccgggccugggagaacaccaccguggaccuggaguccgacggcaagccccagaagguggggaccgccggcagcaacaagucccugcagagcgccggguuccccacgggccucaccuacucccagcugaugacccugaaggacagcaugaugcagcuggaccccuccgccaagaccuggaucgacaucgaggggcgcccggaggaccccgucgagaucgcgcucuaccagcccaugagcggcugcuacauccacuucuuccgggagcccacggaccugaagcaguucaagcaggacgccaaguacucccacggcaucgacguggccgaccuguucccggcccagcccgggcucaccagcgccgucaucgaggcgcugccccgcaacauggugcugaccugccagggcuccgacgacaucaagcggcuccuggacagccaggggcgccgcgacaucaagcugaucgacaucgcccucagcaaggccgacucccggcgcuucgagaacgccgugugggaccagugcaaggaccugugccacaugcacaccggcgucgugguggagaagaagaagcgcgggggcaaggaggagaucacgccccacugcgcccugauggacugcaucauguacgacgcggccgucagcggcgggcucaacaucccggugcugcgggccgugcugccccgggacauggucuuccgcaccuccagccccaagguggugcucuga

SEQ ID NO: 8133 - RNA, 1710 nt, Artificial Sequence
  derived and/or modified CDS sequence (opt1) from LASV(Lassa virus/H.sapiens-wt/NGA/2016/ISTH_1311;Clade II)__AVO03576__NP
augagcgccuccaaggaggugaaguccuuccuguggacccagagccuccgccgggagcugagcggcuacugcuccaacaucaagcugcaggucgugaaggacgcccaggcgcuccugcacgggcuggacuucagcgagguguccaacguccagcgccucaugcggaagcagaagcgcgacgacggcgaccugaagcggcugcgcgaccucaaccaggccgugaacaaccugguggagcucaagagcacccagcagaaguccguccugcggguggggacgcugaccagcgacgaccugcucauccuggccgccgaccuggagaagcucaaguccaaggugauccgcaccgagcggccccugagcuccggcgucuacauggggaaccugagcacccagcagcucgagcagcgccgggcccugcuguccaugaucggcauggugggcggggcgcagggcacgcagccggggcgcgacggcgugguccgggugugggacgugaagaaccccgaccuccugaacaaccaguucgggaccaugcccagccugacccucgccugccugaccaagcagggccaggucgaccugaacgacgccgugcucgcccugacggaccugggccucaucuacaccgugaaguaccccaacuccagcgaccuggaccgccugucccagagccacccgauccucaacauggucgacaccaagaaguccagccugaacaucagcggguacaacuucucccugggcgcggccgugaaggccggggccugcaugcucgacggcggcaacaugcuggagaccaucaaggugacgccccagaccaucgacgggauccucaagagcauccugaaggucaagcggucccugggcauguucgugagcgacacccccggggagcgcaaccccuacgagaacauccuguacaagaucugccucuccggcgacggguggccguacaucgccagccggaccuccaucgugggccgcgcgugggagaacacgaccgucgaccuggagagcgacggcaagccccagaaggugggggccgccggcuccaacaagagccugcaguccgccggguuccccaccggccucaccuacagccagcugaugacgcugaaggacuccaugaugcagcuggaccccagcgccaagaccuggaucgacaucgaggggcggccggaggaccccgucgagaucgcgcucuaccagcccauguccggcugcuacauccacuucuuccgcgagcccaccgaccugaagcaguucaagcaggacgccaaguacagccacggcaucgacgugaccgaccuguucuccgcccagccggggcucacgagcgccgugaucgaggcccugccccggaacaugguccugaccugccagggcagcgacgacaucaagaagcuccuggacucccaggggcgccgcgacaucaagcugaucgacaucagccucaacaagaccgacucccggcgcuucgagaacgcggugugggaccagugcaaggaccugugccacaugcacaccggcguggucguggagaagaagaagcgcgggggcaaggaggagaucacgccccacugcgcccugauggacugcaucauguucgacgccgccgugagcggcgggcucaacauccccauccugcgggccguccugccgcgggacaugguguuccgcaccuccagccccaaggugguccucuga

SEQ ID NO: 8134 - RNA, 1710 nt, Artificial Sequence
  derived and/or modified CDS sequence (opt1) from LASV(Lassa virus/H.sapiens-wt/NGA/2016/ISTH_1423;Clade II)__AVO03578__NP
augagcgccuccaaggaggugaaguccuuccuguggacccagagccuccgccgggagcugagcggcuacugcuccaacaucaagcugcaggucgugaaggacgcccaggcgcuccugcacgggcuggacuucagcgagguguccaacguccagcgccucaugcggaagcagaagcgcgacgacagcgaccugaagcggcugcgcgaccucaaccaggccgugaacaaccugguggagcugaaguccacccagcagaaguccauccuccgggucggcacccugaccagcgacgaccugcucacccuggccgccgaccuggagaagcucaagagcaaggugauccgcaccgagcggccccuguccagcgggguguacaugggcaaccuguccacgcagcagcucgagcagcgccgggcccugcugaacaugaucgggauggucagcggcacccagggcacccagccggggcgcgacggcguggugcgggucugggacgugaagaaccccgaccuccugaacaaccaguucgggaccaugcccucccugacgcucgcgugccugaccaagcagggccagguggaccugaacgacgccguccucgcccugaccgaccuggggcucaucuacaccgccaaguaccccaacagcuccgaccuggaccgccugagccagagccacccgauccucaacaugguggacacgaagaaguccagccugaacaucuccggcuacaacuucagccugggcgcggccgugaaggccggggccugcaugcucgacggcgggaacaugcuggagaccaucaaggucacgccccagaccauggacggcauccugaaguccauccucaaggugaagaagucccugggcauguucgugagcgacacccccggggagcggaaccccuacgagaacauccuguacaagaucugccucagcggcgacggguggccguacaucgccucccgcaccagcaucgucggccgggcgugggagaacaccaccguggaccuggaguccgacgggaagccccagaagaugggcacggccggcagcaacaagucccugcagagcgccggguuccccaccggccucaccuacucccagcugaugacccugaaggacagcaugaugcagcuggaccccuccgccaagacguggaucgacaucgaggggcgcccggaggaccccguggagaucgcccucuaccagcccaugagcggcugcuacauccacuucuuccgggagcccaccgaccugaagcaguucaagcaggacgcgaaguacucccacgggaucgacgucgccgaccuguucccggcccagcccggccucaccagcgccgugaucgaggcccugccccgcaacaugguccugaccugccagggcagcgacgacaucaagaagcuccuggacucccaggggcggcgcgacaucaagcugaucgacaucgcgcucagcaaggccgacucccgccgguucgagaacgccgugugggaccagugcaaggaccugugccacaugcacacgggcguggucguggagaagaagaagcgcgggggcaaggaggagaucacgccccacugcgcccugauggacugcaucauguacgacgccgcggugagcgggggccucaacaucccgguccugcgggccgugcugccccgcgacaugguguuccggaccuccaaccccaaggucgugcucuga

SEQ ID NO: 8135 - RNA, 1710 nt, Artificial Sequence
  derived and/or modified CDS sequence (opt1) from LASV(Lassa virus/H.sapiens-wt/NGA/2016/ISTH_1472;Clade II)__AVO03606__NP
augagcgccuccaaggaggugaaguccuuccuguggacccagagccuccgccgggagcugagcggcuacugcuccaacaucaagcugcaggucgugaaggacgcccaggcgcuccugcacgggcuggacuucagcgagguguccaacguccagcgccucaugcggaagcagaagcgcgacgacagcgaccugaagcggcugcgcgaccucaaccaggccgugaacaaccugguggagcugaaguccacccagcagaaguccauccuccgggucggcacccugaccagcgacgaccugcucacccuggccgccgaccuggagaagcucaagagcaaggugauccgcaccgagcggccccuguccagcgggguguacaugggcaaccuguccacgcagcagcucgagcagcgccgggcccugcugaacaugaucgggauggucggcggcauccaggggacccagccgggccgcgacgggguggugcgggucugggacgugaagaaccccgaccuccugaacaaccaguucggcaccaugcccagccugacccucgcgugccugacgaagcagggccagguggaccugaacgacaccguccaggcccucaccgaccuggggcugaucuacaccgccaaguaccccaacuccagcgaccucgaccgccugucccagagccacccgauccugaacaugguggacacgaagaaguccagccucaacaucagcggcuacaacuucucccugggggccgcggugaaggccggcgccugcaugcuggacgggggcaacaugcucgagaccaucaaggucacgccccagaccauggacggcauccucaagagcauccugaaggugaagaagucccuggggauguucgugagcgacacccccggcgagcggaaccccuacgagaacauccuguacaagaucugccuguccggggacggcuggccguacaucgccagccgcaccuccaucgucgggcgggccugggagaacaccaccguggaccucgagagcgacggcaagccccagaaggugggcacggcgggguccaacaagagccugcaguccgccggcuuccccaccgggcugaccuacagccagcucaugacccugaaggacuccaugaugcagcuggaccccagcgccaagacguggaucgacaucgagggccgcccggaggaccccgucgagaucgcccuguaccagcccauguccgggugcuacauccacuucuuccgggagcccaccgaccucaagcaguucaagcaggacgccaaguacagccacggcaucgacguggcggaccuguucccggcccagcccggccugaccuccgccgucaucgaggcccucccccgcaacauggugcugaccugccaggggagcgacgacaucaagcggcugcucgacagccagggccgccgcgacaucaagcugaucgacaucucccugagcaagacggacucccggcgcuucgagaacgccgugugggaccagugcaaggaccucugccacaugcacaccggggucgugguggagaagaagaagcggggcgggaaggaggagaucacgccccacugcgcgcugauggacugcaucauguacgacgccgccgucagcggcggccugaacaucccggugcuccgcgccgugcugccccgggacauggucuuccgcaccuccagccccaagguggugcuguga

SEQ ID NO: 8136 - RNA, 1710 nt, Artificial Sequence
  derived and/or modified CDS sequence (opt1) from LASV(Lassa virus/H.sapiens-wt/NGA/2016/ISTH_1474;Clade II)__AVO03614__NP
augagcgccuccaaggaggugaaguccuuccuguggacccagagccuccgccgggagcugagcggcuacugcuccaacaucaagcugcaggucgugaaggacgcccaggcgcuccugcacgggcuggacuucagcgagguguccaacguccagcgccucaugcggaagcagaagcgcgacgacagcgaccugaagcggcugcgcgaccucaaccaggccgugaacaaccugguggagcugaaguccacccagcagaaguccauccuccgggucggcacccugaccagcgacgaccugcucacccuggccgccgaccuggagaagcucaagagcaaggugauccgcaccgagcggccccuguccagcgggguguacaugggcaaccuguccacgcagcagcucgagcagcgccgggcccugcugaacaugaucgggauggucggcggcauccaggggacccagccgggccgcgacgggguggugcgggucugggacgugaagaaccccgaccuccugaacaaccaguucggcaccaugcccagccugacccucgcgugccugacgaagcagggccagguggaccugaacgacaccguccaggcccucaccgaccuggggcugaucuacaccgccaaguaccccaacuccagcgaccucgaccgccugucccagagccacccgauccugaacaugguggacacgaagaaguccagccucaacaucagcggcuacaacuucucccugggggccgcggugaaggccggcgccugcaugcuggacgggggcaacaugcucgagaccaucaaggucacgccccagaccauggacggcauccucaagagcauccugaaggugaagcggucccuggggauguucgugagcgacacccccggcgagcgcaaccccuacgagaacauccuguacaagaucugccuguccggggacggcuggccguacaucgccagccggaccuccaucgucgggcgcgccugggagaacaccaccguggaccucgagagcgacggcaagccccagaaggugggcacggcgggguccaacaagagccugcaguccgccggcuuccccaccgggcugaccuacagccagcucaugacccugaaggacuccaugaugcagcuggaccccagcgccaagacguggaucgacaucgagggccggccggaggaccccgucgagaucgcccuguaccagcccauguccgggugcuacauccacuucuuccgcgagcccaccgaccucaagcaguucaagcaggacgccaaguacagccacggcaucgacguggcggaccuguucccggcccagcccggccugaccuccgccgucaucgaggcccucccccggaacauggugcugaccugccaggggagcgacgacaucaagcgccugcucgacagccagggccgccgggacaucaagcugaucgacaucgcccuguccaaggcggacagccgccgguucgagaacgccgugugggaccagugcaaggaccucugccacaugcacacgggggucgugguggagaagaagaagcgcggcgggaaggaggagaucacgccccacugcgcccugauggacugcaucauguacgacgccgccgucuccggcggccugaacaucccggugcuccgggcggugcugccccgcgacauggucuuccggaccagcucccccaagguggugcuguga

SEQ ID NO: 8137 - RNA, 1710 nt, Artificial Sequence
  derived and/or modified CDS sequence (opt1) from LASV(Lassa virus/H.sapiens-wt/NGA/2016/ISTH_1496;Clade II)__AVO03580__NP
augagcgccuccaaggaggugaaguccuuccuguggacccagagccuccgccgggagcugagcggcuacugcuccaacaucaagcugcaggucgugaaggacgcccaggcgcuccugcacgggcuggacuucagcgagguguccaacguccagcgccucaugcggaagcagaagcgcgacgacagcgaccugaagcggcugcgcgaccucaaccaggccgugaacaaccugguggagcugaaguccacccagcagaaguccauccucaaggucggcacgcugaccagcgacgaccugcucacccuggccgccgaccuggagaagcucaagagcaaggugauccggaccgagcgcccccuguccagcgggguguacaugggcaaccuguccacgcagcagcucgagcagcggcgcgcccugcugaacaugaucgggauggucggcggcgcgcaggggacccagccgggccgggacgggguggugcgcgucugggacgugaagaaccccgaccuccugaacaaccaguucggcaccaugcccagccugacccucgccugccugacgaagcagggccagguggaccugaacgacgccguccucgcccugaccgaccuggggcucaucuacaccgcgaaguaccccaacuccagcgaccuggaccggcugucccagagccacccgauccucaacaugguggacaccaagaaguccagccugaacaucagcggcuacaacuucucccugggggccgccgugaaggccggcgccugcaugcucgacgggggcaacaugcuggagacgaucaaggucacgccccagaccauggacggcauccucaagagcauccugaaggugaagcgcucccuggggauguucgugagcgacacccccggcgagcggaaccccuacgagaacauccuguacaagaucugccucuccggggacggcuggccguacaucgcgagccgcaccuccaucgucgggcgggccugggagaacaccaccguggaccuggagagcgacggcaagccccagaaggugggcaccaucggguccaacaagagccugcaguccgccggcuuccccacggggcucaccuacagccagcugaugacccugaaggacuccaugaugcagcuggaccccagcgccaagaccuggaucgacaucgagggccgcccggaggaccccgucgagaucgcccucuaccagcccauguccgggugcuacauccacuucuuccgggagcccacggaccugaagcaguucaagcaggacgcgaaguacagccacggcaucgacguggccgaccuguucccggcccagcccggccucaccuccgccgucaucgaggcccugccccgcaacauggugcugaccugccaggggagcgacgacaucaagcggcuccuggacagccagggccgccgcgacaucaagcugaucgacaucgcgcucuccaaggccgacagccggcgcuucgagaacgccgugugggaccagugcaaggaccugugccacaugcacaccggggucgugguggagaagaagaagcggggcgggaaggaggagaucacgccccacugcgcccugauggacugcaucauguacgacgccgcggucuccggcggccucaacaucccggugcugcgcgccgugcugccccgggacauggucuuccgcaccagcucccccaagguggugcucuga

SEQ ID NO: 8138 - RNA, 1710 nt, Artificial Sequence
  derived and/or modified CDS sequence (opt1) from LASV(Lassa virus/H.sapiens-wt/NGA/2016/ISTH_1541;Clade II)__AVO03554__NP
augagcgccuccaaggaggugaaguccuuccuguggacccagagccuccgccgggagcugagcggcuacugcuccaacaucaagcugcaggucgugaaggacgcccaggcgcuccugcacgggcuggacuucagcgagguguccaacguccagcgccucaugcggaagcagaagcgcgacgacggcgaccugaagcggcugcgcgaccucaaccaggccgugaacaaccugguggagcucaagagcacccagcagaaguccauccugcgggucgggacgcugagcuccgacgaccugcucauccuggccgccgaccuggagaagcucaagagcaaggugauccgcaccgagcggccccuguccagcggcguguacauggggaaccuguccagccagcagcucgaccagcgccgggcccugcugaacaugaucggcaugaccggcgggaaccagggcgcguccaccgggcgcgacggcaucguccgggugugggacgugaagaacgccgagcuccugaacaaccaguucgggacgaugccgagccugacccucgccugccugaccaagcagggccaggucgaccugaacgacgccgugcaggcgcucaccgaccugggccugaucuacacggccaaguaccccaacuccagcgaccucgaccgccugagccagucccaccccauccugaacaugaucgacaccaagaaguccagccucaacaucagcggguacaacuucucccugggcgccgccgugaaggccggggcgugcaugcuggacggcggcaacaugcucgagaccaucaaggucagcccccagaccauggacgggauccugaaguccauccugaaggugaagaagucccucggcauguucgugagcgacacgccgggggagcggaaccccuacgagaacauccuguacaagaucugccugagcggcgacggguggcccuacaucgccucccgcaccagcaucaucggccgggccugggagaacaccaucgucgaccucgaggccgacaacaagccccagaaguccggcaacaacgggagcaaccgcucccugcagagcgccggcuucccguccgggcugaccuacagccagcucaugacgcugaaggacuccaugcugcagcuggaccccaacgcgaagaccuggauggacaucgagggccggcccgacgaccccguggagaucgcccucuaccagccgagcagcgggugcuacauccacuucuuccgcgagcccaccgaccugaagcaguucaagcaggacgccaaguacucccacggcaucgacgugagcgaccuguucgccgcccagcccggccucaccuccgcggucaucgaggcccugccccggaacauggugaucacgugccaggggagcgaggacaucaagaagcugcucgagucccagggccgcaaggacaucaagcugguggacaucagccuguccaagcucgacagccgcaaguucgagaacgucgugugggaccaguacaaggaccugugccacaugcacaccgggaucgucguggagaagaagaagcggggcgggaaggaggagaucaccccgcacugcgcccugauggacugcaucauguucgacgccgccgugaugggcggccucgacgcgcgcguccugcgggccgugcugccccgcgacaugguguuccggaccuccacgcccaaggucgugcucuga

SEQ ID NO: 8139 - RNA, 1710 nt, Artificial Sequence
  derived and/or modified CDS sequence (opt1) from LASV(Lassa virus/H.sapiens-wt/NGA/2016/ISTH_1546;Clade II)__AVO03538__NP
augagcgccuccaaggaggugaaguccuuccuguggacccagucccuccgccgggagcugagcggcuacugcuccaacaucaagcugcaggucgugaaggacgcccaggcgcuccugcacgggcuggacuucagcgagguguccaacguccagcgccucaugcggaagcagaagcgcgacgacggcgaccugaagcggcugcgcgaccucaaccaggccgugaacaaccugguggagcucaagagcacccagcagaaguccguccugcggguggggacccugagcuccgacgaccugcucauccuggccgccgaccuggagaagcucaagagcaaggugauccgcaccgagcggccccuguccagcggcgucuacauggggaaccuguccagccagcagcucgaccagcgccgggcccugcugaacaugaucggcaugaccggcgggaaccagggcaccaacgcggggcgcgacggcaucgugcggaucugggacgugaagaacgccgagcuccugaacaaccaguucgggacgaugccgucccugacccucgccugccugaccaagcagggccaggucgaccugaacgacguggugcaggcccucaccgaccugggccugaucuacacggcgaaguaccccaacagcuccgaccucgaccgccugagccagagccaccccauccugaacaugaucgacaccaagaaguccagccucaacaucuccggguacaacuucagccugggcgccgccgucaaggccggggccugcaugcuggacggcggcaacaugcucgagaccaucaaggugagcccccagaccauggacgggauccucaagagcauccugaaggugaagcggucccugggcauguucgucagcgacacgccgggggagcgcaaccccuacgagaacauccuguacaagaucugccuguccggcgacggguggcccuacaucgcgagccggaccuccaucaucggccgcgccugggagaacaccaucguggaccucgagaccaacaacaagccccagaagccgggcaacaacgggagcaaccggucccugcagagcgccggcuuccccgccgggcugacguacucccagcucaugacccugaaggacagcaugcugcagcuggaccccaacgccaagaccuggauggacaucgagggccgccccgacgacccgguggagaucgcgcucuaccagcccuccagcgggugcuacauccacuucuuccgggagcccaccgaccugaagcaguucaagcaggacgccaaguacucccacggcaucgaccugagcgaccucuucgccgcccagcccggccugacgagcgccgucaucgaggcgcugccgcgcaacauggugaucacgugccagggguccgaggacaucaugaagcuccuggagagccagggccgcaaggacaucaagcugguggacaucucccucagcaaguccgacagccggaaguucgagaacgccgucugggaccaguacaaggaccugugccacaugcacaccgggaucguggucgagaagaagaagaagggcgggaaggaggagaucacgccccacugcgcccugauggacugcaucauguucgacgccgccgugaugggcggccucgacgcgaaggugcugcgcgccguccugcccaaggacaugguguuccggaccuccacccccaaggugguccucuga

SEQ ID NO: 8140 - RNA, 1710 nt, Artificial Sequence
  derived and/or modified CDS sequence (opt1) from LASV(Lassa virus/H.sapiens-wt/NGA/2016/ISTH_1568;Clade II)__AVO03562__NP
augagcgccuccaaggaggugaaguccuuccuguggacccagagccuccgccgggagcugagcggcuacugcuccagcaucaagcugcaggucgugaaggacgcccaggcgcuccugcacgggcuggacuucuccgaggugagcaacguccagcgccucaugcggaagcagaagcgcgacgacuccgaccugaagcggcugcgcgaccucaaccaggccgugaacaaccugguggagcucaagagcacccagcagaaguccauccugcgggucggcacgcugaccagcgacgaccugcucacccuggccgccgaccuggagaagcucaaguccaaggugauccgcaccgagcggccccugagcuccgggguguacaugggcaaccugagcucccagcagcucgagcagcgccgggcccugcugaacaugaucgggauggucggcggcgcgcaggggacgcagccgggccgcgacgggguggugcgggucugggacgugaagaaccccgaccuccugaacaaccaguucggcaccaugcccagccugacccucgccugccugaccaagcagggccagguggaccugaacgacgccguccucgcccugacggaccuggggcucaucuacaccgcgaaguaccccaacuccagcgaccuggaccgccugagccagucccacccgauccucaacaugguggacaccaagaaguccagccugaacaucagcggcuacaacuucucccugggggccgccgugaaggccggcgccugcaugcucgacgggggcaacaugcuggagaccaucaaggucacgccccagaccauggacggcauccucaagagcauccugaaggugaagcggucccuggggauguucgugagcgacacccccggcgagcgcaaccccuacgagaacauccuguacaagaucugccucuccggggacggcuggccguacaucgcgagccggaccuccaucgucgggcgcgccugggagaacacgaccguggaccuggagagcgacggcaagccccagaaggugggccccgccggguccaacaagagccugcaguccgccggcuuccccaccgggcucaccuacagccagcugaugacgcugaaggacuccaugaugcagcuggacccgagcgccaagaccuggaucgacaucgagggccggcccgaggaccccgucgagaucgcgcucuaccagcccaucuccgggugcuacauccacuucuuccgcgagccgaccgaccugaagcaguucaagcaggacgccaaguacagccacggcaucgacguggccgaccuguuccccgcccagcccggccucaccagcgccgucaucgaggcgcugccccggaacauggugcugacgugccagggguccgacgacaucaagcgccuccuggacagccagggccgccgggacaucaagcugaucgacaucgcccucuccaaggccgacagccgccgguucgagaacgccgugugggaccagugcaaggaccugugccacaugcacaccggggucgugguggagaagaagaagcgcggcgggaaggaggagaucaccccgcacugcgcccugauggacugcaucauguacgacgcggccgucuccggcggccucaacauccccgugcugcgggccgugcugccccgcgacauggucuuccggaccagcucccccaagguggugcucuga

SEQ ID NO: 8141 - RNA, 1710 nt, Artificial Sequence
  derived and/or modified CDS sequence (opt1) from LASV(Lassa virus/H.sapiens-wt/NGA/2016/ISTH_1591;Clade II)__AVO03648__NP
augagcgccuccaaggaggugaaguccuuccuguggacccagagccuccgccgggagcugagcggcuacugcuccagcaucaagcugcaggucgugaaggacgcccaggcgcuccugcacgggcuggacuucuccgaggugagcaacguccagcgccucaugcggaagcagaagcgcgacgacuccgaccugaagcggcugcgcgaccucaaccaggccgugaacaaccugguggagcucaagagcacccagcagaaguccauccugcgggucggcacccugaccagcgacgaccugcucacccuggccgccgaccuggagaagcucaaguccaaggugauccgcaccgagcggccccugagcuccgggguguacaugggcaaccugagcucccagcagcucgagcagcgccgggcccugcugaacaugaucgggauggucggcggcgcgcaggggacgcagccgggccgcgacgggguggugcgggucugggacgugaagaaccccgaccuccugaacaaccaguucggcaccaugcccagccugacccucgccugccugaccaagcagggccagguggaccugaacgacgccguccucgcccugacggaccuggggcucaucuacaccgcgaaguaccccaacuccagcgaccuggaccgccugagccagucccacccgauccucaacaugguggacaccaagaaguccagccugaacaucagcggcuacaacuucucccugggggccgccgugaaggccggcgccugcaugcucgacgggggcaacaugcuggagaccaucaaggucacgccccagaccauggacggcauccucaagagcauccugaaggugaagcggucccuggggauguucgugagcgacacccccggcgagcgcaaccccuacgagaacauccuguacaagaucugccucuccggggacggcuggccguacaucgcgagccggaccuccaucgucgggcgcgccugggagaacacgaccguggaccuggagagcgacggcaagccccagaaggugggcuccgccgggagcaacaagucccugcagagcgccggcuuccccaccgggcucaccuacucccagcugaugacgcugaaggacagcaugaugcagcuggaccccuccgccaagaccuggaucgacaucgagggccggccggaggaccccgucgagaucgcgcucuaccagcccaugagcgggugcuacauccacuucuuccgcgagcccaccgaccugaagcaguucaagcaggacgccaaguacagccacggcaucgacguggccgaccuguucccggcccagcccggccucaccuccgccgucaucgaggcgcugccccggaacauggugcugacgugccaggggagcgacgacgugaagcgccuccuggacucccagggccgccgggacaucaagcugaucgacaucgcccucagcaaggccgacucccgccgguucgagaacgccgucugggaccagugcaaggaccugugccacaugcacaccggggugguggucgagaagaagaagcgcggcgggaaggaggagaucacgccccacugcgcccugauggacugcaucauguacgacgcggccgugagcggcggccucaacaucccggugcugcgggccguccugccccgcgacaugguguuccggaccuccagccccaaggugguccucuga

SEQ ID NO: 8142 - RNA, 1710 nt, Artificial Sequence
  derived and/or modified CDS sequence (opt1) from LASV(Lassa virus/H.sapiens-wt/NGA/2016/ISTH_1604;Clade II)__AVO03542__NP
augagcgccuccaaggaggugaaguccuuccuguggacccagagccuccgccgggagcugagcggcuacugcuccaacaucaagcugcaggucgugaaggacgcccaggcgcuccugcacgggcuggacuucagcgagguguccaacguccagcgccucaugcggaagcagaagcgcgacgacggcgaccugaagcggcugcgcgaccucaaccaggccgugaacaaccugguggagcucaagagcacccagcagaaguccauccugcgggucgggacccugagcuccgacgaccugcucacccuggccgccgaccuggagaagcucaagagcaaggugauccgcaccgagcggccccuguccagcggcguguacauggggaaccuguccacccagcagcucgaccagcgccgggcccugcugaacaugaucggcauggucggcgggagccagggcacguccgcggggcgcgacggcaucgugcgggugugggacguccgcaacccggagcuccugaacaaccaguucgggaccaugcccagccugacccucgccugccugaccaagcagggccagguggaccugaacgacgccgugcaggcccucacggaccugggccugaucuacaccgcgaaguaccccaacuccagcgaccucgaccggcugagccagucccaccccauccugaacaugaucgacaccaagaaguccagcaucaacaucagcggguacaacuucucccucggcgccgccgucaaggccggggccugcaugcuggacggcggcaacaugcuggagaccaucaaggugagcccgcaguccauggacgggauccucaagagcauccugaaggugaagcgcucccugggcauguucgucagcgacacgcccggggagcggaaccccuacgagaacauccucuacaagaucugccuguccggcgacggguggcccuacaucgcgagccgcaccuccaucaccggccgggccugggagaacaccgugguggaccuggagagcgacaacaagccgaagaagcccggcaacaacgaguccaaccgcagccuccaguccgccggguuccccgccggccugacguacagccagcugaugacccucaaggacuccaugcugcagcuggaccccaacgccaagaccuggauggacaucgaggggcggccggacgaccccgucgagaucgcgcuguaccagcccaacagcggcugcuacauccacuucuuccgcgagcccaccgaccucaagcaguucaagcaggacgccaaguacagccacgggaucgacaucuccgaccuguucgccgcccagccgggccugacgagcgccgugaucgaggcgcucccccgcaacauggugaucacgugccagggcuccgaggacgucaagaagcugcuggagagccaggggcggaaggacauccgccucguggacaucucccugagcaaggccgacucccggaaguucgagaacgccgucugggaccaguacaaggaccugugccacaugcacaccggcaucgugguggagaagaagaagaagggcgggaaggaggagaucacgccccacugcgcccucauggacugcaucauguucgacgccgcggucaugaacgggcuggacgcccgcgugcugcgggccgugcucccccgcgacauggucuuccggaccagcaccccgcgcguggugcuguga

SEQ ID NO: 8143 - RNA, 1710 nt, Artificial Sequence
  derived and/or modified CDS sequence (opt1) from LASV(Lassa virus/H.sapiens-wt/NGA/2016/ISTH_1609;Clade II)__AVO03662__NP
augagcgccuccaaggaggugaaguccuuccuguggacccagucccuccgccgggagcugagcggcuacugcuccaacaucaagcugcaggucgugaaggacgcccaggcgcuccugcacgggcuggacuucagcgagguguccaacguccagcgccucaugcggaagcagaagcgcgacgacggcgaccugaagcggcugcgcgaccucaaccaggccgugaacaaccugguggagcucaagagcacccagcagaaguccauccugcgggucgggacgcugagcuccgacgaccugcucauccuggccgccgaccuggagaagcucaagagcaaggugauccgcaccgagcggccccuguccagcggcguguacauggggaaccuguccagccagcagcucgaccagcgccgggcccugcugaacaugaucggcaugaccggcgggaaccagggcaccaacacggggcgcgacggcaucguccgggugugggacgugaagaacgcggagcuccugaacaaccaguucgggaccaugccgucccugacccucgccugccugaccaagcagggccaggucgaccugaacgacgccgugcaggcccucacggaccugggccugaucuacaccgcgaaguaccccaacagcuccgaccucgaccgccugagccagagccaccccauccugaacaugaucgacaccaagaaguccagccucaacaucuccggguacaacuucagccugggcgccgccgugaaggccggggccugcaugcuggacggcggcaacaugcucgagaccaucaaggucagcccccagacgauggacgggauccucaagagcauccugaaggugaagaagucccugggcauguucgugagcgacaccccgggggagcggaaccccuacgagaacauccuguacaagaucugccuguccggcgacggguggcccuacaucgcgagccgcaccuccaucaccggccgggccugggagaacacgauggucgaccucgagaccaacaacaagagccagaagcccggcaacaacggguccaaccgcagccugcaguccgccggcuucccggccgggcugaccuacagccagcucaugacccugaaggacuccaugcugcagcuggaccccaacgccaagacguggauggacaucgagggccggcccgacgaccccguggagaucgcgcucuaccagccgagcuccgggugcuacauccacuucuuccgcgagcccaccgaccugaagcaguucaagcaggacgccaaguacagccacggcaucgacaucagcgaccuguucgccgcccagcccggccucaccuccgccgugaucgagguccugccccggaacaugaccaucacgugccaggggagcgaggacaucaagaagcugcucgagucccagggccgcaaggacaucaagcugguggacaucagccuguccaagcucgacagccgcaaguucgagaacgcggugugggaccaguucaaggaccugugccacaugcacaccgggaucgucguggagaagaagaagaagggcgggaaggaggagaucaccccgcacugcgcccugauggacugcaucauguucgacgccgccgucaugggcggccucgacgccaaggugcugcgggcggugcugccccgcgacauggucuuccggaccuccacgcccaagguggugcucuga

SEQ ID NO: 8144 - RNA, 1710 nt, Artificial Sequence
  derived and/or modified CDS sequence (opt1) from LASV(Lassa virus/H.sapiens-wt/NGA/2016/ISTH_1610;Clade II)__AVO03604__NP
augagcgccuccaaggagaucaagagcuuccuguggacccagucccuccgccgggagcugagcggcuacugcuccagcaucaagcuccagguggucaaggacgcccaggcgcugcugcacgggcuggacuucuccgaggugagcaacgugcagcgccucaugcggaagcagaagcgcgacgacuccgaccugaagcggcugcgcgaccucaaccaggccgucaacaaccugguggagcucaagagcacccagcagaaguccauccugcgggugggcacccugaccagcgacgaccugcucacccuggccgccgaccuggagaagcucaaguccaaggucauccgcaccgagcggccccugagcuccgggguguacaugggcaaccugagcacgcagcagcucgagcagcgccgggcccugcugaacaugaucgggauggugggcggcgcgcaggggacccagccgggccgcgacggggucgugcgggugugggacgucaagaaccccgaccuccugaacaaccaguucggcaccaugcccucccugacccucgccugccugacgaagcagggccagguggaccugaacgacgccgugcucgcccugaccgaccuggggcucaucuacaccgcgaaguaccccaacagcuccgaccuggaccgccugagccagagccacccgauccucaacauggucgacaccaagaaguccagccugaacaucuccggcuacaacuucagccugggggccgccgugaaggccggcgccugcaugcucgacgggggcaacaugcuggagacgaucaaggugacgccccagaccauggacggcauccugaaguccauccucaaggucaagcggagccuggggauguucguguccgacacccccggcgagcgcaaccccuacgagaacauccuguacaagaucugccucagcggggacggcuggccguacaucgcgucccggaccagcaucguggggcgcgccugggagaacaccaccgucgaccuggaguccgacggcaagccccagaaggugggcaccgccgggagcaacaagucccugcagagcgccggcuuccccacggggcucaccuacucccagcugaugacccugaaggacagcaugaugcagcuggaccccuccgccaagaccuggaucgacaucgagggccggccggaggaccccguggagaucgcgcucuaccagcccaugagcgggugcuacauccacuucuuccgcgagcccacggaccugaagcaguucaagcaggacgccaaguacucccacggcaucgacgucgccgaccuguucccggcccagcccggccucaccagcgccgugaucgaggcgcugccccggaacaugguccugaccugccaggggagcgacgacaucaagaagcuccuggacucccagggccgccgcgacaucaagcugaucgacaucgcccucagcaagaccgacucccggcgcuucgagaacgccgugugggaccagugcaaggaccugugccacaugcacacggggguggucguggagaagaagaagcggggcgggaaggaggagaucacgccccacugcgcccugauggacugcaucauguacgacgccgcggugagcggcggccucaacaucccgguccugcgcgccgugcugccccgggacaugguguuccgcaccuccagccccaaggucgugcucuga

SEQ ID NO: 8145 - RNA, 1710 nt, Artificial Sequence
  derived and/or modified CDS sequence (opt1) from LASV(Lassa virus/H.sapiens-wt/NGA/2018/ISTH_0541;Clade II)__AVV65114__NP
augagcgccuccaaggaggugaaguccuuccuguggacccagagccuccgccgggagcugagcggcuacugcuccagcaucaagcugcaggucgugaaggacgcccaggcgcuccugcacgggcuggacuucuccgaggugagcaacguccagcgccucaugcggaagcagaagcgcgacgacuccgaccugaagcggcugcgcgaccucaaccaggccgugaacaaccugguggagcucaagagcacccagcagaaguccauccugcgggucggcacgcugaccagcgacgaccugcucacccuggccgccgaccuggagaagcucaaguccaaggugauccgcaccgagcggccccugagcuccgggguguacaugggcaaccugagcacgcagcagcucgagcagcgccgggcccugcugaacaugaucgggauggucggcggcgcgcaggggacccagccgggccgcgacgggguggugcgggucugggacgugaagaaccccgaccuccugaacaaccaguucggcaccaugcccucccugacccucgccugccugacgaagcagggccagguggaccugaacgacgccguccucgcccugaccgaccuggggcucaucuacaccgcgaaguaccccaacagcuccgaccuggaccgccugagccagagccacccgauccucaacaugguggacaccaagaaguccagccugaacaucuccggcuacaacuucagccugggggccgccgugaaggccggcgccugcaugcucgacgggggcaacaugcuggagacgaucaaggucacgccccagaccauggacggcauccugaaguccauccucaaggugaagcggagccuggggauguucguguccgacacccccggcgagcgcaaccccuacgagaacauccuguacaagaucugccucagcggggacggcuggccguacaucgcgucccggaccagcaucgucgggcgcgccugggagaacaccaccguggaccuggaguccgacggcaagccccagaaggugggcgucgccgggagcaacaagucccugcagagcgccggcuuccccaccgggcucacguacucccagcugaugacccugaaggacagcaugaugcagcuggaccccuccgccaagaccuggaucgacaucgagggccggccggaggaccccguggagaucgcgcucuaccagcccaugagcgggugcuacauccacuucuuccgcgagcccaccgaccugaagcaguucaagcaggacgccaaguucucccacggcaucgacgucgccgaccuguucccggcccagcccggccucacgagcgccgugaucgaggcgcugccccggaacauggugcugaccugccaggggagcgacgacaucaagcgccuccuggacucccagggccgccgggacaucaagcugaucgacaucgcccucagcaaggccgacucccgccgguucgagaacgccgucugggaccagugcaaggaccugugccacaugcacaccggggugguggucgagaagaagaagcgcggcgggaaggaggagaucacgccccacugcgcccugauggacugcaucauguacgacgcggccgugagcggcggccucaacaucccggugcugcgggccguccugccccgcgacaugguguuccggaccuccagccccaaggugguccucuga

SEQ ID NO: 8146 - RNA, 1710 nt, Artificial Sequence
  derived and/or modified CDS sequence (opt1) from LASV(Lassa virus/H.sapiens-wt/NGA/2018/ISTH_0664;Clade II)__AVV65096__NP
augagcgccuccaaggaggugaaguccuuccuguggacccagagccuccgccgggagcugagcggcuacugcuccagcaucaagcugcaggucgugaaggacgcccaggcgcuccugcacgggcuggacuucuccgaggugagcaacguccagcgccucaugcggaagcagaagcgcgacgacuccgaccugaagcggcugcgcgaccucaaccaggccgugaacaaccugguggagcucaagagcacccagcagaaguccauccuccgggucggcacccugaccagcgacgaccugcucacccuggccgccgaccuggagaagcucaaguccaaggugauccgcaccgagcggccccugagcuccgggguguacaugggcaaccugagcacgcagcagcucgagcagcgccgggcccugcugaacaugaucgggauggucggcggcacccaggggacccagccgggccgcgacgggguggugcgggucugggacgugaagaaccccgaccuccugaacaaccaguucggcaccaugcccucccugacgcucgcgugccugaccaagcagggccagguggaccugaacgacgccguccucgcccugaccgaccuggggcucaucuacaccgccaaguaccccaacagcuccgaccuggaccgccugagccagagccacccgauccucaacaugguggacacgaagaaguccagccugaacaucuccggcuacaacuucagccugggggcggccgugaaggccggcgccugcaugcucgacgggggcaacaugcuggagaccaucaaggucacgccccagaccauggacggcauccugaaguccauccucaaggugaagaagucccuggggauguucgugagcgacacccccggcgagcggaaccccuacgagaacauccuguacaagaucugccucagcggggacggcuggccguacaucgccucccgcaccagcaucgucgggcgggcgugggagaacaccaccguggaccuggagcccgacggcaagcugcagaaggugggcacggucggguccaacaagagccuccaguccgccggcuuccccaccgggcugaccuacagccagcugaugacccugaaggacuccaugaugcagcucgaccccagcgccaagacguggaucgacaucgagggccgcccggaggaccccguggagaucgcccuguaccagcccauguccgggugcuacauccacuucuuccgggagcccaccgaccugaagcaguucaagcaggacgccaaguacagccacggcaucgacgucgcggaccucuucccggcccagcccggccugaccuccgccgugaucgaggcccugccccgcaacauggugcugaccugccaggggagcgacgacaucaagcggcugcuggacagccagggccgccgcgacaucaagcucaucgacaucucccugagcaaggccgacucccggcgcuucgagaacgcggucugggaccagugcaaggaccugugccacaugcacacgggggugguggucgagaagaagaagcggggcgggaaggaggagaucacgccccacugcgcccucauggacugcaucauguacgacgccgccgugagcggcggccugaacaucccggugcugcgcgccguccucccccgggacaugguguuccgcaccuccagccccaaggugguccuguga

SEQ ID NO: 8147 - RNA, 1710 nt, Artificial Sequence
  derived and/or modified CDS sequence (opt1) from LASV(Lassa virus/H.sapiens-wt/NGA/2018/ISTH_0959;Clade II)__AVV65100__NP
augagcgccuccaaggaggugaaguccuuccuguggacccagagccuccgccgggagcugagcggcuacugcuccaacaucaagcugcaggucgugaaggacgcccaggcgcuccugcacgggcuggacuucagcgagguguccaacguccagcgccucaugcggaagcagaagcgcgacgacagcgaccugaagcggcugcgcgaccucaaccaggccgugaacaaccugguggagcugaaguccacccagcagaaguccauccuccgggucggcacccugaccagcgacgaccugcucacccuggccgccgaccuggagaagcucaagagcaaggugauccgcaccgagcggccccuguccagcgggguguacaugggcaaccuguccacgcagcagcucgagcagcgccgggcccugcugaaccucaucgggauggucggcggcgcgcaggggacccagccgggccgcgacgggguggugcgggucugggacgugaagaaccccgaccugcugaacaaccaguucggcaccaugcccagccucacccuggccugccugacgaagcagggccagguggaccucaacgacgucgugcuggcccugaccgaccucgggcugaucuacaccgccaaguaccccaacuccagcgaccuggaccgccucucccagagccacccgauccugaacaugguggacaccaagaaguccagccugaacaucagcggcuucaacuucucccucggggcggccgucaaggccggcgccugcaugcuggacgggggcaacaugcuggagacgaucaaggugacgccccagaccauggacggcauccucaagagcauccugaaggugaagaagucccuggggauguucgucagcgacacccccggcgagcggaaccccuacgagaacauccucuacaagaucugccuguccggggacggcuggccguacaucgccagccgcaccuccaucguggggcgggcgugggagaacaccaccguggaccuggagagcgacggcaagccccacaaggucggcaccgccggguccaacaagagccuccaguccgccggcuuccccacggggcugaccuacagccagcugaugacccugaaggacuccaugaugcagcucgaccccagcgccaagaccuggaucgacaucgagggccgcccggaggaccccguggagaucgcccuguaccagcccauguccgggugcuacauccacuucuuccgggagcccacggaccugaagcaguucaagcaggacgcgaaguacagccacggcaucgacgucgccgaccucuucccggcccagcccggccugaccuccgccgugaucgaggcccugccccgcaacauggugcugaccugccaggggagcgacgacaucaagcggcuccuggacagccagggccgcaaggacaucaagcucaucgacaucgcgcuguccaagaccgacagccgccgguucgagaacgccgucugggaccagugcaaggaccugugccacaugcacacgggggugguggucgagaagaagaagcgcggcgggaaggaggagaucacgccccacugcgcccucauggacugcaucauguacgacgccgccguguccggcggccugaacaucccggugcugcgggcgguccucccccgcgacaugguguuccggaccagcucccccaaggugguccuguga

SEQ ID NO: 8148 - RNA, 1710 nt, Artificial Sequence
  derived and/or modified CDS sequence (opt1) from LASV(Lassa virus/H.sapiens-wt/NGA/2018/ISTH_1024;Clade II)__AVV65106__NP
augagcgccuccaaggaggugaaguccuuccuguggacccagagccuccgccgggagcugagcggcuacugcuccagcaucaagcugcaggucgugaaggacgcccaggcgcuccugcacgggcuggacuucuccgaggugagcaacguccagcgccucaugcggaagcagaagcgcgacgacuccgaccugaagcggcugcgcgaccucaaccaggccgugaacaaccugguggagcucaagagcacccagcagaaguccguccugcgggugggcacgcugagcuccgacgaccugcucacccuggccgccgaccuggagaagcucaagagcaaggugauccgcaccgagcggccccuguccagcggggucuacaugggcaaccuguccacccagcagcucgagcagcgccgggcccugcugaacaugaucgggauggugggcggcgcgcaggggacgcagccgggccgcgacggggugguccgggugugggacgugaagaaccccgaccuccugaacaaccaguucggcaccaugcccagccugacccucgccugccugaccaagcaggggcaggucgaccugaacgacgccgugcucgcccugacggaccugggccucaucuacaccgcgaaguaccccaacuccagcgaccuggaccgccugagccagucccacccgauccucaacaugguggacaccaagaaguccagccugaacaucagcggcuacaacuucucccugggggccgccgucaaggccggcgccugcaugcucgacgggggcaacaugcuggagaccaucaaggugacgccccagaccaucgacggcauccucaagagcauccugaaggugaagaagucccuggggauguucgucagcgacacccccggcgagcggaaccccuacgagaacauccuguacaagaucugccucuccggggacggcuggccguacaucgcgagccgcaccuccaucguggggcgggccugggagaacacgaccguggaccuggagagcgacggcaagccccagaaggucggcaccgccggguccaacaagagccugcaguccgccggcuuccccaccgggcucacguacagccagcugaugacccugaaggacuccaugaugcagcuggaccccagcgccaagaccuggaucgacaucgagggccgcccggaggaccccguggagaucgcgcucuaccagcccauguccgggugcuacauccacuucuuccgggagcccaccgaccugaagcaguucaagcaggacgccaaguacagccacggcaucgacgucguggaccuguucccggcccagcccggccucacgagcgccgugaucgaggcccugccccgcaacaugguccugaccugccagggguccgacgacaucaagcggcuccuggacagccagggccgccgcgacaucaagcugaucgacaucgcgcucuccaaggccgacagccggcgcuucgagaacgccgugugggaccagugcaaggaccugugccacaugcacaccgggguggucguggagaagaagaagcggggcgggaaggaggagaucacgccccacugcgcccugauggacugcaucauguacgacgccgcgguguccggcggccucaacaucccgguccugcgcgccgugcugccccgggacaugguguuccgcaccagcucccccaaggucgugcucuga

SEQ ID NO: 8149 - RNA, 1710 nt, Artificial Sequence
  derived and/or modified CDS sequence (opt1) from LASV(Lassa virus/H.sapiens-wt/NGA/2018/ISTH_1079;Clade II)__AVV65108__NP
augagcgccuccaaggaggugaaguccuuccuguggacccagagccuccgccgggagcugagcggcuacugcuccaacaucaagcugcaggucgugaaggacgcccaggcgcuccugcacgggcuggacuucagcgagguguccaacguccagcgccucaugcggaagcagaagcgcgacgacagcgaccugaagcggcugcgcgaccucaaccaggccgugaacaaccugguggagcugaaguccacccagcagaaguccauccuccgggucggcacccugaccagcgacgaccugcucacccuggccgccgaccuggagaagcucaagagcaaggugauccgcaccgagcggccccuguccagcgggguguacaugggcaaccuguccacgcagcagcucgagcagcgccgggcccugcugaacaugaucgggauggucggcggcacccaggggacccagccgggccgcgacgggguggugcgggucugggacgugaagaaccccgaccuccugaacaaccaguucggcaccaugcccagccugacgcucgcgugccugaccaagcagggccagguggaccugaacgacgccguccucgcccugaccgaccuggggcucaucuacaccgccaaguaccccaacuccagcgaccuggaccgccugucccagagccacccgauccucaacaugguggacacgaagaaguccagccugaacaucagcggcuacaacuucucccugggggcggccgugaaggccggcgccugcaugcucgacgggggcaacaugcuggagaccaucaaggucacgccccagaccauggacggcauccucaagagcauccugaaggugaagaagucccuggggauguucgugagcgacacccccggcgagcggaaccccuacgagaacauccuguacaagaucugccucuccggggacggcuggccguacaucgccagccgcaccuccaucgucgggcgggcgugggagaacaccaccguggaccuggagagcgacggcaagccccagaaggugggcacggccggguccaacaagagccugcaguccgccggcuuccccaccgggcucaccuacagccagcugaugacccugaaggacuccaugaugcagcuggaccccagcgccaagacguggaucgacaucgagggccgcccggaggaccccgucgagaucgcccucuaccagcccaucuccgggugcuacauccacuucuuccgggagcccaccgaccugaagcaguucaagcaggacgcgaaguacagccacggcaucgacguggccgaccuguucccggcccagcccggccucaccuccgccgucaucgaggcccugccccgcaacauggugcugaccugccaggggagcgacgacaucaagcggcuccuggacagccagggccgccgcgacaucaagcugaucgacaucucccucagcaaggcggacucccggcgcuucgagaacgccgugugggaccagugcaaggaccugugccacaugcacacgggggucgugguggagaagaagaagcggggcgggaaggaggagaucacgccccacugcgcccugauggacugcaucauguacgacgccgccgucagcggcggccucaacaucccggugcugcgcgcggugcugccccgggacauggucuuccgcaccuccagccccaagguggugcucuga

SEQ ID NO: 8150 - RNA, 1710 nt, Artificial Sequence
  derived and/or modified CDS sequence (opt1) from LASV(Lassa virus/H.sapiens-wt/NGA/2018/ISTH_1375;Clade II)__AVV65116__NP
augagcgccuccaaggaggugaaguccuuccuguggacccagagccuccgccgggagcugagcggcuacugcuccaacaucaagcugcaggucgugaaggacgcccaggcgcuccugcacgggcuggacuucagcgagguguccaacguccagcgccucaugcggaagcagaagcgcgacgacagcgaccugaagcggcugcgcgaccucaaccaggccgugaacaaccugguggagcugaaguccacccagcagaaguccauccuccgggucggcacgcugaccagcgacgaccugcucauccuggccgccgaccuggagaagcucaagagcaaggugauccgcaccgagcggccccuguccagcgggguguacaugggcaaccuguccacccagcagcucgagcagcgccgggcccugcugaaccucaucgggauggucggcggcgcgcaggggacgcagccgggccgcgacgggguggugcgggucugggacgugaagaaccccgaccugcugaacaaccaguucggcaccaugcccagccucacccuggccugccugaccaagcagggccagguggaccucaacgacgccguccuggcccugacggaccucgggcugaucuacaccgcgaaguaccccaacuccagcgaccuggaccgccucucccagagccacccgauccugaacaugguggacaccaagaaguccagccugaacaucagcggcuucaacuucucccucggggccgccgugaaggccggcgccugcaugcuggacgggggcaacaugcuggagaccauccggaucacgccccagaccauggacggcauccucaagagcauccugaaggucaagaagucccuggggauguucgugagcgacacccccggcgagcgcaaccccuacgagaacauccucuacaagaucugccuguccggggacggcuggccguacaucgcgagccggaccuccaucguggggcgcgccugggagaacacgaccgucgaccuggagagcgacggcaagccccacaaggugggcaccgccggguccaacaagagccuccaguccgccggcuuccccaccgggcugacguacagccagcugaugacccugaaggacuccaugaugcagcucgaccccagcgccaagaccuggaucgacaucgagggccggccggaggaccccguggagaucgcgcuguaccagcccauguccgggugcuacauccacuucuuccgcgagcccaccgaccugaagcaguucaagcaggacgccaaguacagccacggcaucgacgucgccgaccucuucccggcccagcccggccugacguccgccgugaucgaggcgcugccccggaacaugguccugaccugccaggggagcgacgacaucaagcgccuccuggacagccagggccgccgggacaucaagcucaucgacaucgcccuguccaaggccgacagccgccgguucgagaacgccgugugggaccagugcaaggaccugugccacaugcacaccgggguggucguggagaagaagaagcgcggcgggaaggaggagaucacgccccacugcgcccucauggacugcaucauguacgacgcggccguguccggcggccugaacaucccgguccugcgggccgugcucccccgcgacaugguguuccggaccagcucccccaaggucgugcuguga

SEQ ID NO: 8151 - RNA, 1710 nt, Artificial Sequence
  derived and/or modified CDS sequence (opt1) from LASV(Lassa virus/H.sapiens-wt/NGA/2018/ISTH_1381;Clade II)__AVV65112__NP
augagcguguccaaggaggucaagagcuuccuguggacccagucccuccgccgggagcugagcggcuacugcuccagcaucaagcuccagguggugaaggacgcccaggcccugcugcacgggcuggacuucuccgaggucagcaacgugcagcgccucaugcggaagcagaagcgcgacgacuccgaccugaagcggcugcgcgaccucaaccaggcggugaacaaccuggucgagcucaagagcacccagcagaaguccauccugcgggugggcacgcugaccagcgacgaccugcucacccuggccgccgaccuggagaagcucaaguccaaggugauccgcaccgagcggccccugagcuccggggucuacaugggcaaccugagcacgcagcagcucgagcagcgccgggcccugcugaacaugaucgggauggccggcggcgcgcaggggacccagccgggccgcgacgggguggugcgggucugggacgugaagaaccccgaccuccugaacaaccaguucggcaccaugcccucccugacccucgccugccugacgaagcagggccagguggaccugaacgacgccguccucgcccugaccgaccuggggcucaucuacaccgcgaaguaccccaacagcuccgaccuggaccgccugagccagagccacccgauccucaacaugguggacaccaagaaguccagccugaacaucuccggcuacaacuucagccugggggccgccgugaaggccggcgccugcaugcucgacgggggcaacaugcuggagacgaucaaggucacgccccagaccauggacggcauccugaaguccauccucaaggugaagcggagccuggggauguucguguccgacacccccggcgagcgcaaccccuacgagaacauccuguacaagaucugccucagcggggacggcuggccguacaucgcgucccggaccagcaucgucgggcgcgccugggagaacaccaccguggaccuggaguccgacggcaagccccagaagaucggcaacaccgggagcaacaagucccugcagagcgccggcuuccccacggggcucaccuacucccagcugaugacccugaaggacagcaugaugcagcuggaccccuccgccaagaccuggaucgacaucgagggccggccggaggaccccguggagaucgcccucuaccagcccaugagcgggugcuacauccacuucuuccgcgagcccacggaccugaagcaguucaagcaggacgcgaaguacucccacggcaucgacgucgccgaccuguucccggcccagcccggccucaccagcgccgugaucgaggcccugccccggaacaugguccugaccugccaggggagcgacgacaucaagcgccuccuggagucccagggccgccgggacaucaagcugaucgacaucgcgcucagcaaggccgacucccgccgguucgagaacgccgugugggaccagugcaaggaccugugccacaugcacaccgggguggucguggagaagaagaagcgcggcgggaaggaggagaucacgccccacugcgcccugauggacugcaucauguacgacgccgcggugagcggcggccucaacaucccgguccugcgggccgugcugccccgcgacaugguguuccggaccuccagccccaaggucgugcucuga

SEQ ID NO: 8152 - RNA, 1710 nt, Artificial Sequence
  derived and/or modified CDS sequence (opt1) from LASV(LASV003-NIG-2008;Clade II)__AIT17581__NP
augagcgccuccaaggaggugaaguccuuccuguggacccagagccuccgccgggagcugagcggcuacugcuccagcaucaagcugcaggucgugaaggacgcccaggcgcuccugcacgggcuggacuucuccgaggugagcaacguccagcgccucaugcggaagcagaagcgcgacgacuccgaccugaagcggcugcgcgaccucaaccaggccgugaacaaccugguggagcucaagagcacccagcagaaguccguccugcgggugggcacccugaccagcgacgaccugcucacccuggccgccgaccuggagaagcucaaguccaaggugauccgcaccgagcggccccugagcuccggggucuacaugggcaaccugagcgcccagcagcucgagcagcgccggacgcugcugaacaugaucgggauggugggcggcgcgcaggggacccagccgggccgcgacggggugguccgggugugggacgugaagaaccccgaccuccugaacaaccaguucggcaccaugcccucccugacccucgccugccugacgaagcaggggcaggucgaccugaacgacguggugcucgcccugaccgaccugggccucaucuacaccgccaaguaccccaacagcuccgaccuggaccgccugagccagagccacccgauccucuccauggucgacaccaagaaguccagccugaacaucagcggcuacaacuucucccugggggcggccgugaaggccggcgccugcaugcucgacgggggcaacaugcuggagacgaucaaggugacgccccagaccauggacggcauccucaagagcauccugaaggucaagaagucccuggggauguucgugagcgacacccccggcgagcggaaccccuacgagaacauccuguacaagaucugccucuccggggacggcuggccguacaucgccagccgcaccuccaucguggggcgggcgugggagaacaccaccgucgaccuggagagcgacggcaagccccagaaggugggcaccgccggguccaacaagagccugcaguccgccggcuuccccacggggcucaccuacagccagcugaugacccugaaggacuccaugaugcagcuggaccccagcgccaagaccuggaucgacaucgagggccgcccggaggaccccgucgagaucgcccucuaccagcccauguccgggugcuacauccacuucuuccgggagcccacggaccugaagcaguucaagcaggacgcgaaguacagccacggcaucgacgugaccgaccuguucccggcccagcccggccucaccagcgccgugaucgaggcccugccccgcaacaugguccugaccugccagggguccgacgacaucaagcggcuccuggacagccagggccgccgcgacaucaagcugaucgacaucgcccucuccaaggcggacagccggcgcuucgagaacgccgugugggaccagugcaaggaccugugccacaugcacacggggguggucguggagaagaagaagcggggcgggaaggaggagaucacgccccacugcgcccugauggacugcaucauguacgacgccgccguguccggcggccucaacaucccgguccugcgcgcggugcugccccgggacaugguguuccgcaccagcucccccaaggucgugcucuga

SEQ ID NO: 8153 - RNA, 1710 nt, Artificial Sequence
  derived and/or modified CDS sequence (opt1) from LASV(LASV035-NIG-2009;Clade II)__AIT17589__NP
augagcgccuccaaggaggugaaguccuuccuguggacccagagccuccgccgggagcugagcggcuacugcuccagcaucaagcugcaggucgugaaggacgcccaggcgcuccugcacgggcuggacuucuccgaggugagcaacguccagcgccucaugcggaagcagaagcgcgacgacuccgaccugaagcggcugcgcgaccucaaccaggccgugaacaaccugguggagcucaagagcacccagcagaaguccauccugcgggucggcacgcugaccagcgacgaccugcucacccuggccgccgaccuggagaagcucaaguccaaggugauccgcaccgagcggccccugagcuccgggguguacaugggcaaccugagcgcccagcagcucgagcagcgccgggcgcugcugaacaugaucgggauggucggcggcgcccaggggacgcagccgggccgcgacgggguggugcgggucugggacgugaagaaccccgaccuccugaacaaccaguucggcaccaugcccucccugacccucgccugccugaccaagcagggccagguggaccugaacgacgccguccucgcgcugacggaccuggggcucaucuacaccgccaaguaccccaacagcuccgaccuggaccgccugagccagagccacccgauccucaacaugguggacaccaagaaguccagccugaacaucuccggcuacaacuucagccugggggccgccgugaaggccggcgcgugcaugcucgacgggggcaacaugcuggagaccaucaaggucacgccccagaccauggacggcauccugaaguccauccucaaggugaagcggagccuggggauguucguguccgacacccccggcgagcgcaaccccuacgagaacauccuguacaagaucugccucagcggggacggcuggccguacaucgccucccggaccagcaucgucgggcgcgccugggagaacacgaccguggaccuggaguccgacggcaagccccagaaggugggcaccaccgggagcaacaagucccugcagagcgccggcuuccccacggggcucaccuacucccagcugaugacccugaaggacagcaugaugcagcuggaccccuccgccaagaccuggaucgacaucgagggccggccggaggaccccgucgagaucgcgcucuaccagcccaugagcgggugcuacauccacuucuuccgcgagcccacggaccugaagcaguucaagcaggacgccaaguacucccacggcaucgacguggccgaccuguucccggcccagcccggccucaccagcgccgucaucgaggcgcugccccggaacauggugcugaccugccaggggagcgacgacaucaagaagcuccuggacucccagggccgccgcgacaucaagcugaucgacaucgcccucagcaaggccgacucccggaaguucgagaacgccgugugggaccagugcaaggaccugugccacaugcacaccggggucgugguggagaagaagaagcgcggcgggaaggaggagaucacgccccacugcgcccugauggacugcaucauguacgacgcggccgucagcggcggccucaacaucccggugcugcgggccgugcugccccgcgacauggucuuccggaccuccagccccaagguggugcucuga

SEQ ID NO: 8154 - RNA, 1710 nt, Artificial Sequence
  derived and/or modified CDS sequence (opt1) from LASV(LASV042-NIG-2009;Clade II)__AIT17593__NP
augagcgccuccaaggaggugaaguccuuccuguggacccagagccuccgccgggagcugagcggcuacugcuccagcaucaagcugcaggucgugaaggacgcccaggcgcuccugcacgggcuggacuucuccgaggugagcaacguccagcgccucaugcggaagcagaagcgcgacgacggcgaccugaagcggcugcgcgaccucaaccaggccgugaacaaccugguggagcugaaguccacccagcagaaguccauccuccgggucgggacgcugaccagcgacgaccugcucacccuggccgccgaccuggagaagcucaagagcaaggugauccgcaccgagcggccccuguccagcggcguguacauggggaaccuguccagccagcagcucgagcagcgccgggcccugcugaacaugaucggcauggucggcggggcgcagggcacgcagccggggcgcgacggcguggugcgggucugggacgugaagaaccccgaccuccugaacaaccaguucgggaccaugcccucccugacccucgccugccugaccaagcagggccagguggaccugaacgacgccguccucgcccugacggaccugggccucaucuacaccgcgaaguaccccaacagcuccgaccuggaccgccugagccagagccacccgauccucaacaugguggacaccaagaaguccagccugaacaucuccggguacaacuucagccugggcgccgccgugaaggccggggccugcaugcucgacggcggcaacaugcuggagaccaucaaggucacgccccagaccauggacgggauccugaaguccauccucaaggugaagcggagccugggcauguucguguccgacacccccggggagcgcaaccccuacgagaacauccuguacaagaucugccucagcggcgacggguggccguacaucgcgucccggaccagcaucgucggccgcgccugggagaacacgaccguggaccuggaguccgacggcaagccccagaaggugggggccgccggcagcaccaagucccugcagagcgccggguuccccaccggccucacguacucccagcugaugacccugaaggacagcaugaugcagcuggaccccuccgcgaagaccuggaucgacaucgaggggcggccggaggaccccgucgagaucgcccucuaccagcccaugagcggcugcuacauccacuucuuccgcgagcccaccgaccugaagcaguucaagcaggacgccaaguacucccacggcaucgacguggccgaccuguucccggcccagcccgggcucacgagcgcggucaucgaggcccugccccggaacauggugcugaccugccagggcagcgacgacaucaagcgccuccuggacucccaggggcgccgggacaucaagcugaucgacaucgcccucagcaagguggacucccgccgguucgagaacgccgucugggaccagugcaaggaccugugccacaugcacaccggcgugguggucgagaagaagaagcgcgggggcaaggaggagaucacgccccacugcgcccugauggacugcaucauguacgacgcggccgugagcggcgggcucaacaucccggugcugcgggccguccugccccgcgacaugguguuccggaccuccagccccaaggugguccucuga

SEQ ID NO: 8155 - RNA, 1710 nt, Artificial Sequence
  derived and/or modified CDS sequence (opt1) from LASV(LASV049-NIG-2009;Clade II)__AIT17605__NP
augagcgccuccaaggaggugaaguccuuccuguggacccagagccuccgccgggagcugagcggcuacugcuccagcaucaagcugcaggucgugaaggacgcccaggcgcuccugcacgggcuggacuucuccgaggugagcaacguccagcgccucaugcggaagcagaagcgcgacgacuccgaccugaagcggcugcgcgaccucaaccaggccgugaacaaccugguggagcucaagagcacccagcagaaguccauccugcgggucggcacgcugaccagcgacgaccugcucacccuggccgccgaccuggagaagcucaaguccaaggugauccgcaccgagcggccccugagcuccgggguguacaugggcaaccugagcacgcagcagcucgagcagcgccgggcccugcugaacaugaucgggauggcgggcggcgcccaggggacccagccgggccgcgacggggucgugcgggugugggacgucaagaaccccgaccuccugaacaaccaguucggcaccaugcccucccugacccucgccugccugacgaagcagggccagguggaccugaacgacgccgugcucgcgcugaccgaccuggggcucaucuacaccgccaaguaccccaacagcuccgaccuggaccgccugagccagagccacccgauccucaacauggucgacaccaagaaguccagccugaacaucuccggcuacaacuucagccugggggccgccgugaaggccggcgcgugcaugcucgacgggggcaacaugcuggagacgaucaaggugacgccccagaccauggacggcauccugaaguccauccucaaggucaagaagucccuggggauguucgugagcgacacccccggcgagcggaaccccuacgagaacauccuguacaagaucugccucagcggggacggcuggccguacaucgccucccgcaccagcaucguggggcgggccugggagaacaccaccgucgaccuggaguccgacggcaagccccagaaggugggcaccgccgggagcaacaagucccugcagagcgccggcuuccccacggggcucaccuacucccagcugaugacccugaaggacagcaugaugcagcuggaccccuccgcgaagaccuggaucgacaucgagggccgcccggaggaccccguggagaucgcccucuaccagcccaugagcgggugcuacauccacuucuuccgggagcccacggaccugaagcaguucaagcaggacgccaaguacucccacggcaucgacgucgccgaccuguucagcgcccagccgggccucaccagcgcggugaucgaggcccugccccgcaacaugguccugaccugccagggguccgacgacaucaagcggcuccuggacagccagggccgccgcgacaucaagcugaucgacaucgcccucuccaaggccgacagccggcgcuucgagaacgccgugugggaccagugcaaggaccugugccacaugcacaccgggguggucguggagaagaagaagcggggcgggaaggaggagaucacgccccacugcgcgcugauggacugcaucauguacgacgccgccguguccggcggccucaacauccccguccugcgcgccgugcugccgcgggacaugguguuccgcaccagcucccccaaggucgugcucuga

SEQ ID NO: 8156 - RNA, 1710 nt, Artificial Sequence
  derived and/or modified CDS sequence (opt1) from LASV(LASV052-NIG-2008;Clade II)__AIT17609__NP
augagcgccuccaaggaggugaaguccuuccuguggacccagagccuccgccgggagcugagcggcuacugcuccagcaucaagcugcaggucgugaaggacgcccaggcgcuccugcacgggcuggacuucuccgaggugagcaacguccagcgccucaugcggaagcagaagcgcgacgacuccgaccugaagcggcugcgcgaccucaaccaggccgugaacaaccugguggagcucaagagcacccagcagaaguccauccugcgggucggcacgcugaccagcgacgaccugcucacccuggccgccgaccuggagaagcucaaguccaaggugauccgcaccgagcggccccugagcuccgggguguacaugggcaaccugagcacgcagcagcucgagcagcgccgggcccugcugaacaugaucgggauggcgggcggcgcccaggggacccagccgggccgcgacggggucgugcgggugugggacgucaagaaccccgaccuccugaacaaccaguucggcaccaugcccucccugacccucgccugccugacgaagcagggccagguggaccugaacgacgccgugcucgcgcugaccgaccuggggcucaucuacaccgccaaguaccccaacagcuccgaccuggaccgccugagccagagccacccgauccucaacauggucgacaccaagaaguccagccugaacaucuccggcuacaacuucagccugggggccgccgugaaggccggcgcgugcaugcucgacgggggcaacaugcuggagacgaucaaggugacgccccagaccauggacggcauccugaaguccauccucaaggucaagcggagccuggggauguucguguccgacacccccggcgagcgcaaccccuacgagaacauccuguacaagaucugccucagcggggacggcuggccguacaucgccucccggaccagcaucguggggcgcgccugggagaacaccaccgucgaccuggaguccgacggcaagccccagaaggugggcgccgccgggagcaacaagucccugcagagcgcgggcuuccccaccgggcucacguacucccagcugaugacccugaaggacagcaugaugcagcuggaccccuccgccaagaccuggaucgacaucgagggccggccggaggaccccguggagaucgcccucuaccagcccaugagcgggugcuacauccacuucuuccgcgagcccaccgaccugaagcaguucaagcaggacgccaaguacucccacggcaucgacgucgccgaccuguucccggcgcagcccggccucacgagcgccgugaucgaggcccugccccggaacaugguccugaccugccaggggagcgacgacaucaagcgccuccuggacucccagggccgccgggacaucaagcugaucgacaucgcccucagcaaggccgacucccgccgguucgagaacgcggugugggaccagugcaaggaccugugccacaugcacaccgggguggucguggagaagaagaagcgcggcgggaaggaggagaucacgccccacugcgcccugauggacugcaucauguacgacgccgccgugagcggcggccucaacaucccgguccugcgggcggugcugccccgcgacaugguguuccggaccuccagccccaaggucgugcucuga

SEQ ID NO: 8157 - RNA, 1710 nt, Artificial Sequence
  derived and/or modified CDS sequence (opt1) from LASV(LASV056-NIG-2008;Clade II)__AIT17613__NP
augagcgccuccaaggaggugaaguccuuccuguggacccagagccuccgccgggagcugagcggcuacugcuccaacaucaagcugcaggucgugaaggacgcccaggcgcuccugcacgggcuggacuucagcgagguguccaacguccagcgccucaugcggaagcagaagcgcgacgacagcgaccugaagcggcugcgcgaccucaaccaggccgugaacaaccugguggagcugaaguccacccagcagaaguccauccuccgggucggcacccugaccagcgacgaccugcucacccuggccgccgaccuggagaagcucaagagcaaggugauccgcaccgagcggccccuguccagcgggguguacaugggcaaccuguccacgcagcagcucgagcagcgccgggcccugcugaacaugaucgggauggucggcggcgcgcaggggacccagccgggccgcgacgggguggugcgggucugggacgugaagaaccccgaccuccugaacaaccaguucggcaccaugcccagccugacccucgccugccugacgaagcagggccagguggaccugaacgacgccguccucgcccugaccgaccuggggcucaucuacaccgcgaaguaccccaacuccagcgaccuggaccgccugucccagagccacccgauccucaacaugguggacaccaagaaguccagccugaacaucagcggcuacaacuucucccugggggccgccgugaaggccggcgccugcaugcucgacgggggcaacaugcuggagacgaucaaggucacgccccagaccauggacggcauccucaagagcauccugaaggugaagcggucccuggggauguucgugagcgacacccccggcgagcgcaaccccuacgagaacauccuguacaagaucugccucuccggggacggcuggccguacaucgcgagccggaccuccaucgucgggcgcgccugggagaacaccaccguggaccuggagagcgacggcaagccccagaaggugggcaccgccggguccaacaagagccugcaguccgccggcuuccccacggggcucaccuacagccagcugaugacccugaaggacuccaugaugcagcuggaccccagcgccaagaccuggaucgacaucgagggccggccggaggaccccgucgagaucgcgcucuaccagcccauguccgggugcuacauccacuucuuccgcgagcccacggaccugaagcaguucaagcaggacgccaaguacagccacggcaucgacguggccgaccuguucccggcccagcccggccucaccuccgccgucaucgaggcgcugccccggaacauggugcugaccugccaggggagcgacgacaucaagcgccuccuggacagccagggccgccgggacaucaagcugaucgacaucgcccucuccaagaccgacagccgccgguucgagaacgccgugugggaccagugcaaggaccugugccacaugcacacgggggucgugguggagaagaagaagcgcggcgggaaggaggagaucacgccccacugcgcccugauggacugcaucauguacgacgccgcggucuccggcggccucaacaucccggugcugcgggccgugcugccccgcgacauggucuuccggaccagcucccccaagguggugcucuga

SEQ ID NO: 8158 - RNA, 1710 nt, Artificial Sequence
  derived and/or modified CDS sequence (opt1) from LASV(LASV058-NIG-2008;Clade II)__AIT17617__NP
augagcgccuccaaggaggugaaguccuuccuguggacccagagccuccgccgggagcugagcggcuacugcuccagcaucaagcugcaggucgugaaggacgcccaggcgcuccugcacgggcuggacuucuccgaggugagcaacguccagcgccucaugcggaagcagaagcgcgacgacuccgaccugaagcggcugcgcgaccucaaccaggccgugaacaaccugguggagcucaagagcacccagcagaaguccauccugcgggucggcacgcugaccagcgacgaccugcucacccuggccgccgaccuggagaagcucaaguccaaggugauccgcaccgagcggccccugagcuccgggguguacaugggcaaccugagcgcccagcagcucgagcagcgccgggcgcugcugaacaugaucgggauggucggcggcgcccaggggacgcagccgggccgcgacgggguggugcgggucugggacgugaagaaccccgaccuccugaacaaccaguucggcaccaugcccucccugacccucgccugccugaccaagcagggccagguggaccugaacgacgccguccucgcgcugacggaccuggggcucaucuacaccgccaaguaccccaacagcuccgaccuggaccgccugagccagagccacccgauccucaacaugguggacaccaagaaguccagccugaacaucuccggcuucaacuucagccugggggccgccgugaaggccggcgcgugcaugcucgacgggggcaacaugcuggagaccaucaaggucacgccccagaccauggacggcauccugaaguccauccucaaggugaagcggagccuggggauguucguguccgacacccccggcgagcgcaaccccuacgagaacauccuguacaagaucugccucagcggggacggcuggccguacaucgccucccggaccagcaucgucgggcgcgccugggagaacacgaccguggaccuggaguccgacggcaagccccagaaggugggcaccgccgggagcaacaagucccugcagagcgccggcuuccccaccgggcucacguacucccagcugaugacccugaaggacagcaugaugcagcuggaccccuccgcgaagaccuggaucgacaucgagggccggccggaggaccccgucgagaucgcccucuaccagcccaugagcgggugcuacauccacuucuuccgcgagcccaccgaccugaagcaguucaagcaggacgccaaguacucccacggcaucgacguggccgaccuguucccggcccagcccggccucacgagcgcggucaucgaggcccugccccggaacauggugcugaccugccaggggagcgacgacaucaagcgccuccuggacucccagggccgccgggacaucaagcugaucgacaucgcccucagcaaggccgacucccgccgguucgagaacgccgugugggaccagugcaaggaccugugccacaugcacaccggggucgugguggagaagaagaagcgcggcgggaaggaggagaucacgccccacugcgcgcugauggacugcaucauguacgacgccgccgucagcggcggccucaacaucccggugcugcgggccgugcugccccgcgacauggucuuccggaccuccagccccaagguggugcucuga

SEQ ID NO: 8159 - RNA, 1710 nt, Artificial Sequence
  derived and/or modified CDS sequence (opt1) from LASV(LASV063-NIG-2009;Clade II)__AIT17621__NP
augagcgccuccaaggaggugaaguccuuccuguggacccagagccuccgccgggagcugagcggcuacugcuccagcaucaagcugcaggucgugaaggacgcccaggcgcuccugcacgggcuggacuucuccgaggugaccaacguccagcgccucaugcggaagcagaagcgcgacgacagcgaccugaagcggcugcgcgaccucaaccaggccgugaacaaccugguggagcugaaguccacgcagcagaaguccauccuccgggucggcacccugaccagcgacgaccugcucacccuggccgccgaccuggagaagcucaagagcaaggugauccgcacggagcggccccuguccagcgggguguacaugggcaaccuguccacccagcagcucgagcagcgccgggcccugcugaacaugaucgggauggucggcggcgcgcaggggacccagccgggccgcgacgggguggugcgggucugggacgugaagaaccccgaccuccugaacaaccaguucggcaccaugcccagccugacgcucgccugccugaccaagcagggccagguggaccugaacgacgccguccucgcccugaccgaccuggggcucaucuacaccgcgaaguaccccaacuccagcgaccuggaccgccugucccagagccacccgauccucaacaugguggacacgaagaaguccagccugaacaucagcggcuacaacuucucccugggggccgccgugaaggccggcgccugcaugcucgacgggggcaacaugcuggagaccaucaaggucacgccccagaccauggacggcauccucaagagcauccugaaggugaagcggucccuggggauguucgugagcgacacccccggcgagcgcaaccccuacgagaacauccuguacaagaucugccucuccggggacggcuggccguacaucgcgagccggaccuccaucgucgggcgcgccugggagaacaccaccguggaccuggagagcgacggcaagccccagaaggugggcaucgccggguccaacaagagccugcaguccgccggcuuccccacggggcucaccuacagccagcugaugacccugaaggacuccaugaugcagcuggaccccagcgccaagaccuggaucgacaucgagggccggccggaggaccccgucgagaucgcgcucuaccagcccauguccgggugcuacauccacuucuuccgcgagcccacggaccugaagcaguucaagcaggacgccaaguacagccacggcaucgacguggccgaccuguucccggcccagcccggccucaccuccgccgucaucgaggcgcugccccggaacauggugcugaccugccaggggagcgacgacaucaagcgccuccuggacagccagggccgccgggacaucaagcugaucgacaucgcccucuccaaggccgacagccgcaaguucgagaacgccgugugggaccagugcaaggaccugugccacaugcacaccggggucgugguggagaagaagaagcggggcgggaaggaggagaucacgccccacugcgcccugauggacugcaucauguacgacgcggccgucuccggcggccucaacaucccggugcugcgcgccgugcugccccgggacauggucuuccgcaccagcucccccaagguggugcucuga

SEQ ID NO: 8160 - RNA, 1710 nt, Artificial Sequence
  derived and/or modified CDS sequence (opt1) from LASV(LASV1000-NIG-2009;Clade II)__AIT17783__NP
augagcgccuccaaggaggugaaguccuuccuguggacccagagccuccgccgggagcugagcggcuacugcuccaacaucaagcugcaggucgugaaggacgcccaggcgcuccugcacgggcuggacuucagcgagguguccaacguccagcgccucaugcggaagcagaagcgcgacgacagcgaccugaagcggcugcgcgaccucaaccaggccgugaacaaccugguggagcugaaguccacccagcagaaguccauccuccgggucggcacgcugaccagcgacgaccugcucacccuggccgccgaccuggagaagcucaagagcaaggugauccgcaccgagcggccccuguccagcgggguguacaugggcaaccuguccacgcagcagcucgagcagcgccgggcccugcugaacaugaucgggauggucggcggcgcgcaggggacccagccgggccgcgacgggguggugcgggucugggacgugaagaaccccgaccuccugaacaaccaguucggcaccaugcccagccugacccucgccugccugacgaagcagggccagguggaccugaacgacgucgugcucgcccugaccgaccuggggcucaucuacaccgccaaguaccccaacuccagcgaccuggaccgccugucccagagccacccgauccucaacaugguggacaccaagaaguccagccugaacaucagcggcuacaacuucucccugggggcggccgucaaggccggcgccugcaugcucgacgggggcaacaugcuggagacgaucaaggugacgccccagaccauggacggcauccucaagagcauccugaaggugaagaagucccuggggauguucgucagcgacacccccggcgagcggaaccccuacgagaacauccuguacaagaucugccucuccggggacggcuggccguacaucgccagccgcaccuccaucguggggcgggcgugggagaacaccaccguggaccuggagagcgacggcaagccccagaaggucggcaccgccggguccaacaagagccugcaguccgccggcuuccccacggggcucaccuacagccagcugaugacccugaaggacuccaugaugcagcuggaccccagcgccaagaccuggaucgacaucgagggccgcccggaggaccccguggagaucgcccucuaccagcccgucuccgggugcuacauccacuucuuccgggagcccacggaccugaagcaguucaagcaggacgcgaaguacagccacggcaucgacguggccgaccuguucccggcccagcccggccucaccuccgccgugaucgaggcccugccccgcaacaugguccugaccugccaggggagcgacgacaucaagcggcuccuggacagccagggccgccgcgacaucaagcugaucgacaucgcgcucuccaaggccgacagccggcgcuucgagaacgccgugugggaccagugcaaggaccugugccacaugcacaccgggguggucguggagaagaagaagcggggcgggaaggaggagaucacgccccacugcgcccugauggacugcaucauguacgacgccgcgguguccggcggccucaacaucccgguccugcgcgccgugcugccccgggacaugguguuccgcaccagcucccccaaggucgugcucuga

SEQ ID NO: 8161 - RNA, 1710 nt, Artificial Sequence
  derived and/or modified CDS sequence (opt1) from LASV(LASV1008-NIG-2009;Clade II)__AIT17787__NP
augagcgccuccaaggaggugaaguccuuccuguggacccagagccuccgccgggagcugagcggcuacugcuccaacaucaagcugcaggucgugaaggacgcccaggcgcuccugcacgggcuggacuucagcgagguguccaacguccagcgccucaugcggaagcagaagcgcgacgacggcgaccugaagcggcugcgcgaccucaaccaggccgugaacaaccugguggagcucaagagcacccagcagaaguccauccugcgggucgggacccugaccagcgacgaccugcucacccuggccgccgaccuggagaagcucaaguccaaggugauccgcaccgagcggccccugagcuccggcguguacauggggaaccugagcacgcagcagcucgagcagcgccgggcccugcugaacaugaucggcauggucggcggggcgcagggcacccagccggggcgcgacggcguggugcgggucugggacgugaagaaccccgaccuccugaacaaccaguucgggaccaugcccucccugacccucgccugccugacgaagcagggccagguggaccugaacgacgccguccucgcccugaccgaccugggccucaucuacaccgcgaaguaccccaacagcuccgaccuggaccgccugagccagucccacccgauccucaacaugguggacaccaagaaguccagccugaacaucagcggguacaacuucagccugggcgccgccgugaaggccggggccugcaugcucgacggcggcaacaugcuggagacgaucaaggucacgccccagaccauggacgggauccugaaguccauccucaaggugaagaagucccugggcauguucgugagcgacacccccggggagcggaaccccuacgagaacauccuguacaagaucugccucagcggcgacggguggccguacaucgcgucccgcaccagcaucgucggccgggccugggagaacaccaccguggaccuggaguccgacggcaagccccagaagguggggaccgccggcagcaacaagucccugcagagcgccggguuccccacgggccucaccuacucccagcugaugacccugaaggacagcaugaugcagcuggaccccuccgccaagaccuggaucgacaucgaggggcgcccggaggaccccgucgagaucgcgcucuaccagcccaugagcggcugcuacauccacuucuuccgggagcccacggaccugaagcaguucaagcaggacgccaaguacucccacggcaucgacgugaccgaccuguucagcgcccagccggggcucaccuccgccgucaucgaggcccugccccgcaacauggugcugaccugccagggcagcgacgacaucaagcggcuccuggacagccaggggcgccgcgacaucaagcugaucgacaucgcgcucuccaagguggacagccggcgcuucgagaacgccgucugggaccagugcaaggaccugugccacaugcacacgggcgugguggucgagaagaagaagcgcgggggcaaggaggagaucacgccccacugcgcccugauggacugcaucauguacgacgccgccguguccggcgggcucaacauccccgugcugcgggcgguccugccgcgggacaugguguuccgcaccagcucccccaaggugguccucuga

SEQ ID NO: 8162 - RNA, 1710 nt, Artificial Sequence
  derived and/or modified CDS sequence (opt1) from LASV(LASV1015-NIG-2009;Clade II)__AIT17795__NP
augagcgccuccaaggaggugaaguccuuccuguggacccagagccuccgccgggagcugagcggcuacugcuccagcaucaagcugcaggucgugaaggacgcccaggcgcuccugcacgggcuggacuucuccgaggugagcaacguccagcgccucaugcggaagcagaagcgcgacgacuccgaccugaagcggcugcgcgaccucaaccaggccgugaacaaccugguggagcucaagagcacccagcagaaguccauccugcgggucggcacgcugaccagcgacgaccugcucacccuggccgccgaccuggagaagcucaaguccaaggugauccgcaccgagcggccccugagcuccgggguguacaugggcaaccugagcacgcagcagcucgagcagcgccgggcccugcugaacaugaucgggauggucggcggcgcgcaggggacccagccgggccgcgacgggguggugcgggucugggacgugaagaaccccgaccuccugaacaaccaguucggcaccaugcccucccugacccucgccugccugacgaagcagggccagguggaccugaacgacgccguccucgcccugaccgaccuggggcucaucuacaccgcgaaguaccccaacagcuccgaccuggaccgccugagccagagccacccgauccucaacaugguggacaccaagaaguccagccugaacaucuccggcuacaacuucagccugggggccgccgugaaggccggcgccugcaugcucgacgggggcaacaugcuggagacgaucaaggucacgccccagaccauggacggcauccugaaguccauccucaaggugaagcggagccuggggauguucguguccgacacccccggcgagcgcaaccccuacgagaacauccuguacaagaucugccucagcggggacggcuggccguacaucgcgucccggaccagcaucgucgggcgcgccugggagaacaccaccguggaccuggaguccgacggcaagccccagaaggugggcaccgccgggagcaacaagucccugcagagcgccggcuuccccacggggcucaccuacucccagcugaugacccugaaggacagcaugaugcagcuggaccccuccgccaagaccuggaucgacaucgagggccggccggaggaccccgucgagaucgcgcucuaccagcccaugagcgggugcuacauccacuucuuccgcgagcccacggaccugaagcaguucaagcaggacgccaaguacucccacggcaucgacguggccgaccuguucccggcccagcccggccucaccagcgccgucaucgaggcgcugccccggaacauggugcugaccugccaggggagcgacgacaucaagaagcuccuggacucccagggccgccgcgacaucaagcugaucgacaucgcccucagcaaggccgacucccggcgcuucgagaacgccgugugggaccagugcaaggaccugugccacaugcacaccggggucgugguggagaagaagaagcggggcgggaaggaggagaucacgccccacugcgcccugauggacugcaucauguacgacgcggccgucagcggcggccucaacaucccggugcugcgcgccgugcugccccgggacauggucuuccgcaccuccagccccaagguggugcucuga

SEQ ID NO: 8163 - RNA, 1710 nt, Artificial Sequence
  derived and/or modified CDS sequence (opt1) from LASV(LASV1016-NIG-2009;Clade II)__AIT17799__NP
augagcgccuccaaggaggugaaguccuuccuguggacccagagccuccgccgggagcugagcggcuacugcuccaacaucaagcugcaggucgugaaggacgcccaggcgcuccugcacgggcuggacuucagcgagguguccaacguccagcgccucaugcggaagcagaagcgcgacgacagcgaccugaagcggcugcgcgaccucaaccaggccgugaacaaccugguggagcugaaguccacccagcagaaguccauccuccgggucggcacgcugaccagcgacgaccugcucacccuggccgccgaccuggagaagcucaagagcaaggugauccgcaccgagcggccccuguccagcgggguguacaugggcaaccuguccgcccagcagcucgagcagcgccgggcgcugcugaacaugaucgggauggucggcggcgcccaggggacgcagccgggccgcgacgggguggugcgggucugggacgugaagaaccccgaccuccugaacaaccaguucggcaccaugcccagccugacccucgccugccugaccaagcagggccagguggaccugaacgacgccguccucgcgcugacggaccuggggcucaucuacaccgccaaguaccccaacuccagcgaccuggaccgccugucccagagccacccgauccucaacaugguggacaccaagaaguccagccugaacaucagcggcuacaacuucucccugggggccgccgugaaggccggcgcgugcaugcucgacgggggcaacaugcuggagaccaucaaggucacgccccagaccauggacggcauccucaagagcauccugaaggugaagaagucccuggggauguucgugagcgacacccccggcgagcggaaccccuacgagaacauccuguacaagaucugccucuccggggacggcuggccguacaucgccagccgcaccuccaucgucgggcgggccugggagaacacgaccguggaccuggagagcgacggcaagccccagaaggugggcaccgccggguccaacaagagccugcaguccgccggcuuccccaccgggcucacguacagccagcugaugacccugaaggacuccaugaugcagcuggaccccagcgcgaagaccuggaucgacaucgagggccgcccggaggaccccgucgagaucgcccucuaccagcccauguccgggugcuacauccacuucuuccgggagcccaccgaccugaagcaguucaagcaggacgccaaguacagccacggcaucgacguggccgaccuguucccggcccagcccggccucacguccgcggucaucgaggcccugccccgcaacauggugcugaccugccaggggagcgacgacaucaagcggcuccuggacagccagggccgccgcgacaucaagcugaucgacaucgcccucuccaaggccgacagccggcgcuucgagaacgccgugugggaccagugcaaggaccugugccacaugcacaccggggucgugguggagaagaagaagcggggcgggaaggaggagaucacgccccacugcgcgcugauggacugcaucauguacgacgccgccgucuccggcggccucaacaucccggugcugcgcgccgugcugccccgggacauggucuuccgcaccagcucccccaagguggugcucuga

SEQ ID NO: 8164 - RNA, 1710 nt, Artificial Sequence
  derived and/or modified CDS sequence (opt1) from LASV(LASV221-NIG-2010;Clade II)__AIT17625__NP
augagcgccuccaaggaggugaaguccuuccuguggacccagagccuccgccgggagcugagcggcuacugcuccagcaucaagcugcaggucgugaaggacgcccaggcgcuccugcacgggcuggacuucuccgaggugagcaacguccagcgccucaugcggaagcagcgccgggacgacuccgaccugaagcgccugcgggaccucaaccaggccgugaacaaccugguggagcucaagagcacccagcagaaguccauccugcgcgucggcacgcugaccagcgacgaccugcucacccuggccgccgaccuggagaagcucaaguccaaggugauccggaccgagcgcccccugagcuccgggguguacaugggcaaccugagcacgcagcagcucgagcagcggcgcgcccugcugaacaugaucgggauggucggcggcgcgcaggggacccagccgggccgggacgggguggugcgcgucugggacgugaagaaccccgaccuccugaacaaccaguucggcaccaugcccucccugacccucgccugccugacgaagcagggccagguggaccugaacgacgccguccucgcccugaccgaccuggggcucaucuacaccgcgaaguaccccaacagcuccgaccuggaccggcugagccagagccacccgauccucaacaugguggacaccaagaaguccagccugaacaucuccggcuacaacuucagccugggggccgccgugaaggccggcgccugcaugcucgacgggggcaacaugcuggagacgaucaaggucacgccccagaccguggacggcauccugaaguccauccucaaggugaagcgcagccuggggauguucgucuccgacacccccggcgagcggaaccccuacgagaacauccuguacaagaucugccucagcggggacggcuggccguacaucgcgucccgcaccagcaucguggggcgggccugggagaacaccaccguggaccuggaguccgacggcaagccccagaaggucggcaccgccgggagcaacaagucccugcagagcgccggcuuccccacggggcucaccuacucccagcugaugacccugaaggacagcaugaugcagcuggaccccuccgccaagaccuggaucgacaucgagggccgcccggaggaccccguggagaucgcgcucuaccagcccaugagcgggugcuacauccacuucuuccgggagcccacggaccugaagcaguucaagcaggacgccaaguacucccacggcaucgacgucgccgaccuguucccggcccagcccggccucaccagcgccgugaucgaggcgcugccccgcaacauggugcugaccugccaggggagcgacgacaucaagcgccuccuggacucccagggccggcgcgacaucaagcugaucgacaucgcccucagcaaggccgacucccggaaguucgagaacgccgucugggaccagugcaaggaccugugccacaugcacaccggggugguggucgagaagaagaagcgcggcgggaaggaggagaucacgccccacugcgcccugauggacugcaucauguacgacgcggccgugagcggcggccucaacaucccggugcugcgggccguccugccccgcgacaugguguuccggaccuccagccccaaggugguccucuga

SEQ ID NO: 8165 - RNA, 1710 nt, Artificial Sequence
  derived and/or modified CDS sequence (opt1) from LASV(LASV224-NIG-2010;Clade II)__AIT17627__NP
augagcgccuccaaggaggugaaguccuuccuguggacccagagccuccgccgggagcugagcggcuacugcuccagcaucaagcugcaggucgugaaggacgcccaggcgcuccugcacgggcuggacuucuccgaggugagcaacguccagcgccucaugcggaagcagaagcgcgacgacuccgaccugaagcggcugcgcgaccucaaccaggccgugaacaaccugguggagcucaagagcacccagcagaaguccauccugcgggucggcacccugaccagcgacgaccugcucacccuggccgccgaccuggagaagcucaaguccaaggugauccgcaccgagcggccccugagcuccgggguguacaugggcaaccugagcucccagcagcucgagcagcgccgggcccugcugaacaugaucgggauggucggcggcgcgcaggggacgcagccgggccgcgacgggguggugcgggucugggacgugaagaaccccgaccuccugaacaaccaguucggcaccaugcccagccugacccucgccugccugaccaagcagggccagguggaccugaacgacgccguccucgcccugacggaccuggggcucaucuacaccgcgaaguaccccaacuccagcgaccuggaccgccugagccagucccacccgauccucaacaugguggacaccaagaaguccagccugaacaucagcggcuacaacuucucccugggggccgccgugaaggccggcgccugcaugcucgacgggggcaacaugcuggagaccaucaaggucacgccccagaccauggacggcauccucaagagcauccugaaggugaagcggucccuggggauguucgugagcgacacccccggcgagcgcaaccccuacgagaacauccuguacaagaucugccucuccggggacggcuggccguacaucgcgagccggaccuccaucgucgggcgcgccugggagaacacgaccguggaccuggagagcgacggcaagccccagaaggugggcuccgccgggagcaacaagucccugcagagcgccggcuuccccaccgggcucaccuacucccagcugaugacgcugaaggacagcaugaugcagcuggaccccuccgccaagaccuggaucgacaucgagggccggccggaggaccccgucgagaucgcgcucuaccagcccaugagcgggugcuacauccacuucuuccgcgagcccaccgaccugaagcaguucaagcaggacgccaaguacagccacggcaucgacguggccgaccuguucccggcccagcccggccucaccuccgccgucaucgaggcgcugccccggaacauggugcugacgugccaggggagcgacgacaucaagcgccuccuggacucccagggccgccgggacaucaagcugaucgacaucgcccucagcaaggccgacucccgccgguucgagaacgccgugugggaccagugcaaggaccugugccacaugcacaccggggucgugguggagaagaagaagcgcggcgggaaggaggagaucacgccccacugcgcccugauggacugcaucauguacgacgcggccgucagcggcggccucaacaucccggugcugcgggccgugcugccccgcgacauggucuuccggaccuccagccccaagguggugcucuga

SEQ ID NO: 8166 - RNA, 1710 nt, Artificial Sequence
  derived and/or modified CDS sequence (opt1) from LASV(LASV225-NIG-2010;Clade II)__AIT17631__NP
augagcgccuccaaggagaucaagagcuuccuguggacccagucccuccgccgggagcugagcggcuacugcuccagcaucaagcuccagguggucaaggacgcccaggcgcugcugcacgggcuggacuucuccgaggugagcaacgugcagcgccucaugcggaagcagaagcgcgacgacuccgaccugaagcggcugcgcgaccucaaccaggccgucaacaaccugguggagcucaagagcacccagcagaaguccauccugcgggugggcacgcugaccagcgacgaccugcucacccuggccgccgaccuggagaagcucaaguccaaggucauccgcaccgagcggccccugagcuccgggguguacaugggcaaccugagcacgcagcagcucgagcagcgccgggcccugcugaacaugaucgggauggugggcggcgcgcaggggacccagccgggccgcgacggggucgugcgggugugggacgucaagaaccccgaccuccugaacaaccaguucggcaccaugcccucccugacccucgccugccugacgaagcagggccagguggaccugaacgacgccgugcucgcccugaccgaccuggggcucaucuacaccgcgaaguaccccaacagcuccgaccuggaccgccugagccagagccacccgauccucaacauggucgacaccaagaaguccagccugaacaucuccggcuacaacuucagccugggggccgccgugaaggccggcgccugcaugcucgacgggggcaacaugcuggagacgaucaaggugacgccccagaccauggacggcauccugaaguccauccucaaggucaagcggagccuggggauguucguguccgacgcgcccggcgagcgcaaccccuacgagaacauccuguacaagaucugccucagcggggacggcuggccguacaucgccucccggaccagcaucguggggcgcgccugggagaacaccaccgucgaccuggaguccgacggcaagccccagaaggugggcaccgccgggagcaacaagucccugcagagcgccggcuuccccaccgggcucacguacucccagcugaugacccugaaggacagcaugaugcagcuggaccccuccgcgaagaccuggaucgacaucgagggccggccggaggaccccguggagaucgcccucuaccagcccaugagcgggugcuacauccacuucuuccgcgagcccaccgaccugaagcaguucaagcaggacgccaaguacucccacggcaucgacgucgccgaccuguucccggcccagcccggccucacgagcgcggugaucgaggcccugccccggaacaugguccugaccugccaggggagcgacgacaucaagcgccuccuggacucccagggccgccgggacaucaagcugaucgacaucgcccucagcaaggccgacucccgccgguucgagaacgccgugugggaccagugcaaggaccugugccacaugcacaccgggguggucguggagaagaagaagcgcggcgggaaggaggagaucacgccccacugcgcgcugauggacugcaucauguacgacgccgccgugagcggcggccucaacaucccgguccugcgggccgugcugccccgcgacaugguguuccggaccuccagccccaaggucgugcucuga

SEQ ID NO: 8167 - RNA, 1710 nt, Artificial Sequence
  derived and/or modified CDS sequence (opt1) from LASV(LASV229-NIG-2010;Clade II)__AIT17635__NP
augagcgccuccaaggaggugaaguccuuccuguggacccagagccuccgccgggagcugagcggcuacugcuccaacaucaagcugcaggucgugaaggacgcccaggcgcuccugcacgggcuggacuucagcgagguguccaacguccagcgccucaugcggaagcagaagcgcgacgacaacgaccugaagcggcugcgcgaccucaaccaggccgugaacaaccugguggagcucaagagcacccagcagaaguccauccugcgggucggcacgcugaccagcgacgaccugcucacccuggccgccgaccuggagaagcucaaguccaaggugauccgcaccgagcggccccugagcuccgggguguacaugggcaaccugaacacgcagcagcucgagcagcgccgggcccugcugaacaugaucgggauggucggcggcgcgcaggggacccagccgggccgcgacgggguggugcgggucugggacgugaagaaccccgaccuccugaacaaccaguucggcaccaugcccagccugacccucgccugccugacgaagcagggccagguggaccugaacgacgccguccucgcccugaccgaccuggggcucaucuacaccgcgaaguaccccaacuccagcgaccuggaccgccugucccagagccacccgauccucaacaugguggacaccaagaaguccagccugaacaucagcggcuacaacuucucccugggggccgccgugaaggccggcgccugcaugcucgacgggggcaacaugcuggagacgaucaaggucacgccccagaccauggacggcauccucaagagcauccugaaggugaagaagucccuggggauguucgugagcgacacccccggcgagcggaaccccuacgagaacauccuguacaagaucugccucuccggggacggcuggccguacaucgcgagccgcaccuccaucgucgggcgggccugggagaacaccaccguggaccuggagagcgacggcaagccccagaaggugggcaccgccggguccaacaagagccugcaguccgccggcuuccccacggggcucaccuacagccagcugaugacccugaaggacuccaugaugcagcuggaccccagcgccaagaccuggaucgacaucgagggccgcccggaggaccccgucgagaucgcgcucuaccagcccauguccgggugcuacauccacuucuuccgggagcccacggaccugaagcaguucaagcaggacgccaaguacagccacggcaucgacguggccgaccuguucccggcccagcccggccucaccuccgccgucaucgaggcgcugccccgcaacauggugcugaccugccaggggagcgacgacaucaagcggcuccuggacucccagggccgccgcgacaucaagcugaucgacaucgcccucagcaaggccgacagccggcgcuucgagaacgccgugugggaccagugcaaggaccugugccacaugcacaccggggucgugguggagaagaagaagcggggcgggaaggaggagaucacgccccacugcgcccugauggacugcaucauguacgacgcggccgucuccggcggccucaacaucccggugcugcgcgccgugcugccccgggacauggucuuccgcaccagcucccccaagguggugcucuga

SEQ ID NO: 8168 - RNA, 1710 nt, Artificial Sequence
  derived and/or modified CDS sequence (opt1) from LASV(LASV237-NIG-2010;Clade II)__AIT17639__NP
augagcgccuccaaggaggugaaguccuuccuguggacccagagccuccgccgggagcugagcggcuacugcuccaacaucaagcugcaggucgugaaggacgcccaggcgcuccugcacgggcuggacuucagcgagguguccaacguccagcgccucaugcggaagcagaagcgcgacgacagcgaccugaagcggcugcgcgaccucaaccaggccgugaacaaccugguggagcugaaguccacccagcagaaguccauccuccgggucggcacccugaccagcgacgaccugcucacccuggccgccgaccuggagaagcucaagagcaaggugauccgcaccgagcggccccuguccagcgggguguacaugggcaaccuguccacgcagcagcucgagcagcgccgggcccugcugaacaugaucgggauggucggcggcgcgcaggggacccagccgggccgcgacgggguggugcgggucugggacgugaagaaccccgaccuccugaacaaccaguucggcaccaugcccagccugacccucgccugccugacgaagcagggccagguggaccugaacgacgccguccucgcccugaccgaccuggggcucaucuacaccgcgaaguaccccaacuccagcgaccuggaccgccugucccagagccacccgauccucaacaugguggacaucaagaaguccagccugaacaucagcggcuacaacuucucccugggggccgccgugaaggccggcgccugcaugcucgacgggggcaacaugcuggagaccaucaaggucacgccccagaccauggacggcauccucaagagcauccugaaggugaagcggucccuggggauguucgugagcgacacccccggcgagcgcaaccccuacgagaacauccuguacaagaucugccucuccggggacggcuggccguacaucgcgagccggaccuccaucgucgggcgcgccugggagaacacgaccguggaccuggagagcgacggcaagccccagaaggugggcuccgccgggagcaacaagucccugcagagcgccggcuuccccaccgggcucaccuacucccagcugaugacgcugaaggacagcaugaugcagcuggaccccuccgccaagaccuggaucgacaucgagggccggccggaggaccccgucgagaucgcgcucuaccagcccaugagcgggugcuacauccacuucuuccgcgagcccaccgaccugaagcaguucaagcaggacgccaaguacucccacggcaucgacguggccgaccuguucccggcccagcccggccucaccagcgccgucaucgaggcgcugccccggaacauggugcugacgugccaggggagcgacgacaucaagcgccuccuggacucccagggccgccgggacaucaagcugaucgacaucgcccucagcaaggccgacucccgccgguucgagaacgccgugugggaccagugcaaggaccugugccacaugcacaccggggucgugguggagaagaagaagcgcggcgggaaggaggagaucacgccccacugcgcccugauggacugcaucauguacgacgcggccgucagcggcggccucaacaucccggugcugcgggccgugcugccccgcgacauggucuuccggaccuccagccccaagguggugcucuga

SEQ ID NO: 8169 - RNA, 1710 nt, Artificial Sequence
  derived and/or modified CDS sequence (opt1) from LASV(LASV242-NIG-2010;Clade II)__AIT17651__NP
augagcgccuccaaggaggugaaguccuuccuguggacccagagccuccgccgggagcugagcggcuacugcuccagcaucaagcugcaggucgugaaggacgcccaggcgcuccugcacgggcuggacuucuccgaggugagcaacguccagcgccucaugcggaagcagaagcgcgacgacuccgaccugaagcggcugcgcgaccucaaccaggccgugaacaaccugguggagcucaagagcacccagcagaaguccguccugcgggugggcacgcugaccagcgacgaccugcucacccuggccgccgaccuggagaagcucaaguccaaggugauccgcaccgagcggccccugagcuccggggucuacaugggcaaccugagcgcccagcagcucgagcagcgccgggcgcugcugaacaugaucgggauggugggcggcgcccaggggacgcagccgggccgcgacggggugguccgggugugggacgugaagaaccccgaccuccugaacaaccaguucggcaccaugcccucccugacccucgccugccugaccaagcaggggcaggucgaccugaacgacguggugcucgcccugacggaccugggccucaucuacaccgcgaaguaccccaacagcuccgaccuggaccgccugagccagagccacccgauccucaacauggucgacaccaagaaguccagccugaacaucuccggcuacaacuucagccugggggccgccgugaaggccggcgccugcaugcucgacgggggcaacaugcuggagaccaucaaggugacgccccagaccauggacggcauccugaaguccauccucaaggucaagaagucccuggggauguucgugagcgacacccccggcgagcggaaccccuacgagaacauccuguacaagaucugccucagcggggacggcuggccguacaucgcgucccgcaccagcaucguggggcgggccugggagaacacgaccgucgaccuggaguccgacggcaagccccagaaggugggcaccgccgggagcaacaagucccugcagagcgccggcuuccccaccgggcucacguacucccagcugaugacccugaaggacagcaugaugcagcuggaccccuccgccaagaccuggaucgacaucgagggccgcccggaggaccccgucgagaucgcgcucuaccagcccaugagcgggugcuacauccacuucuuccgggagcccaccgaccugaagcaguucaagcaggacgccaaguacucccacggcaucgacgugacggaccuguucagcgcccagccgggccucaccagcgccgugaucgaggcccugccccgcaacaugguccugaccugccagggguccgacgacaucaagcggcuccuggacagccagggccgccgcgacaucaagcugaucgacaucgcgcucuccaaggccgacagccggcgcuucgagaacgccgugugggaccagugcaaggaccugugccacaugcacaccgggguggucguggagaagaagaagcggggcgggaaggaggagaucacgccccacugcgcccugauggacugcaucauguacgacgccgcgguguccggcggccucaacauccccguccugcgcgccgugcugccgcgggacaugguguuccgcaccagcucccccaaggucgugcucuga

SEQ ID NO: 8170 - RNA, 1710 nt, Artificial Sequence
  derived and/or modified CDS sequence (opt1) from LASV(LASV245-NIG-2011;Clade II)__AIT17655__NP
augagcgccuccaaggaggugaaguccuuccuguggacccagagccuccgccgggagcugagcggcuacugcuccaacaucaagcugcaggucgugaaggacgcccaggcgcuccugcacgggcuggacuucagcgagguguccaacguccagcgccucaugcggaagcagaagcgcgacgacagcgaccugaagcggcugcgcgaccucaaccaggccgugaacaaccugguggagcugaaguccacccagcagaaguccauccuccgggucggcacccugaccagcgacgaccugcucacccuggccgccgaccuggagaagcucaagagcaaggugauccgcaccgagaagccccuguccagcgggguguacaugggcaaccuguccacgcagcagcucgagcagcggcgcgcccugcugaacaugaucgggauggucggcggcgcgcaggggacccagccgggccgggacgggguggugcgcgucugggacgugaagaaccccgaccuccugaacaaccaguucggcaccaugcccagccugacccucgccugccugacgaagcagggccagguggaccugaacgacgccguccucgcccugaccgaccuggggcucaucuacaccgcgaaguuccccaacuccagcgaccuggaccggcugucccagagccacccgauccucaacaugguggacaccaagaaguccagccugaacaucagcggcuacaacuucucccugggggccgccgugaaggccggcgccugcaugcucgacgggggcaacaugcuggagacgaucaaggucacgccccagaccauggacggcauccucaagagcauccugaaggugaagaagucccuggggauguucgugagcgacacccccggcgagcgcaaccccuacgagaacauccuguacaagaucugccucuccggggacggcuggccguacaucgcgagccggaccuccaucgucgggcgcgccugggagaacaccaccguggaccuggagagcgacggcaagccccagaaggugggcaccacgggguccaacaagagccugcaguccgccggcuuccccaccgggcucaccuacagccagcugaugacccugaaggacuccaugaugcagcuggaccccagcgccaagacguggaucgacaucgagggccggccggaggaccccgucgagaucgcccucuaccagcccauguccgggugcuacauccacuucuuccgcgagcccaccgaccugaagcaguucaagcaggacgcgaaguacagccacggcaucgacguggccgaccuguucccggcccagcccggccucaccuccgccgucaucgaggcccugccccggaacauggugcugaccugccaggggagcgacgacaucaagcgccuccuggacagccagggccggcgcgacaucaagcugaucgacaucgcgcucuccaaggccgacagccgccgguucgagaacgccgugugggaccagugcaaggaccugugccacaugcacacgggggucgugguggagaagaagaagcgcggcgggaaggaggagaucacgccccacugcgcccugauggacugcaucauguacgacgccgcggucuccggcggccucaacaucccggugcugcgggccgugcugccccgcgacauggucuuccggaccagcucccccaagguggugcucuga

SEQ ID NO: 8171 - RNA, 1710 nt, Artificial Sequence
  derived and/or modified CDS sequence (opt1) from LASV(LASV246-NIG-2010;Clade II)__AIT17659__NP
augagcgccuccaaggaggugaaguccuuccuguggacccagagccuccgccgggagcugagcggcuacugcuccagcaucaagcugcaggucgugaaggacgcccaggcgcuccugcacgggcuggacuucuccgaggugagcaacguccagcgccucaugcggaagcagaagcgcgacgacuccgaccugaagcggcugcgcgaccucaaccaggccgugaacaaccugguggagcucaagagcacccagcagaaguccguccugcgggugggcacgcugaccagcgacgaccugcucacccuggccgccgaccuggagaagcucaaguccaaggugauccgcaccgagcggccccugagcuccggggucuacaugggcaaccugagcacgcagcagcucgagcagcgccgggcccugcuguccaugaucgggauggugggcggcgcgcaggggacccagccgggccgcgacggggugguccgggugugggacgugaagaaccccgaccuccugaacaaccaguucggcaccaugcccagccugacccucgccugccugacgaagcaggggcaggucgaccugaacgacgccgugcucgcccugaccgaccugggccucaucuacaccgcgaaguaccccaacuccagcgaccuggaccgccugagccagucccacccgauccucaacaugguggacaccaagaaguccagccugaacaucagcggcuacaacuucucccugggggccgccgucaaggccggcgccugcaugcucgacgggggcaacaugcuggagacgaucaaggugacgccccagaccauggacggcauccucaagagcauccugaaggugaagcggucccuggggauguucgucagcgacacccccggcgagcgcaaccccuacgagaacauccuguacaagaucugccucuccggggacggcuggccguacaucgcgagccggaccuccaucguggggcgcgccugggagaacaccaccguggaccuggagagcgacggcaagccccagaaggucggcaccgccggguccaacaagagccugcaguccgccggcuuccccacggggcucaccuacagccagcugaugacccugaaggacuccaugaugcagcuggaccccagcgccaagaccuggaucgacaucgagggccggccggaggaccccguggagaucgcgcucuaccagcccauguccgggugcuacauccacuucuuccgcgagcccacggaccugaagcaguucaagcaggacgccaaguacagccacggcaucgacgucgccgaccuguucccggcccagcccggccucaccagcgccgugaucgaggcgcugccccggaacauggugcugaccugccagggguccgacgacaucaagcgccuccuggacagccagggccgccgggacaucaagcugaucgacaucgcccucaacaaggccgacucccgccgguucgagaacgccgucugggaccagugcaaggaccugugccacaugcacaccggggugguggucgagaagaagaagcgcggcgggaaggaggagaucacgccccacugcgcccugauggacugcaucauguacgacgcggccgugagcggcggccucaacaucccggugcugcgggccguccugccccgcgacaugguguuccggaccuccagccccaaggugguccucuga

SEQ ID NO: 8172 - RNA, 1710 nt, Artificial Sequence
  derived and/or modified CDS sequence (opt1) from LASV(LASV251-NIG-2010;Clade II)__AIT17667__NP
augagcgccuccaaggaggugaaguccuuccuguggacccagagccuccgccgggagcugagcggcuacugcuccagcaucaagcugcaggucgugaaggacgcccaggcgcuccugcacgggcuggacuucuccgaggugagcaacguccagcgccucaugcggaagcagaagcgcgacgacuccgaccugaagcggcugcgcgaccucaaccaggccgugaacaaccugguggagcucaagagcacccagcagaaguccauccugcgggucggcacccugaccagcgacgaccugcucacccuggccgccgaccuggagaagcucaaguccaaggugauccgcaccgagcggccccugagcuccgggguguacaugggcaaccugagcacgcagcagcucgagcagcgccgggcccugcugaacaugaucgggauggucggcggcgcgcaggggacccagccgggccgcgacgggguggugcgggucugggacgugaagaaccccgaccuccugaacaaccaguucggcaccaugcccucccugacccucgccugccugacgaagcagggccagguggaccugaacgacgccguccucgcccugaccgaccuggggcucaucuacaccgcgaaguaccccaacagcuccgaccuggaccgccugagccagagccacccgauccucaacaugguggacaccaagaaguccagccugaacaucuccggcuacaacuucagccugggggccgccgugaaggccggcgccugcaugcucgacgggggcaacaugcuggagacgaucaaggucacgccccagaccaucgacggcauccugaaguccauccucaaggugaagaagucccuggggauguucgugagcgacacccccggcgagcggaaccccuacgagaacauccuguacaagaucugccucagcggggacggcuggccguacaucgcgucccgcaccagcaucgucgggcgggccugggagaacaccaccguggaccuggaguccgacggcaagccccagaaggugggcaccacggggagcaacaagucccugcagagcgccggcuuccccaccgggcucaccuacucccagcugaugacccugaaggacagcaugaugcagcuggaccccuccgccaagacguggaucgacaucgagggccgcccggaggaccccgucgagaucgcccucuaccagcccaugagcgggugcuacauccacuucuuccgggagcccaccgaccugaagcaguucaagcaggacgcgaaguacucccacggcaucgacgugaccgaccuguucccggcccagcccggccucaccagcgccgucaucgaggcccugccccgcaacauggugcugacgugccaggggagcgaggacaucaagcggcuccuggacucccagggccgccgcgacaucaagcugaucgacaucgcccucagcaaggcggacucccggcgcuucgagaacgccgugugggaccagugcaaggaccugugccacaugcacaccggggucgugguggagaagaagaagcggggcgggaaggaggagaucacgccccacugcgcccugauggacugcaucauguacgacgccgccgucagcggcggccucaacaucccggugcugcgcgcggugcugccccgggacauggucuuccgcaccuccagccccaagguggugcucuga

SEQ ID NO: 8173 - RNA, 1710 nt, Artificial Sequence
  derived and/or modified CDS sequence (opt1) from LASV(LASV253-NIG-2011;Clade II)__AIT17671__NP
augagcgccuccaaggaggugaaguccuuccuguggacccagagccuccgccgggagcugagcggcuacugcuccagcaucaagcugcaggucgugaaggacgcccaggcgcuccugcacgggcuggacuucuccgaggugagcaacguccagcgccucaugcggaagcagaagcgcgacgacuccgaccugaagcggcugcgcgaccucaaccaggccgugaacaaccugguggagcucaagagcacccagcagaaguccguccugcgggugggcacccugaccagcgacgaccugcucacccuggccgccgaccuggagaagcucaaguccaaggugauccgcaccgagcggccccugagcuccggggucuacaugggcaaccugagcacgcagcagcucgagcagcgccgggcccugcugaacaugaucgggauggugggcggcgcgcaggggacccagccgggccgcgacggggugguccgggugugggacgugaagaaccccgaccuccugaacaaccaguucggcaccaugcccucccugacccucgccugccugacgaagcaggggcaggucgaccugaacgacguggugcucgcccugaccgaccugggccucaucuacaccgccaaguaccccaacagcuccgaccuggaccgccugagccagagccacccgauccucaacauggucgacaccaagaaguccagccugaacaucuccggcuacaacuucagccugggggcggccgugaaggccggcgccugcaugcucgacgggggcaacaugcuggagacgaucaaggugacgccccagaccauggacggcauccugaaguccauccucaaggucaagaagucccuggggauguucgugagcgacacccccggcgagcggaaccccuacgagaacauccuguacaagaucugccucagcggggacggcuggccguacaucgccucccgcaccagcaucguggggcgggcgugggagaacaccaccgucgaccuggaguccgacggcaagccccagaaggugggcaccgccgggagcaacaagucccugcagagcgccggcuuccccacggggcucaccuacucccagcugaugacccugaaggacagcaugaugcagcuggaccccuccgccaagaccuggaucgacaucgagggccgcccggaggaccccgucgagaucgcccucuaccagcccaugagcgggugcuacauccacuucuuccgggagcccacggaccugaagcaguucaagcaggacgcgaaguacucccacggcaucgacgugaccgaccuguucccggcccagcccggccucaccagcgccgugaucgaggcccugccccgcaacaugguccugaccugccaggggagcgacgacaucaagcggcuccuggacucccagggccgccgcgacaucaagcugaucgacaucgcccucagcaaggcggacucccggcgcuucgagaacgccgugugggaccagugcaaggaccugugccacaugcacacggggguggucguggagaagaagaagcggggcgggaaggaggagaucacgccccacugcgcccugauggacugcaucauguacgacgccgccgugagcggcggccucaacaucccgguccugcgcgcggugcugccccgggacaugguguuccgcaccuccagccccaaggucgugcucuga

SEQ ID NO: 8174 - RNA, 1710 nt, Artificial Sequence
  derived and/or modified CDS sequence (opt1) from LASV(LASV254-NIG-2011;Clade II)__AIT17675__NP
augagcgccuccaaggaggugaaguccuuccuguggacccagagccuccgccgggagcugagcggcuacugcuccagcaucaagcugcaggucgugaaggacgcccaggcgcuccugcacgggcuggacuucuccgaggugagcaacguccagcgccucaugcggaagcagaagcgcgacgacuccgaccugaagcggcugcgcgaccucaaccaggccgugaacaaccugguggagcucaagagcacccagcagaaguccguccugcgggugggcacgcugaccagcgacgaccugcucacccuggccgccgaccuggagaagcucaaguccaaggugauccgcaccgagcggccccugagcuccggggucuacaugggcaaccugagcacgcagcagcucgagcagcgccgggcccugcugaacaugaucgggauggugggcggcgcgcaggggacccagccgggccgcgacggggugguccgggugugggacgugaagaaccccgaccuccugaacaaccaguucggcaccaugcccucccugacccucgccugccugacgaagcaggggcaggucgaccugaacgacgccgugcucgcccugaccgaccugggccucaucuacaccgcgaaguaccccaacagcuccgaccuggaccgccugagccagagccacccgauccucaacaugguggacaccaagaaguccagccugaacaucuccggcuacaacuucagccugggggccgccgucaaggccggcgccugcaugcucgacgggggcaacaugcuggagacgaucaaggugacgccccagaccauggacggcauccugaaguccauccucaaggugaagaagucccuggggauguucgucagcgacacccccggcgagcggaaccccuacgagaacauccuguacaagaucugccucagcggggacggcuggccguacaucgcgucccgcaccagcaucguggggcgggccugggagaacaccaucguggaccuggaguccgacggcaagccccagaaggucggcaccgccgggagcaacaagucccugcagagcgccggcuuccccaccgggcucacguacucccagcugaugacccugaaggacagcaugaugcagcuggaccccuccgccaagaccuggaucgacaucgagggccgcccggaggaccccguggagaucgcgcucuaccagcccaugagcgggugcuacauccacuucuuccgggagcccaccgaccugaagcaguucaagcaggacgccaaguacucccacggcaucgacgucgccgaccuguucccggcccagcccggccucacgagcgccgugaucgaggcgcugccccgcaacauggugcugaccugccaggggagcgacgacaucaagcggcuccuggacucccagggccgccgcgacaucaagcugaucgacaucgcccucagcaaggccgacucccggcgcuucgagaacgccgucugggaccagugcaaggaccugugccacaugcacaccggggugguggucgagaagaagaagcggggcgggaaggaggagaucacgccccacugcgcccugauggacugcaucauguacgacgcggccgugagcggcggccucaacaucccggugcugcgcgccguccugccccgggacaugguguuccgcaccuccagccccaaggugguccucuga

SEQ ID NO: 8175 - RNA, 1710 nt, Artificial Sequence
  derived and/or modified CDS sequence (opt1) from LASV(LASV256-NIG-2010;Clade II)__AIT17679__NP
augagcgccuccaaggaggugaaguccuuccuguggacccagagccuccgccgggagcugagcggcuacugcuccagcaucaagcugcaggucgugaaggacgcccaggcgcuccugcacgggcuggacuucuccgaggugagcaacguccagcgccucaugcggaagcagaagcgcgacgacuccgaccugaagcggcugcgcgaccucaaccaggccgugaacaaccugguggagcucaagagcacccagcagaaguccauccugcgggucggcacgcugaccagcgacgaccugcucacccuggccgccgaccuggagaagcucaaguccaaggugauccgcaccgagcggccccugagcuccgggguguacaugggcaaccugagcacgcagcagcucgagcagcgccgggcccugcugaacaugaucgggauggucggcggcgcgcaguccacccagccggggcgcgacggcguggugcgggucugggacgugaagaaccccgaccuccugaacaaccaguucgggaccaugcccagccugacccucgccugccugacgaagcagggccagguggaccugaacgacgccguccucgcccugaccgaccuggggcucaucuacaccgcgaaguaccccaacuccagcgaccuggaccgccugagccagucccacccgauccucaacaugguggacaccaagaaguccagccugaacaucagcggcuacaacuucucccugggcgccgccgugaaggccggggccugcaugcucgacggcgggaacaugcuggagacgaucaaggucacgccccagaccauggacggcauccucaagagcauccugaaggugaagcggucccugggcauguucgugagcgacacccccggggagcgcaaccccuacgagaacauccuguacaagaucugccucuccggcgacggguggccguacaucgcgagccggaccuccaucgucggccgcgccugggagaacaccaccguggaccuggagagcgacgggaagccccagaaggugggcaccgccggcuccaacaagagccugcaguccgccggguuccccacgggccucaccuacagccagcugaugacccugaaggacuccaugaugcagcuggaccccagcgccaagaccuggaucgacaucgaggggcggccggaggaccccgucgagaucgcgcucuaccagcccauguccggcugcuacauccacuucuuccgcgagcccacggaccugaagcaguucaagcaggacgccaaguacagccacgggaucgacguggccgaccuguucccggcccagcccggccucaccagcgccgucaucgaggcgcugccccggaacauggugcugaccugccagggcuccgacgacaucaagcgccuccuggacagccaggggcgccgggacaucaagcugaucgacaucgcccucuccaaggccgacagccgccgguucgagaacgccgugugggaccagugcaaggaccugugccacaugcacaccggcgucgugguggagaagaagaagcgcgggggcaaggaggagaucacgccccacugcgcccugauggacugcaucauguacgacgcggccgucuccgggggccucaacaucccggugcugcgggccgugcugccccgcgacauggucuuccggaccagcucccccaagguggugcucuga

SEQ ID NO: 8176 - RNA, 1710 nt, Artificial Sequence
  derived and/or modified CDS sequence (opt1) from LASV(LASV263-NIG-2011;Clade II)__AIT17683__NP
augagcgccuccaaggaggugaaguccuuccuguggacccagagccuccgccgggagcugagcggcuacugcuccaacaucaagcugcaggucgugaaggacgcccaggcgcuccugcacgggcuggacuucagcgagguguccaacguccagcgccucaugcggaagcagaagcgcgacgacagcgaccugaagcggcugcgcgaccucaaccaggccgugaacaaccugguggagcugaaguccacccagcagaaguccauccuccgggucggcacgcugaccagcgacgaccugcucacccuggccgccgaccuggagaagcucaagagcaaggugauccgcaccgagcggccccuguccagcgggguguacaugggcaaccuguccacgcagcagcucgagcagcgccgggcccugcugaacaugaucgggauggucggcggcgcgcaggggacccagccgggccgcgacgggguggugcgggucugggacgugaagaaccccgaccuccugaacaaccaguucggcaccaugcccagccugacccucgccugccugacgaagcagggccagguggaccugaacgacgccguccucgcccugaccgaccuggggcucaucuacaccgcgaaguaccccaacuccagcgaccuggaccgccugucccagagccacccgauccucaacaugguggacaccaagaaguccagccugaacaucagcggcuucaacuucucccugggggccgccgugaaggccggcgccugcaugcucgacgggggcaacaugcuggagacgaucaaggucacgccccagaccauggacggcauccucaagagcauccugaaggugaagaagucccuggggauguucgugagcgacacccccggcgagcggaaccccuacgagaacauccuguacaagaucugccucuccggggacggcuggccguacaucgcgagccgcaccuccaucgucgggcgggccugggagaacaccaccguggaccuggagagcgacggcaagccccagaaggugggcaccgccggguccaacaagagccugcaguccgccggcuuccccacggggcucaccuacagccagcugaugacccugaaggacuccaugaugcagcuggaccccagcgccaagaccuggaucgacaucgagggccgcccggaggaccccgucgagaucgcgcucuaccagcccauguccgggugcuacauccacuucuuccgggagcccacggaccugaagcaguucaagcaggacgccaaguacagccacggcaucgacguggccgaccuguucccggcccagcccggccucaccuccgccgucaucgaggcgcugccccgcaacauggugcugaccugccaggggagcgacgacaucaagcggcuccuggacagccagggccgccgcgacaucaagcugaucgacaucgcccucuccaaggccgacagccggcgcuucgagaacgccgugugggaccagugcaaggaccugugccacaugcacaccggggucgugguggagaagaagaagcggggcgggaaggaggagaucacgccccacugcgcccugauggacugcaucauguacgacgcggccgucuccggcggccucaacaucccggugcugcgcgccgugcugccccgggacauggucuuccgcaccagcucccccaagguggugcucuga

SEQ ID NO: 8177 - RNA, 1710 nt, Artificial Sequence
  derived and/or modified CDS sequence (opt1) from LASV(LASV267-NIG-2010;Clade II)__AIT17687__NP
augagcgccuccaaggaggugaaguccuuccuguggacccagagccuccgccgggagcugagcggcuacugcuccagcaucaagcugcaggucgugaaggacgcccaggcgcuccugcacgggcuggacuucuccgaggugagcaacguccagcgccucaugcggaagcagaagcgcgacgacuccgaccugaagcggcugcgcgaccucaaccaggccgugaacaaccugguggagcucaagagcacccagcagaaguccauccugcgggucggcacgcugaccagcgacgaccugcucacccuggccgccgaccuggagaagcucaaguccaaggugauccgcaccgagcggccccugagcuccgggguguacaugggcaaccugagcgcccagcagcucgagcagcgccgggcgcugcugaacaugaucgggauggucggcggcgcccaggggacgcagccgggccgcgacgggguggugcgggucugggacgugaagaaccccgaccuccugaacaaccaguucggcaccaugcccucccugacccucgccugccugaccaagcagggccagguggaccugaacgacgccguccucgcgcugacggaccuggggcucaucuacaccgccaaguaccccaacagcuccgaccuggaccgccugagccagagccacccgauccucaacaugguggacaccaagaaguccagccugaacaucuccggcuacaacuucagccugggggccgccgugaaggccggcgcgugcaugcucgacgggggcaacaugcuggagaccaucaaggucacgccccagaccauggacggcauccugaaguccauccucaaggugaagcggagccuggggauguucguguccgacacccccggcgagcgcaaccccuacgagaacauccuguacaagaucugccucagcggggacggcuggccguacaucgccucccggaccagcaucgucgggcgcgccugggagaacacgaccguggaccuggaguccgacggcaagccccagaaggugggcaccgccgggagcaacaagucccugcagagcgccggcuuccccaccgggcucacguacucccagcugaugacccugaaggacagcaugaugcagcuggaccccuccgcgaagaccuggaucgacaucgagggccggccggaggaccccgucgagaucgcccucuaccagcccaugagcgggugcuacauccacuucuuccgcgagcccaccgaccugaagcaguucaagcaggacgccaaguacucccacggcaucgacguggccgaccuguucccggcccagcccggccucacgagcgcggucaucgaggcccugccccggaacauggugcugaccugccaggggagcgacgacaucaagcgccuccuggacucccagggccgccgggacaucaagcugaucgacaucgcccucagcaaggccgacucccgccgguucgagaacgccgugugggaccagugcaaggaccugugccacaugcacaccggggucgugguggagaagaagaagcgcggcgggaaggaggagaucacgccccacugcgcgcugauggacugcaucauguacgacgccgccgucagcggcggccucaacaucccggugcugcgggccgugcugccccgcgacauggucuuccggaccuccagccccaagguggugcucuga

SEQ ID NO: 8178 - RNA, 1710 nt, Artificial Sequence
  derived and/or modified CDS sequence (opt1) from LASV(LASV274-NIG-2010;Clade II)__AIT17695__NP
augagcgccuccaaggaggugaaguccuuccuguggacccagagccuccgccgggagcugagcggcuacugcuccaacaucaagcugcaggucgugaaggacgcccaggcgcuccugcacgggcuggacuucagcgagguguccaacguccagcgccucaugcggaagcagaagcgcgacgacagcgaccugaagcggcugcgcgaccucaaccaggccgugaacaaccugguggagcugaaguccacccagcagaaguccauccuccgggucggcacgcugaccagcgacgaccugcucacccuggccgccgaccuggagaagcucaagagcaaggugauccgcaccgagcggccccuguccagcgggguguacaugggcaaccuguccacgcagcagcucgagcagcgccgggcccugcugaaccucaucgggauggucggcggcgcgcaggggacccagccgggccgcgacgggguggugcgggucugggacgugaagaaccccgaccugcugaacaaccaguucggcaccaugcccagccucacccuggccugccugacgaagcagggccagguggaccucaacgacgucgugcuggcccugaccgaccucgggcugaucuacaccgccaaguaccccaacuccagcgaccuggaccgccucucccagagccacccgauccugaacaugguggacaccaagaaguccagccugaacaucagcggcuucaacuucucccucggggcggccgucaaggccggcgccugcaugcuggacgggggcaacaugcuggagacgaucaaggugacgccccacaccauggacggcauccucaagagcauccugaaggugaagaagucccuggggauguucgucagcgacacccccggcgagcggaaccccuacgagaacauccucuacaagaucugccuguccggggacggcuggccguacaucgccagccgcaccuccaucguggggcgggcgugggagaacaccaccguggaccuggagagcgacggcaagccccacaaggucggcaccgccggguccaacaagagccuccaguccgccggcuuccccacggggcugaccuacagccagcugaugacccugaaggacuccaugaugcagcucgaccccagcgccaagaccuggaucgacaucgagggccgcccggaggaccccguggagaucgcccuguaccagcccauguccgggugcuacauccacuucuuccgggagcccacggaccugaagcaguucaagcaggacgcgaaguacagccacggcaucgacgucgccgaccucuucccggcccagcccggccugaccuccgccgugaucgaggcccugccccgcaacauggugcugaccugccaggggagcgacgacaucaagcggcuccuggacagccagggccgccgcgacaucaagcucaucgacaucgcgcuguccaaggccgacagccggcgcuucgagaacgccgucugggaccagugcaaggaccugugccacaugcacaccggggugguggucgagaagaagaagcggggcgggaaggaggagaucacgccccacugcgcccucauggacugcaucauguacgacgccgcgguguccggcggccugaacaucccggugcugcgcgccguccucccccgggacaugguguuccgcaccagcucccccaaggugguccuguga

SEQ ID NO: 8179 - RNA, 1710 nt, Artificial Sequence
  derived and/or modified CDS sequence (opt1) from LASV(LASV719-NIG-2009;Clade II)__AIT17705__NP
augagcgccuccaaggaggugaaguccuuccuguggacccagagccuccgccgggagcugagcggcuacugcuccaacaucaagcugcaggucgugaaggacgcccaggcgcuccugcacgggcuggacuucagcgagguguccaacguccagcgccucaugcggaagcagaagcgcgacgacagcgaccugaagcggcugcgcgaccucaaccaggccgugaacaaccugguggagcugaaguccacccagcagaaguccauccuccgggucggcacgcugaccagcgacgaccugcucacccuggccgccgaccuggagaagcucaagagcaaggugauccgcaccgagcggccccuguccagcgggguguacaugggcaaccuguccacgcagcagcucgagcagcgccgggcccugcugaaccucaucgggauggucggcggcgcgcaggggacccagccgggccgcgacgggguggugcgggucugggacgugaagaaccccgaccugcugaacaaccaguucggcaccaugcccagccucacccuggccugccugacgaagcagggccagguggaccucaacgacgccguccuggcccugaccgaccucgggcugaucuacaccgcgaaguaccccaacuccagcgaccuggaccgccucucccagagccacccgauccugaacaugguggacaccaagaaguccagccugaacaucagcggcuucaacuucucccucggggccgccgugaaggccggcgccugcaugcuggacgggggcaacaugcuggagacgaucaaggucacgccccagaccauggacggcauccucaagagcauccugaaggugaagaagucccuggggauguucgugagcgacacccccggcgagcggaaccccuacgagaacauccucuacaagaucugccuguccggggacggcuggccguacaucgcgagccgcaccuccaucgucgggcgggccugggagaacaccaccguggaccuggagagcgacggcaagccccacaaggugggcaccgccggguccaaccgcagccuccaguccgccggcuuccccacggggcugaccuacagccagcugaugacccugaaggacuccaugaugcagcucgaccccagcgccaagaccuggaucgacaucgagggccggccggaggaccccgucgagaucgcgcuguaccagcccauguccgggugcuacauccacuucuuccgcgagcccacggaccugaagcaguucaagcaggacgccaaguacagccacggcaucgacguggccgaccucuucccggcccagcccggccugaccuccgccgucaucgaggcgcugccccggaacauggugcugaccugccaggggagcgacgacaucaagcgccuccuggacagccagggccgccgggacaucaagcucaucgacaucgcccuguccaaggccgacagccgccgguucgagaacgccgugugggaccagugcaaggaccugugccacaugcacaccggggucgugguggagaagaagaagcgcggcgggaaggaggagaucacgccccacugcgcccucauggacugcaucauguacgacgcggccgucuccggcggccugaacaucccggugcugcgggccgugcucccccgcgacauggucuuccggaccagcucccccaagguggugcuguga

SEQ ID NO: 8180 - RNA, 1710 nt, Artificial Sequence
  derived and/or modified CDS sequence (opt1) from LASV(LASV737-NIG-2009;Clade II)__AIT17711__NP
augagcgccuccaaggaggugaaguccuuccuguggacccagagccuccgccgggagcugagcggcuacugcuccaacaucaagcugcaggucgugaaggacgcccaggcgcuccugcacgggcuggacuucagcgagguguccaacguccagcgccucaugcggaagcagaagcgcgacgacagcgaccugaagcggcugcgcgaccucaaccaggccgugaacaaccugguggagcugaaguccacccagcagaaguccauccuccgggucggcacgcugaccagcgacgaccugcucacccuggccgccgaccuggagaagcucaagagcaaggugauccgcaccgagcggccccuguccagcgggguguacaugggcaaccuguccacgcagcagcucgagcagcgccgggcccugcugaaccucaucgggauggucggcggcgcgcaggggacccagccgggccgcgacgggguggugcgggucugggacgugaagaaccccgaccugcugaacaaccaguucggcaccaugcccagccucacccuggccugccugacgaagcagggccagguggaccucaacgacgccguccuggcccugaccgaccucgggcugaucuacaccgcgaaguaccccaacuccagcgaccuggaccgccucucccagagccacccgauccugaacaugguggacaccaagaaguccagccugaacaucagcggcuucaacuucucccucggggccgccgugaaggccggcgccugcaugcuggacgggggcaacaugcuggagacgaucaaggucacgccccagaccauggacggcauccucaagagcauccugaaggugaagaagucccuggggauguucgugagcgacacccccggcgagcggaaccccuacgagaacauccucuacaagaucugccuguccggggacggcuggccguacaucgcgagccgcaccuccaucgucgggcgggccugggagaacaccaccguggaccuggagagcgacggcaagccccacaaggugggcaccgccggguccagcaagucccuccagagcgccggcuuccccacggggcugaccuacucccagcugaugacccugaaggacagcaugaugcagcucgaccccuccgccaagaccuggaucgacaucgagggccgcccggaggaccccgucgagaucgcgcuguaccagcccaugagcgggugcuacauccacuucuuccgggagcccacggaccugaagcaguucaagcaggacgccaaguacucccacggcaucgacguggccgaccucuucccggcccagcccggccugaccagcgccgucaucgaggcgcugccccgcaacauggugcugaccugccaggggagcgacgacaucaagcggcuccuggacucccagggccgccgcgacaucaagcucaucgacaucgcccugagcaaggccgacucccggcgcuucgagaacgccgugugggaccagugcaaggaccugugccacaugcacaccggggucgugguggagaagaagaagcggggcgggaaggaggagaucacgccccacugcgcccucauggacugcaucauguacgacgcggccgucagcggcggccugaacaucccggugcugcgcgccgugcucccccgggacauggucuuccgcaccuccagccccaagguggugcuguga

SEQ ID NO: 8181 - RNA, 1710 nt, Artificial Sequence
  derived and/or modified CDS sequence (opt1) from LASV(LASV738-NIG-2009;Clade II)__AIT17713__NP
augagcgccuccaaggaggugaaguccuuccuguggacccagagccuccgccgggagcugagcggcuacugcuccaacaucaagcugcaggucgugaaggacgcccaggcgcuccugcacgggcuggacuucagcgagguguccaacguccagcgccucaugcggaagcagaagcgcgacgacagcgaccugaagcggcugcgcgaccucaaccaggccgugaacaaccugguggagcugaaguccacccagcagaaguccauccuccgggucggcacgcugaccagcgacgaccugcucacccuggccgccgaccuggagaagcucaagagcaaggugauccgcaccgagcggccccuguccagcgggguguacaugggcaaccuguccacgcagcagcucgagcagcgccgggcccugcugaacaugaucgggauggucggcggcgcgcaggggacccagccgggccgcgacgggguggugcgggucugggacgugaagaaccccgaccuccugaacaaccaguucggcaccaugcccagccugacccucgccugccugacgaagcagggccagguggaccugaacgacgccguccucgcccugaccgaccuggggcucaucuacaccgcgaaguaccccaacuccagcgaccuggaccgccugucccagagccacccgauccucaacaugguggacaucaagaaguccagccugaacaucagcggcuacaacuucucccugggggccgccgugaaggccggcgccugcaugcucgacgggggcaacaugcuggagaccaucaaggucacgccccagaccauggacggcauccucaagagcauccugaaggugaagaagucccuggggauguucgugagcgacacccccggcgagcggaaccccuacgagaacauccuguacaagaucugccucuccggggacggcuggccguacaucgcgagccgcaccuccaucgucgggcgggccugggagaacacgaccguggaccuggagagcgacggcaagccccagaaggugggcaccgccggguccaacaagagccugcaguccgccggcuuccccaccgggcucacguacagccagcugaugacccugaaggacuccaugaugcagcuggaccccagcgccaagaccuggaucgacaucgagggccgcccggaggaccccgucgagaucgcgcucuaccagcccauguccgggugcuacauccacuucuuccgggagcccaccgaccugaagcaguucaagcaggacgccaaguacagccacggcaucgacguggccgaccuguucccggcccagcccggccucacguccgccgucaucgaggcgcugccccgcaacauggugcugaccugccaggggagcgacgacaucaagcggcuccuggacagccagggccgccgcgacaucaagcugaucgacaucgcccucaacaaggccgacucccggcgcuucgagaacgccgugugggaccagugcaaggaccugugccacaugcacaccggggucgugguggagaagaagaagcggggcgggaaggaggagaucacgccccacugcgcccugauggacugcaucauguacgacgcggccgucagcggcggccucaacaucccggugcugcgcgccgugcugccccgggacauggucuuccgcaccuccagccccaagguggugcucuga

SEQ ID NO: 8182 - RNA, 1710 nt, Artificial Sequence
  derived and/or modified CDS sequence (opt1) from LASV(LASV966-NIG-2009;Clade II)__AIT17719__NP
augagcgccuccaaggaggugaaguccuuccuguggacccagagccuccgccgggagcugagcggcuacugcuccagcaucaagcugcaggucgugaaggacgcccaggcgcuccugcacgggcuggacuucuccgaggugagcaacguccagcgccucaugcggaagcagaagcgcgacgacuccgaccugaagcggcugcgcgaccucaaccaggccgugaacaaccugguggagcucaagagcacccagcagaaguccauccugcgggucggcacgcugaccagcgacgaccugcucacccuggccgccgaccuggagaagcucaaguccaaggugauccgcaccgagcggccccugagcuccgggguguacaugggcaaccugagcacgcagcagcucgagcagcgccgggcccugcugaacaugaucgggauggucuccggcgcgcagggcacccagccggggcgcgacggcguggugcgggucugggacgugaagaaccccgagcuccugaacaaccaguucgggaccaugcccagccugacccucgccugccugacgaagcagggccagguggaccugaacgacgccguccucgcccugaccgaccuggggcucaucuacaccgcgaaguaccccaacuccagcgaccuggaccgccugagccagucccacccgauccucaacaugguggacaccaagaaguccagccugaacaucagcggcuacaacuucucccugggcgccgccgugaaggccggggccugcaugcucgacggcgggaacaugcuggagacgaucaaggucacgccccagaccauggacggcauccucaagagcauccugaaggugaagaagucccugggcauguucgugagcgacacccccggggagcggaaccccuacgagaacauccuguacaagaucugccucuccggcgacggguggccguacaucgcgagccgcaccuccaucgucggccgggccugggagaacaccaccguggaccuggagagcgacgggaagccccagaaggugggcaccgccggcuccaacaagagccugcaguccgccggguuccccacgggccucaccuacagccagcugaugacccugaaggacuccaugaugcagcuggaccccagcgccaagaccuggaucgacaucgaggggcgcccggaggaccccgucgagaucgcgcucuaccagcccauguccggcugcuacauccacuucuuccgggagcccacggaccugaagcaguucaagcaggacgccaaguacagccacgggaucgacguggccgaccuguucccggcccagcccggccucaccagcgccgucaucgaggcgcugccccgcaacauggugcugaccugccagggcuccgacgacaucaagcggcuccuggacagccaggggcgccgcgacaucaagcugaucgacaucucccucagcaaggccgacucccggcgcuucgagaacgccgugugggaccagugcaaggaccugugccacaugcacaccggcgucgugguggagaagaagaagcgcgggggcaaggaggagaucacgccccacugcgcccugauggacugcaucauguacgacgccgcggucagcgggggccucaacaucccggugcugcgggccgugcugccccgggacauggucuuccgcaccuccagccccaagguggugcucuga

SEQ ID NO: 8183 - RNA, 1710 nt, Artificial Sequence
  derived and/or modified CDS sequence (opt1) from LASV(LASV969-NIG-2009;Clade II)__AIT17725__NP
augagcgccuccaaggaggugaaguccuuccuguggacccagagccuccgccgggagcugagcggcuacugcuccaacaucaagcugcaggucgugaaggacgcccaggcgcuccugcacgggcuggacuucagcgagguguccaacguccagcgccucaugcggaagcagaagcgcgacgacagcgaccugaagcggcugcgcgaccucaaccaggccgugaacaaccugguggagcugaaguccacccagcagaaguccauccuccgggucggcacgcugaccagcgacgaccugcucacccuggccgccgaccuggagaagcucaagagcaaggugauccgcaccgagcggccccuguccagcgggguguacaugggcaaccuguccgcccagcagcucgagcagcgccgggcgcugcugaacaugaucgggauggucggcggcgcccaggggacgcagcucggccgcgacgggguggugcgggucugggacgugaagaacccggaccugcugaacaaccaguucggcaccaugcccagccucacccuggccugccugaccaagcagggccagguggaccucaacgacgccguccuggcgcugacggaccucgggcugaucuacaccgccaaguaccccaacuccagcgaccuggaccgccucucccagagccaccccauccugaacaugguggacaccaagaaguccagccugaacaucagcggcuacaacuucucccucggggccgccgugaaggccggcgcgugcaugcuggacgggggcaacaugcuggagaccaucaaggucacgccgcagaccauggacggcauccucaagagcauccugaaggugaagaagucccuggggauguucgugagcgacacccccggcgagcggaaccccuacgagaacauccucuacaagaucugccuguccggggacggcuggcccuacaucgccagccgcaccuccaucgucgggcgggccugggagaacacgaccguggaccuggagagcgacggcaagccgcagaaggugggcaccgccggguccaacaagagccuccaguccgccggcuuccccaccgggcugacguacagccagcugaugacccugaaggacuccaugaugcagcucgaccccagcgcgaagaccuggaucgacaucgagggccgccccgaggacccggucgagaucgcccuguaccagcccauguccgggugcuacauccacuucuuccgggagcccaccgaccugaagcaguucaagcaggacgccaaguacagccacggcaucgacguggccgaccucuuccccgcccagccgggccugacguccgcggucaucgaggcccugccccgcaacauggugcugaccugccaggggagcgaggacaucaagcggcuccuggacagccagggccgccgcgacaucaagcucaucgacaucgcccuguccaaggccgacagccggcgcuucgagaacgccgugugggaccagugcaaggaccugugccacaugcacaccggggucgugguggagaagaagaagcggggcgggaaggaggagaucacgccccacugcgcgcucauggacugcaucauguacgacgccgccgucuccggcggccugaacauccccgugcugcgcgccgugcucccgcgggacauggucuuccgcaccagcucccccaagguggugcuguga

SEQ ID NO: 8184 - RNA, 1710 nt, Artificial Sequence
  derived and/or modified CDS sequence (opt1) from LASV(LASV971-NIG-2009;Clade II)__AIT17729__NP
augagcgccuccaaggaggugaaguccuuccuguggacccagagccuccgccgggagcugagcggcuacugcuccagcaucaagcugcaggucgugaaggacgcccaggcgcuccugcacgggcuggacuucuccgaggugagcaacguccagcgccucaugcggaagcagcgccgggacgacuccgaccugaagcgccugcgggaccucaaccaggccgugaacaaccugguggagcucaagagcacccagcagaaguccauccugcgcgucggcacccugaccagcgacgaccugcucacccuggccgccgaccuggagaagcucaaguccaaggugauccggaccgagcgcccccugagcuccgggguguacaugggcaaccugagcacgcagcagcucgagcagcggcgcgcccugcugaacaugaucgggauggucggcggcacccaggggacccagccgggccgggacgggguggugcgcgucugggacgugaagaaccccgaccuccugaacaaccaguucggcaccaugcccucccugacgcucgcgugccugaccaagcagggccagguggaccugaacgacgccguccucgcccugaccgaccuggggcucaucuacaccgccaaguaccccaacagcuccgaccuggaccggcugagccagagccacccgauccucaacaugguggacacgaagaaguccagccugaacaucuccggcuacaacuucagccugggggcggccgugaaggccggcgccugcaugcucgacgggggcaacaugcuggagaccaucaaggucacgccccagaccauggacggcauccugaaguccauccucaaggugaagcgcagccuggggauguucguguccgacacccccggcgagcggaaccccuacgagaacauccuguacaagaucugccucagcggggacggcuggccguacaucgccucccgcaccagcaucgucgggcgggcgugggagaacaccaccguggaccuggaguccgacggcaagccccagaaggugggcacggccgggagcaacaagucccugcagagcgccggcuuccccaccgggcucaccuacucccagcugaugacccugaaggacagcaugaugcagcuggaccccuccgccaagacguggaucgacaucgagggccgcccggaggaccccgucgagaucgcccucuaccagcccaugagcgggugcuacauccacuucuuccgggagcccaccgaccugaagcaguucaagcaggacgcgaaguacucccacggcaucgacguggccgaccuguucccggcccagcccggccucaccagcgccgucaucgaggcccugccccgcaacauggugcugaccugccaggggagcgacgacaucaagcgccuccuggacucccagggccggcgcgacaucaagcugaucgacaucgcgcucagcaaggccgacucccggaaguucgagaacgccgugugggaccagugcaaggaccugugccacaugcacacgggggucgugguggagaagaagaagcgcggcgggaaggaggagaucacgccccacugcgcccugauggacugcaucauguacgacgccgcggucagcggcggccucaacaucccggugcugcgggccgugcugccccgcgacauggucuuccggaccuccagccccaagguggugcucuga

SEQ ID NO: 8185 - RNA, 1710 nt, Artificial Sequence
  derived and/or modified CDS sequence (opt1) from LASV(LASV975-NIG-2009;Clade II)__AIT17733__NP
augagcgccuccaaggaggugaaguccuuccuguggacccagagccuccgccgggagcugagcggcuacugcuccaacaucaagcugcaggucgugaaggacgcccaggcgcuccugcacgggcuggacuucagcgagguguccaacguccagcgccucaugcggaagcagaagcgcgacgacagcgaccugaagcggcugcgcgaccucaaccaggccgugaacaaccugguggagcugaaguccacccagcagaaguccauccuccgggucggcacgcugaccagcgacgaccugcucauccuggccgccgaccuggagaagcucaagagcaaggugauccgcaccgagcggccccuguccagcgggguguacaugggcaaccuguccacccagcagcucgagcagcgccgggcccugcugaacaugaucgggauggucggcggcgcgcaggggacgcagccgggccgcgacgggguggugcgggucugggacgugaagaaccccgaccuccugaacaaccaguucggcaccaugcccagccugacccucgccugccugaccaagcagggccagguggaccugaacgacgccguccucgcccugacggaccuggggcucaucuacaccgcgaaguaccccaacuccagcgaccuggaccgccugucccagagccacccgauccucaacaugguggacaccaagaaguccagccugaacaucagcggcuacaacuucucccugggggccgccgugaaggccggcgccugcaugcucgacgggggcaacaugcuggagaccaucaaggucacgccccagaccauggacggcauccucaagagcauccugaaggugaagaagucccuggggauguucgugagcgacacccccggcgagcggaaccccuacgagaacauccuguacaagaucugccucuccggggacggcuggccguacaucgcgagccgcaccuccaucgucgggcgggccugggagaacacgaccguggaccuggagagcgacggcaagccccagaaggugggcaccgccggguccaacaagagccugcaguccgccggcuuccccaccgggcucacguacagccagcugaugacccugaaggacuccaugaugcagcuggaccccagcgccaagaccuggaucgacaucgagggccgcccggaggaccccgucgagaucgcgcucuaccagcccauguccgggugcuacauccacuucuuccgggagcccaccgaccugaagcaguucaagcaggacgccaaguacagccacggcaucgacguggccgaccuguucccggcccagcccggccucacguccgccgucaucgaggcgcugccccgcaacauggugcugaccugccaggggagcgacgacaucaagcggcuccuggacagccagggccgccgcgacaucaagcugaucgacaucgcccucuccaaggccgacagccggcgcuucgagaacgccgugugggaccagugcaaggaccugugccacaugcacaccggggucgugguggagaagaagaagcggggcgggaaggaggagaucacgccccacugcgcccugauggacugcaucauguacgacgcggccgucuccggcggccucaacaucccggugcugcgcgccgugcugccccgggacauggucuuccgcaccagcucccccaagguggugcucuga

SEQ ID NO: 8186 - RNA, 1710 nt, Artificial Sequence
  derived and/or modified CDS sequence (opt1) from LASV(LASV978-NIG-2009;Clade II)__AIT17745__NP
augagcgccuccaaggagaucaagagcuuccuguggacccagucccuccgccgggagcugagcggcuacugcuccagcaucaagcuccagguggucaaggacgcccaggcgcugcugcacgggcuggacuucuccgaggugagcaacgugcagcgccucaugcggaagcagaagcgcgacgacuccgaccugaagcggcugcgcgaccucaaccaggccgucaacaaccugguggagcucaagagcacccagcagaaguccauccugcgggugggcacgcugaccagcgacgaccugcucacccuggccgccgaccuggagaagcucaaguccaaggucauccgcaccgagcggccccugagcuccgggguguacaugggcaaccugagcacgcagcagcucgagcagcgccgggcccugcugaacaugaucgggauggugggcggcgcgcaggggacccagccgggccgcgacggggucgugcgggugugggacgucaagaaccccgaccuccugaacaaccaguucggcaccaugcccucccugacccucgccugccugacgaagcagggccagguggaccugaacgacgccgugcucgcccugaccgaccuggggcucaucuacaccgcgaaguaccccaacagcuccgaccuggaccgccugagccagagccacccgauccucaacauggucgacaccaagaaguccagccugaacaucuccggcuacaacuucagccugggggccgccgugaaggccggcgccugcaugcucgacgggggcaacaugcuggagacgaucaaggugacgccccagaccauggacggcauccugaaguccauccucaaggucaagcggagccuggggauguucguguccgacgcgcccggcgagcgcaaccccuacgagaacauccuguacaagaucugccucagcggggacggcuggccguacaucgccucccggaccagcaucguggggcgcgccugggagaacaccaccgucgaccuggaguccgacggcaagccccagaaggugggcaccgccgggagcaacaagucccugcagagcgccggcuuccccaccgggcucacguacucccagcugaugacccugaaggacagcaugaugcagcuggaccccuccgcgaagaccuggaucgacaucgagggccggccggaggaccccguggagaucgcccucuaccagcccaugagcgggugcuacauccacuucuuccgcgagcccaccgaccugaagcaguucaagcaggacgccaaguacucccacggcaucgacgucgccgaccuguucccggcccagcccggccucacgagcgcggugaucgaggcccugccccggaacaugguccugaccugccaggggagcgacgacaucaagcgccuccuggacucccagggccgccgggacaucaagcugaucgacaucgcccucagcaagguggacucccgccgguucgagaacgccgugugggaccagugcaaggaccugugccacaugcacaccggggucgugguggagaagaagaagcgcggcgggaaggaggagaucacgccccacugcgcccugauggacugcaucauguacgacgcggccgucagcggcggccucaacaucccggugcugcgggccgugcugccccgcgacauggucuuccggaccuccagccccaagguggugcucuga

SEQ ID NO: 8187 - RNA, 1710 nt, Artificial Sequence
  derived and/or modified CDS sequence (opt1) from LASV(LASV981-NIG-2009;Clade II)__AIT17753__NP
augagcgccuccaaggaggugaaguccuuccuguggacccagagccuccgccgggagcugagcggcuacugcuccagcaucaagcugcaggucgugaaggacgcccaggcgcuccugcacgggcuggacuucuccgaggugagcaacguccagcgccucaugcggaagcagaagcgcgacgacuccgaccugaagcggcugcgcgaccucaaccaggccgugaacaaccugguggagcucaagagcacccagcagaaguccauccugcgggucggcacccugaccagcgacgaccugcucacccuggccgccgaccuggagaagcucaaguccaaggugauccgcaccgagcggccccugagcuccgggguguacaugggcaaccugagcacgcagcagcucgagcagcgccgggcccugcugaacaugaucgggauggucggcggcgcgcaggggacccagccgggccgcgacgggguggugcgggucugggacgugaagaaccccgaccuccugaacaaccaguucggcaccaugcccucccugacccucgccugccugacgaagcagggccagguggaccugaacgacgccguccucgcccugaccgaccuggggcucaucuacaccgcgaaguaccccaacagcuccgaccuggaccgccugagccagagccacccgauccucaacaugguggacaccaagaaguccagccugaacaucuccggcuacaacuucagccugggggccgccgugaaggccggcgccugcaugcucgacgggggcaacaugcuggagacgaucaaggucacgccccagaccauggacggcauccugaaguccauccucaaggugaagcggagccuggggauguucguguccgacacccccggcgagcgcaaccccuacgagaacauccuguacaagaucugccucagcggggacggcuggccguacaucgcgucccggaccagcaucgucgggcgcgccugggagaacaccaccguggaccuggaguccgacggcaagccccagaaggugggcaccacggggagcaacaagucccugcagagcgccggcuuccccaccgggcucaccuacucccagcugaugacccugaaggacagcaugaugcagcuggaccccuccgccaagacguggaucgacaucgagggccggccggaggaccccgucgagaucgcccucuaccagcccaugagcgggugcuacauccacuucuuccgcgagcccaccgaccugaagcaguucaagcaggacgcgaaguacucccacggcaucgacguggccgaccuguucccggcccagcccggccucaccagcgccgucaucgaggcccugccccggaacauggugcugaccugccaggggagcgacgacaucaagcgccuccuggacucccagggccgccgggacaucaagcugaucgacaucgcgcucagcaaggccgacucccgccgguucgagaacgccgugugggaccagugcaaggaccugugccacaugcacacgggggucgugguggagaagaagaagcgcggcgggaaggaggagaucacgccccacugcgcccugauggacugcaucauguacgacgccgcggucagcggcggccucaacaucccggugcugcgggccgugcugccccgcgacauggucuuccggaccuccagccccaagguggugcucuga

SEQ ID NO: 8188 - RNA, 1710 nt, Artificial Sequence
  derived and/or modified CDS sequence (opt1) from LASV(LASV988-NIG-2009;Clade II)__AIT17759__NP
augagcgccuccaaggaggugaaguccuuccuguggacccagagccuccgccgggagcugagcggcuacugcuccaacaucaagcugcaggucgugaaggacgcccaggcgcuccugcacgggcuggacuucagcgagguguccaacguccagcgccucaugcggaagcagaagcgcgacgacagcgaccugaagcggcugcgcgaccucaaccaggccgugaacaaccugguggagcugaaguccacccagcagaaguccauccuccgggucggcacgcugaccagcgacgaccugcucacccuggccgccgaccuggagaagcucaagagcaaggugauccgcaccgagcggccccuguccagcgggguguacaugggcaaccugaacacgcagcagcucgagcagcgccgggcccugcugaacaugaucgggauggcgggcggcgcccaggggacccagccgggccgcgacggggucgugcgggugugggacgucaagaaccccgaccuccugaacaaccaguucggcaccaugcccucccugacccucgccugccugacgaagcagggccagguggaccugaacgacgccgugcucgcgcugaccgaccuggggcucaucuacaccgccaaguaccccaacagcuccgaccuggaccgccugagccagucccacccgauccucaacauggucgacaccaagaaguccagccugaacaucagcggcuacaacuucagccugggggccgccgugaaggccggcgcgugcaugcucgacgggggcaacaugcuggagacgaucaaggugacgccccagaccauggacggcauccugaaguccauccucaaggucaagaagucccuggggauguucgugagcgacacccccggcgagcggaaccccuacgagaacauccuguacaagaucugccucagcggggacggcuggccguacaucgccucccgcaccagcaucguggggcgggccugggagaacaccaccgucgaccuggaguccgacggcaagccccagaaggugggcaccgccgggagcaacaagucccugcagagcgccggcuuccccacggggcucaccuacucccagcugaugacccugaaggacagcaugaugcagcuggaccccuccgcgaagaccuggaucgacaucgagggccgcccggaggaccccguggagaucgcccucuaccagcccaugagcgggugcuacauccacuucuuccgggagcccacggaccugaagcaguucaagcaggacgccaaguacucccacggcaucgacgucgccgaccuguucccggcccagcccggccucaccagcgcggugaucgaggcccugccccgcaacaugguccugaccugccagggguccgacgacaucaagcggcuccuggacagccagggccgccgcgacaucaagcugaucgacaucgcccucagcaaggccgacucccggcgcuucgagaacgccgugugggaccagugcaaggaccugugccacaugcacaccgggguggucguggagaagaagaagcggggcgggaaggaggagaucacgccccacugcgcgcugauggacugcaucauguacgacgccgccgugagcggcggccucaacaucccgguccugcgcgccgugcugccccgggacaugguguuccgcaccuccagccccaaggucgugcucuga

SEQ ID NO: 8189 - RNA, 1710 nt, Artificial Sequence
  derived and/or modified CDS sequence (opt1) from LASV(LASV989-NIG-2009;Clade II)__AIT17763__NP
augagcgccuccaaggaggugaaguccuuccuguggacccagagccuccgccgggagcugagcggcuacugcuccagcaucaagcugcaggucgugaaggacgcccaggcgcuccugcacgggcuggacuucuccgaggugagcaacguccagcgccucaugcggaagcagaagcgcgacgacuccgaccugaagcggcugcgcgaccucaaccaggccgugaacaaccugguggagcucaagagcacccagcagaaguccauccugcgggucggcacgcugaccagcgacgaccugcucacccuggccgccgaccuggagaagcucaaguccaaggugauccgcaccgagcggccccugagcuccgggguguacaugggcaaccugagcacgcagcagcucgagcagcgccgggcccugcugaacaugaucgggauggucggcggcgcgcaggggacccagccgggccgcgacgggguggugcgggucugggacgugaagaaccccgaccuccugaacaaccaguucggcaccaugcccucccugacccucgccugccugacgaagcagggccagguggaccugaacgacgccguccucgcccugaccgaccuggggcucaucuacaccgcgaaguaccccaacagcuccgaccuggaccgccugagccagagccacccgauccucaacaugguggacaccaagaaguccagccugaacaucuccggcuacaacuucagccugggggccgccgugaaggccggcgccugcaugcucgacgggggcaacaugcuggagacgaucaaggucacgccccagaccguggacggcauccugaaguccauccucaaggugaagcggagccuggggauguucgucuccgacacccccggcgagcgcaaccccuacgagaacauccuguacaagaucugccucagcggggacggcuggccguacaucgcgucccggaccagcaucguggggcgcgccugggagaacaccaccguggaccuggaguccgacgagaagccccagaaggucggcgccgccggcagcaacaagucccugcagagcgccggguuccccaccggccucacguacucccagcugaugacccugaaggacagcaugaugcagcuggaccccuccgcgaagaccuggaucgacaucgaggggcggccggaggaccccguggagaucgcccucuaccagcccaugagcggcugcuacauccacuucuuccgcgagcccaccgaccugaagcaguucaagcaggacgccaaguacucccacgggaucgacgucacggaccuguucccggcccagcccggccucaccagcgccgugaucgaggcgcugccccggaacauggugcugaccugccagggcagcgacgacaucaagcgccuccuggacucccaggggcgccgggacaucaagcugaucgacaucgcccucagcaaggccgacucccgccgguucgagaacgccgucugggaccagugcaaggaccugugccacaugcacaccggcgugguggucgagaagaagaagcgcgggggcaaggaggagaucacgccccacugcgcccugauggacugcaucauguacgacgcggccgugagcgggggccucaacaucccggugcugcgggccguccugccccgcgacaugguguuccggaccuccagccccaaggugguccucuga

SEQ ID NO: 8190 - RNA, 1710 nt, Artificial Sequence
  derived and/or modified CDS sequence (opt1) from LASV(LASV991-NIG-2009;Clade II)__AIT17771__NP
augagcgccuccaaggaggugaaguccuuccuguggacccagagccuccgccgggagcugagcggcuacugcuccagcaucaagcugcaggucgugaaggacgcccaggcgcuccugcacgggcuggacuucuccgaggugagcaacguccagcgccucaugcggaagcagaagcgcgacgacuccgaccugaagcggcugcgcgaccucaaccaggccgugaacaaccugguggagcucaagagcacccagcagaaguccauccugcgggucggcacccugaccagcgacgaccugcucacccuggccgccgaccuggagaagcucaaguccaaggugauccgcaccgagcggccccugagcuccgggguguacaugggcaaccugagcacgcagcagcucgagcagcgccgggcccugcugaacaugaucgggauggucggcggcgcgcaggggacccagccgggccgcgacgggguggugcgggucugggacgugaagaaccccgaccuccugaacaaccaguucggcaccaugcccucccugacccucgccugccugacgaagcagggccagguggaccugaacgacgccguccucgcccugaccgaccuggggcucaucuacaccgcgaaguaccccaacagcuccgaccuggaccgccugagccagagccacccgauccucaacaugguggacaccaagaaguccagccugaacaucuccggcuacaacuucagccugggggccgccgugaaggccggcgccugcaugcucgacgggggcaacaugcuggagacgaucaaggucacgccccagaccauggacggcauccugaaguccauccucaaggugaagcggagccuggggauguucguguccgacacccccggcgagcgcaaccccuacgagaacauccuguacaagaucugccucagcggggacggcuggccguacaucgcgucccggaccagcaucgucgggcgcgccugggagaacaccaccguggaccuggaguccgacggcaagacccagaaggugagcacggccggcuccaacaagagccugcaguccgccggguuccccaccggccucaccuacagccagcugaugacccugaaggacuccaugaugcagcuggaccccagcgccaagacguggaucgacaucgaggggcggcccgaggacccggucgagaucgcgcucuaccagcccauguccggcugcuacauccacuucuuccgcgagcccaccgaccugaagcaguucaagcaggacgccaaguacagccacgggaucgacgugaccgaccuguuccccgcccagccgggccucaccagcgccgucaucgaggcccugccccggaacauggugcugacgugccagggcuccgacgacaucaagcgccuccuggacagccaggggcgccgggacaucaagcugaucgacaucgcgcucuccaaggccgacagccgccgguucgagaacgccgugugggaccagugcaaggaccugugccacaugcacaccggcgucgugguggagaagaagaagcgcgggggcaaggaggagaucacgccccacugcgcccugauggacugcaucauguacgacgccgcggucuccgggggccucaacauccccgugcugcgggccgugcugccgcgcgacauggucuuccggaccagcucccccaagguggugcucuga

SEQ ID NO: 8191 - RNA, 1710 nt, Artificial Sequence
  derived and/or modified CDS sequence (opt1) from LASV(LASV993-NIG-2009;Clade II)__AIT17779__NP
augagcgccuccaaggaggugaaguccuuccuguggacccagagccuccgccgggagcugagcggcuacugcuccaacaucaagcugcaggucgugaaggacgcccaggcgcuccugcacgggcuggacuucagcgagguguccaacguccagcgccucaugcggaagcagaagcgcgacgacggcgaccugaagcggcugcgcgaccucaaccaggccgugaacaaccugguggagcucaagagcacccagcagaaguccauccugcgggucgggacccugaccagcgacgaccugcucacccuggccgccgaccuggagaagcucaaguccaaggugauccgcaccgagcggccccugagcuccggcguguacauggggaaccugagcacgcagcagcucgagcagcgccgggcccugcugaacaugaucggcauggucggcggggcgcagggcacccagccggggcgcgacggcguggugcgggucugggacgugaagaaccccgaccuccugaacaaccaguucgggaccaugcccucccugacccucgccugccugacgaagcagggccagguggaccugaacgacgccguccucgcccugaccgaccugggccucaucuacaccgcgaaguaccccaacagcuccgaccuggaccgccugagccagucccacccgauccucaacaugguggacaccaagaaguccagccugaacaucagcggguacaacuucagccugggcgccgccgugaaggccggggccugcaugcucgacggcggcaacaugcuggagacgaucaaggucacgccccagaccauggacgggauccugaaguccauccucaaggugaagaagucccugggcauguucgugagcgacacccccggggagcggaaccccuacgagaacauccuguacaagaucugccucagcggcgacggguggccguacaucgcgucccgcaccagcaucgucggccgggccugggagaacaccaccguggaccuggaguccgacggcaagccccagaagguggggaccgccggcagcaacaagucccugcagagcgccggguuccccacgggccucaccuacucccagcugaugacccugaaggacagcaugaugcagcuggaccccuccgccaagaccuggaucgacaucgaggggcgcccggaggaccccgucgagaucgcgcucuaccagcccaugagcggcugcuacauccacuucuuccgggagcccacggaccugaagcaguucaagcaggacgccaaguacucccacggcaucgacgugaccgaccuguucagcgcccagccggggcucaccuccgccgucaucgaggcccugccccgcaacauggugcugaccugccagggcagcgacgacaucaagcggcuccuggacagccaggggcgccgcgacaucaagcugaucgacaucgcgcucuccaagacggacagccggcgcuucgagaacgccgugugggaccagugcaaggaccugugccacaugcacaccggcgucgugguggagaagaagaagcgcgggggcaaggaggagaucacgccccacugcgcccugauggacugcaucauguacgacgccgccgucuccggcgggcucaacauccccgugcugcgggcggugcugccgcgggacauggucuuccgcaccagcucccccaagguggugcucuga

SEQ ID NO: 8192 - RNA, 1710 nt, Artificial Sequence
  derived and/or modified CDS sequence (opt1) from LASV(Nig08-04;Clade II)__ADU56611__NP
augagcgccuccaaggaggugaaguccuuccuguggacccagagccuccgccgggagcugagcggcuacugcuccaacaucaagcugcaggucgugaaggacgcccaggcgcuccugcacgggcuggacuucagcgagguguccaacguccagcgccucaugcggaagcagaagcgcgacgacggcgaccugaagcggcugcgcgaccucaaccaggccgugaacaaccugguggagcucaagagcacccagcagaaguccguccugcggguggggacccugaccagcgacgaccugcucacccuggccgccgaccuggagaagcucaaguccaaggugauccgcaccgagcggccccugagcuccggcgucuacauggggaaccugagcacgcagcagcucgagcagcgcaaggcccugcuguccaugaucggcauggugggcggggcgcagggcacccagccggggcgggacggcgugguccgcgugugggacgugaagaaccccgaccuccugaacaaccaguucgggaccaugcccagccugacccucgccugccugacgaagcagggccaggucgaccugaacgacgccgugcucgcccugaccgaccugggccucaucuacaccgcgaaguaccccaacuccagcgaccuggaccggcugucccagagccacccgauccucaacaugguggacaccaagaaguccagccugaacaucagcggguacaacuucucccugggcgccgccgucaaggccggggccugcaugcucgacggcggcaacaugcuggagacgaucaaggugacgccccagaccauggacgggauccucaagagcauccugaaggugaagcgcucccugggcauguucgucagcgacacccccggggagcggaaccccuacgagaacauccuguacaagaucugccucuccggcgacggguggccguacaucgcgagccgcaccuccaucgugggccgggccugggagaacaccaccguggaccuggagagcgacggcaagccccagaaggucgggaccgccggcuccaacaagagccugcaguccgccggguuccccacgggccucaccuacagccagcugaugacccugaaggacuccaugaugcagcuggaccccagcgccaagaccuggaucgacaucgaggggcgcccggaggaccccguggagaucgcgcucuaccagcccauguccggcugcuacauccacuucuuccgggagcccacggaccugaagcaguucaagcaggacgccaaguacagccacggcaucgacgucaccgaccuguucuccgcccagccggggcucaccagcgccgugaucgaggcccugccccgcaacauggugcugaccugccagggcagcgacgacaucaagaagcuccuggacucccaggggcggcgcgacaucaagcugaucgacaucagccucaacaaggcggacucccgccgguucgagaacgccgucugggaccagugcaaggaccugugccacaugcacacgggcgugguggucgagaagaagaagcgcgggggcaaggaggagaucacgccccacugcgcccugauggacugcaucauguucgacgccgccgugagcggcgggcucaacauccccauccugcgggcggugcugccgcgcgacauggucuuccggaccuccagccccaagguggugcucuga

SEQ ID NO: 8193 - RNA, 1710 nt, Artificial Sequence
  derived and/or modified CDS sequence (opt1) from LASV(Nig08-A47;Clade II)__ADU56631__NP
augagcgccuccaaggaggugaaguccuuccuguggacccagagccuccgccgggagcugagcggcuacugcuccaacaucaagcugcaggucgugaaggacgcccaggcgcuccugcacgggcuggacuucagcgagguguccaacguccagcgccucaugcggaagcagaagcgcgacgacagcgaccugaagcggcugcgcgaccucaaccaggccgugaacaaccugguggagcugaaguccacccagcagaaguccauccuccgggucggcacccugaccagcgacgaccugcucacccuggccgccgaccuggagaagcucaagagcaaggugauccgcaccgagcggccccuguccagcgggguguacaugggcaaccuguccacgcagcagcucgagcagcgccgggcccugcugaacaugaucgggauggucggcggcgcgcaggggacccagccgggccgcgacgggguggugcgggucugggacgugaagaaccccgaccuccugaacaaccaguucggcaccaugcccagccugacccucgccugccugacgaagcagggccagguggaccugaacgacgccguccucgcccugaccgaccuggggcucaucuacaccgcgaaguaccccaacuccagcgaccuggaccgccugucccagagccacccgauccucaacaugguggacaccaagaaguccagccugaacaucagcggcuacaacuucucccugggggccgccgugaaggccggcgccugcaugcucgacgggggcaacaugcuggagacgaucaaggucacgccccagaccauggacggcauccucaagagcauccugaaggugaagaagucccuggggauguucgugagcgacacccccggcgagcggaaccccuacgagaacauccuguacaagaucugccucuccggggacggcuggccguacaucgcgagccgcaccuccaucgucgggcgggccugggagaacaccaccguggaccuggagagcgacggcaagccccagaaggugggcaccgccggguccaacaagagccugcaguccgccggcuuccccacggggcucaccuacagccagcugaugacccugaaggacuccaugaugcagcuggaccccagcgccaagaccuggaucgacaucgagggccgcccggaggaccccgucgagaucgcgcucuaccagcccauguccgggugcuacauccacuucuuccgggagcccacggaccugaagcaguucaagcaggacgccaaguacagccacggcaucgacgugaccgaccuguucccggcccagcccggccucaccuccgccgucaucgaggcccugccccgcaacauggugcugaccugccaggggagcgacgacaucaagcggcuccuggacagccagggccgccgcgacaucaagcugaucgacaucgcgcucuccaaggccgacagccggcgcuucgagaacgccgugugggaccagugcaaggaccugugccacaugcacacgggggucgugguggagaagaagaagcggggcgggaaggaggagaucacgccccacugcgcccugauggacugcaucauguacgacgccgcggucuccggcggccucaacaucccggugcugcgcgccgugcugccccgggacauggucuuccgcaccagcucccccaagguggugcucuga

SEQ ID NO: 8194 - RNA, 1713 nt, Artificial Sequence
  derived and/or modified CDS sequence (opt1) from LASV(GA391;Clade III)__AAA46284__NP
augagcgccuccaaggaggugcgcagcugccuguggacccagucccuccggcgcgagcugagcggcuacugcuccaacaucaagcugcaggucgugaaggacgcccaggcgcuccugcacgggcuggacuucagcgagguguccaacguccagcggcucaugcgcaagcagaagcgggacgacggcgaccugaagcgccugcgggaccucaaccaggccgugaacaaccugguggagcugaaguccacccagcagaaguccguccuccgcguggggacgcugagcuccgacgaccugcucauccuggccgccgaccuggagaagcucaagagcaaggugacccggaccgagcgcccccuguccagcggcgucuacauggggaaccuguccagccagcagcucgaccagcggcgcgcccugcugaacaugaucggcaugaccggcguguccgggggcgggaagggcgcgagcaacgggaucgugcgggucugggacgugaagaacgccgagcuccugaacaaccaguucggcacgaugccgucccugacccucgccugccugaccaagcagggccagguggaccugaacgacgccguccaggcgcucaccgaccuggggcugaucuacacggccaaguaccccaacagcagcgaccucgaccgccugucccagagccaccccauccugaacaugaucgacaccaagaaguccagccucaacaucuccggcuacaacuucagccugggggccgccgugaaggccggcgcgugcaugcuggacggcgggaacaugcucgagaccaucaaggugagcccccagaccauggacggcauccucaagagcauccugaaggucaagaagucccuggggauguucgugagcgacacgccgggcgagcggaaccccuacgagaacauccuguacaagaucugccuguccggggacggcuggagcuacaucgccucccgcaccagcaucgugggccgggccugggagaacaccgucguggaccucgagcaggacaacaagccccagaagaucgggaacggcggguccaacaagagccugcaguccgccggcuucgccgcggggcugaucuacagccagcucaugacccugaaggacuucaagugcuucaaccugauccccaacgccaagacguggauggacaucgagggccgcccggaggaccccguggagaucgcccuguaccagcccuccagcggcugcuacguccacuucuuccgggagcccaccgaccucaagcaguucaagcaggacgccaaguacagccacgggcgcgacgugaccgaccuguucgccgcgcagccgggccugaccuccgccgucaucgaggcccucccccggaacauggugaucacgugccaggggagcgaggacauccgcaagcugcuggagucccagggccgccgggacaucaagcucaucgacaucacccugagcaaggccgacucccgcaaguucgagaacgccgugugggaccaguucaaggaccugugccacaugcacaccggggucgugguggagaagaagaagcggggcggcaaggaggagaucacgccccacugcgcgcucauggacugcaucauguucgacgccgccgucagcgggggccuggacgccaaggugcugcgcgugguccucccccgggacaugguguuccgcaccuccaccccgaaggugguccuguga

SEQ ID NO: 8195 - RNA, 1710 nt, Artificial Sequence
  derived and/or modified CDS sequence (opt1) from LASV(ISTH2121-NIG-2012;Clade III)__AIT17541__NP
augagcgccuccaaggaggugaaguccuuccuguggacccagucccuccgccgggagcugagcggcuacugcuccaacaucaagcugcaggucgugaaggacgcccaggcgcuccugcacgggcuggacuucagcgagguguccaacguccagcgccucaugcggaagcagaagcgcgacgacggcgaccugaagcggcugcgcgaccucaaccaggccgugaacaaccugguggagcucaagagcacccagcagaaguccguccugcggguggggacccugagcuccgacgaccugcucacccuggccgccgaccuggagaagcucaagagcaaggugauccgcaccgagcggccccuguccagcggcgucuacauggggaaccuguccagccagcagcucgaccagcgccgggcccugcugaacaugaucggcaugaccuccgaccgccagggcgcgagcacggggcgggacggcaucgugcgcgugugggacgucaagaacgccgagcuccugaacaaccaguucgggaccgugccgucccugacccucgccugccugaccaagcagggccagguggaccugaacgacgccguccaggcgcucacggaccuggggcugaucuacaccgccaaguaccccaacagcagcgaccucgaccggcugucccagagccaccccauccugaacaugaucgacaccaagaaguccagccucaacaucuccggcuacaacuucagccugggcgccgccgugaaggccggggcgugcaugcuggacggcgggaacaugcucgagaccaucaaggugagcccccagacgauggacggcauccucaagagcauccugaaggucaagcgcucccugggcauguucgugagcgacaucccgggggagcggaaccccuacgagaacauccuguacaagaucugccuguccggcgacggguggcccuacaucgccagccgcaccuccaucaccggccgggccugggagaacaccaucguggaccucgagagcgacuccaagccccagaagccggggaacagcggcuccaaccgcagccugcaguccgccggcuuccccgccgggcugacguacagccagcucaugacccugaaggacagcaugcugcagcuggaccccaacgcgaagaccuggauggacaucgagggccggcccgacgacccggucgagaucgcccucuaccagcccuccagcgggugcuacauccacuucuuccgcgagcccaccgaccugaagcaguucaagcaggacgccaaguacucccacggcaucgacgugggggaccuguucgccgcccagcccggccucacgagcgcggugaucgaggcccugccgcgcaacauggucaucacgugccagggcuccgaggacaucaagaagcugcucgagagccaggggcggaaggacaucaagcugguggacaucuccaugagcaagcccgacucccgcaaguucgagaacgccgucugggaccaguacaaggaccugugccacaugcacaccggcaucgugguggagaagaagaagcgcgggggcaaggaggagaucacgccccacugcgcccucauggacugcaucauguucgacgccgcggucgucgggggccuggacgcccggauccugcgggccgugcucccccgcgacaugguguuccggaccagcaccccgaagguggugcuguga

SEQ ID NO: 8196 - RNA, 1710 nt, Artificial Sequence
  derived and/or modified CDS sequence (opt1) from LASV(Nig08-A18;Clade III)__ADU56615__NP
augagcgccuccaaggaggugaaguccuuccuguggacccagagccuccgccgggagcugagcggcuacugcuccaacaucaagcugcaggucgugaaggacgcccaggcgcuccugcacgggcuggacuucagcgagguguccaacguccagcgccucaugcggaagcagaagcgcgacgacagcgaccugaagcggcugcgcgaccucaaccaggccgugaacaaccugguggagcugaaguccacccagcagaaguccguccuccggaucggcacccugagcagcgacgaccugcucauccuggccgccgaccuggagaagcucaaguccaagguggugcgcaccgagcggccccugagcuccgggaucuacaugggcaaccugagcucccagcagcucgaccagcgcaaggcccugcugaacaugaucgggaugaccggcggcaacgggggccggaacgcgaccagcgacgggaucguccgcgugugggacgugaagaacgccgagcuccugaacaaccaguucggcacgaugccgucccugacccucgccugccugaccaagcaggggcaggucgaccugaacgacgccgugcaggcgcucaccgaccugggccugaucuacacggccaaguaccccaacagcagcgaccucgaccggcuggcccagucccaccccauccugaacaugaucgacaccaagaaguccagccucaacaucagcggcuacaacuucucccugggggccgccgugaaggcgggcgccugcaugcuggacgggggcaacaugcucgagaccaucaaggucagcccccagaccauggacggcauccugaaguccauccugaaggugaagcgcagccucgggauguucaucuccgacacgccgggcgagcggaaccccuacgagaacauccuguacaagaucugccugagcggggacggcuggcccuacaucgccucccgcaccagcaucguggggcgggccugggagaacaccgucguggaccucgagaccgacaacaagccccagaagacgggcaacggcggguccaacaagagccugcaguccgccggcuucgcggccgggcugaccuacagccagcucaugacccugaaggacuccaugcugcagcuggacccgaacgccaagaccuggauggacaucgagggccgccccgaggaccccguggagaucgcccucuaccagcccgucagcgggugcuacauccacuucuuccgggagccgacggaccugaagcaguucaagcaggacgccaaguacucccacggcaucgacgugaccgaccuguucgcggcccagcccggccucaccagcgccgugaucgaggcccugccccgcaacauggucaucacgugccaggggagcgaggacauccggaagcugcucgagucccagggccgccgcgacaucaagcugaucgacaucagccuguccaagguggacagccggaaguucgagaacgccgucugggaccaguucaaggaccucugccacaugcacaccgggaucgugguggagaagaagaagcgcggcgggaaggaggagaucacgccccacugcgcgcugauggacugcaucauguucgacgccgccgucuccggcggcguggacgccaaggugcugcgggcgguccucccgcgcgacaugguguuccggaccagcacccccaaggugguccuguga

SEQ ID NO: 8197 - RNA, 1710 nt, Artificial Sequence
  derived and/or modified CDS sequence (opt1) from LASV(Nig08-A19;Clade III)__ADU56619__NP
augagcgccuccaaggaggugaaguccuuccuguggacccagucccuccgccgggagcugagcggcuacugcuccaacaucaagcugcaggucgugaaggacgcccaggcgcuccugcacgggcuggacuucagcgagguguccaacguccagcgccucaugcggaagcagaagcgcgacgacggcgaccugaagcggcugcgcgaccucaaccaggccgugaacaaccugguggagcucaagagcacccagcagaaguccguccugcggguggggacccugagcuccgacgaccugcucgugcuggccgccgaccuggagaagcucaagagcaaggucgugcgcaccgagcggccccuguccagcggcaucuacauggggaaccuguccagccagcagcucgaccagcgcaaggcccugcugaacaugaucggcaugaccggcgggaacggcgggcggaacaccacguccgacggcaucgugcgcgucugggacgugaagaacgcggagcuccugaacaaccaguucgggaccaugccgagccugacccucgccugccugaccaagcagggccagguggaccugaacgacgccguccaggcccucacggaccugggccugaucuacaccgcgaaguaccccaacuccagcgaccucgaccggcuggcccagagccaccccauccugaacaugaucgacaccaagaaguccagccucaacaucuccggguacaacuucagccugggcgccgccgugaaggccggggcgugcaugcuggacggcggcaacaugcucgagaccaucaaggugagcccccagacgauggacgggauccucaagagcauccugaaggucaagcgcucccugggcauguucaucagcgacaccccgggggagcggaaccccuacgagaacauccuguacaagaucugccuguccggcgacggguggcccuacaucgccagccgcaccuccaucgugggccgggccugggagaacaccguggucgaccucgagagcgacaacaagccccagaagacgggcaacgggggcuccaacaagagccugcaguccgccggguucgccgcgggccugaccuacagccagcucaugacccugaaggacuccaugcugcagcuggacccgaacgccaagaccuggauggacaucgaggggcgccccgaggaccccguggagaucgcccucuaccagcccagcuccggcugcuacauccacuucuuccgggagccgacggaccugaagcaguucaagcaggacgccaaguacagccacggcaucgacgugaccgaccuguucgccgcgcagcccgggcucaccagcgccgucaucgaggcccugccccgcaacauggugaucacgugccagggcuccgaggacauccggaagcugcucgagagccaggggcgccgcgacaucaagcugaucgacaucucccugagcaaggucgacucccggaaguucgagaacgccgugugggaccaguucaaggaccucugccacaugcacaccggcaucguggucgagaagaagaagcgcgggggcaaggaggagaucacgccccacugcgcccugauggacugcaucauguucgacgcggccgugagcggcgggguggacgccaagguccugcgggccgugcucccgcgcgacaugguguuccggaccuccacccccaaggucgugcuguga

SEQ ID NO: 8198 - RNA, 1710 nt, Artificial Sequence
  derived and/or modified CDS sequence (opt1) from LASV(ONM-299;Clade III)__ANH09735__NP
augagcgccuccaaggaggugaaguccuuccuguggacccagagccuccgccgggagcugagcggcuacugcuccaacaucaagcugcaggucgugaaggacgcccaggcgcuccugcacgggcuggacuucagcgagguguccaacauccagcgccucaugcggaaggagcgccgggacgacagcgaccugaagcgccugcgggaccucaaccaggccgucaacaaccugguggagcugaaguccacccagcagaaguccgugcuccgcgucggcacccugagcagcgacgaccugcucacccuggccgccgaccuggagaagcucaaguccaaggugauccggaccgagcgcccccugagcuccgggguguacaugggcaaccugagcacccagcagcucgaccagcggcgcgcccugcugaacaugaucgggaugacgaacggcggccagggggcgaacgccggccgggacgggaucguccgcgugugggacgugaagaacgccgagcuccugaacaaccaguucggcaccaugcccucccugacccucgccugccugaccaagcaggggcaggucgaccugaacgacgcggugcaggcccucacggaccugggccugaucuacaccgccaaguaccccaacagcuccgaccucgaccggcugagccagaaccaccccauccugaacaugaucgacaccaagaaguccagccucaacaucagcggcuacaacuucucccugggggccgccgugaaggcgggcgccugcaugcuggacgggggcaacaugcucgagaccaucaaggucagcccccagacgauggacggcauccugaaguccauccugaaggugaagcgcagccucgggauguucguguccgacaccccgggcgagcggaaccccuacgagaacauccuguacaagaucugccugagcggggacggcuggcccuacgucgccucccgcaccagcaucaucgggcgggccugggagaacaccgugguggaccucgaguccgacagcaagccccagcgcccgggcuccaaggagagcaaccggucccugcagacggccggcuuccccgcggggcugaccuacagccagcucaugacccugaaggacuccaugcugcagcuggaccccaacgccaagaccuggauggacaucgagggccgccccgacgacccggucgagaucgcccucuaccagcccagcuccgggugcuacauccacuucuuccgcgagcccacggaccugaagcaguucaagcaggacgccaaguacagccacggcaucgacaucggggaccuguucgccgcgcagcccggccucaccagcgccgugaucgaggcccugccgcggaacauggugaucacgugccagggcuccgaggacaucaagcgccugcucgagagccaggggcggaaggacauccgccuggucgacaucucccugagcaaggccgacucccggaaguucgagaacgccgugugggaccaguucaaggaccucugcaacaugcacaccggcgucgugguggagaagaagaagaagggcgggaaggaggagaucaccccgcacugcgcgcugauggacugcaucauguucgacgccgccgucaugggcgggcuggacgccaaggugcuccgcgcggugcugcccaaggacauggucuuccggaccagcacgccccgcguggugcuguga

SEQ ID NO: 8199 - RNA, 1710 nt, Artificial Sequence
  derived and/or modified CDS sequence (opt1) from LASV(ONM-314;Clade III)__ANH09737__NP
augagcgccuccaaggaggugaaguccuuccuguggacccagagccuccgccgggagcugagcggcuacugcuccaacaucaagcugcaggucgugaaggacgcccaggcgcuccugcacgggcuggacuucagcgagguguccaacauccagcgccucaugcggaaggagcgccgggacgacagcgaccugaagcgccugcgggaccucaaccaggccgucaacaaccugguggagcugaaguccacccagcagaaguccgugcuccgcgucggcacccugagcagcgacgaccugcucacccuggccgccgaccuggagaagcucaaguccaaggugauccggaccgagcgcccccugagcuccgggguguacaugggcaaccugagcacccagcagcucgaccagcggcgcgcccugcugaacaugaucgggaugacgaacggcggccagggggcgaacgccggccgggacgggaucguccgcgugugggacgugaagaacgccgagcuccugaacaaccaguucggcaccaugcccucccugacccucgccugccugaccaagcaggggcaggucgaccugaacgacgcggugcaggcccucacggaccugggccugaucuacaccgccaaguaccccaacagcuccgaccucgaccggcugagccagaaccaccccauccugaacaugaucgacaccaagaaguccagccucaacaucagcggcuacaacuucucccugggggccgccgugaaggcgggcgccugcaugcuggacgggggcaacaugcucgagaccaucaaggucagcccccagacgauggacggcauccugaaguccauccugaaggugaagcgcagccucgggauguucguguccgacaccccgggcgagcggaaccccuacgagaacauccuguacaagaucugccugagcggggacggcuggcccuacgucgccucccgcaccagcaucaucgggcgggccugggagaacaccgugguggaccucgaguccgacagcaagccccagcgcccgggcuccaaggagagcaaccggucccugcagacggccggcuuccccgcggggcugaccuacagccagcucaugacccugaaggacuccaugcugcagcuggaccccaacgccaagaccuggauggacaucgagggccgccccgacgacccggucgagaucgcccucuaccagcccagcuccgggugcuacauccacuucuuccgcgagcccacggaccugaagcaguucaagcaggacgccaaguacagccacggcaucgacaugggggaccuguucgccgcgcagcccggccucaccagcgccgugaucgaggcccugccgcggaacauggugaucacgugccagggcuccgaggacaucaagcgccugcucgagagccaggggcggcgcgacauccggcuggucgacaucucccugagcaaggccgacucccgcaaguucgagaacgccgugugggaccaguucaaggaccucugcaacaugcacaccggcgucgugguggagaagaagaagaagggcgggaaggaggagaucaccccgcacugcgcgcugauggacugcaucauguucgacgccgccgucaugggcgggcuggacgccaaggugcuccgggcggugcugcccaaggacauggucuuccgcaccagcacgccccggguggugcuguga

SEQ ID NO: 8200 - RNA, 1710 nt, Artificial Sequence
  derived and/or modified CDS sequence (opt1) from LASV(ONM-700;Clade III)__ANH09739__NP
augagcgccuccaaggaggugaaguccuuccuguggacccagucccuccgccgggagcugagcggcuacugcuccaacaucaagcugcaggucgugaaggacgcccaggcgcuccugcacgggcuggacuucagcgagguguccaacauccagcgccucaugcggaaggagcgccgggacgacagcgaccugaagcgccugcgggaccucaaccaggccgucaacaaccugguggagcugaaguccacccagcagaaguccgugcuccgcgucggcacccugagcagcgacgaccugcucacccuggccgccgaccuggagaagcucaaguccaaggugauccggaccgagcgcccccugagcuccgggguguacaugggcaaccugagcacccagcagcucgaccagcggcgcgcccugcugaacaugaucgggaugacguccggcggccagggggcgaacgccggccgggacgggaucguccgcgugugggacgugaagaacgccgagcuccugaacaaccaguucggcaccaugcccagccugacccucgccugccugaccaagcaggggcaggucgaccugaacgacgcggugcaggcccucacggaccugggccugaucuacaccgccaaguaccccaacuccagcgaccucgaccggcugagccagaaccaccccauccugaacaugaucgacaccaagaaguccagccucaacaucuccggcuacaacuucagccugggggccgccgugaaggcgggcgccugcaugcuggacgggggcaacaugcucgagaccaucaaggucagcccccagacgauggacggcauccucaagagcauccugaaggugaagcgcucccuggggauguucgugagcgacaccccgggcgagcggaaccccuacgagaacauccuguacaagaucugccuguccggggacggcuggcccuacgucgccagccgcaccuccaucaucgggcgggccugggagaacaccgugguggaccucgagagcgacuccaagccccagcgcccgggcagcaaggaguccaaccggagccugcagacggccggcuuccccgcggggcugaccuacucccagcucaugacccugaaggacagcaugcugcagcuggaccccaacgccaagaccuggauggacaucgagggccgccccgacgacccggucgagaucgcccucuaccagcccuccagcgggugcuacauccacuucuuccgcgagcccacggaccugaagcaguucaagcaggacgccaaguacagccacggcaucgacaucggggaccuguucgccgcgcagcccggccucaccuccgccgugaucgaggcccugccgcggaacauggugaucacgugccagggcagcgaggacaucaagcgccugcucgagucccaggggcggcgcgacauccggcuggucgacaucagccuguccaaggccgacagccgcaaguucgagaacgccgugugggaccaguucaaggaccucugcaacaugcacaccggcgucgugguggagaagaagaagaagggcgggaaggaggagaucaccccgcacugcgcgcugauggacugcaucauguucgacgccgccgucaugggcgggcuggacgccaaggugcuccgggcggugcugcccaaggacauggucuuccgcaccuccacgccccggguggugcuguga

SEQ ID NO: 8201 - RNA, 1710 nt, Artificial Sequence
  derived and/or modified CDS sequence (opt1) from LASV(Weller;Clade III)__AAT49009__NP
augagcgccuccaaggaggugaaguccuuccuguggacccagucccuccgccgggagcugagcggcuacugcuccaacaucaagcugcaggucgugaaggacgcccaggcgcuccugcacgggcuggacuucagcgagguguccaacguccagcgccucaugcggaagcagcgccgggacgacggcgaccugaagcgccugcgggaccucaaccaggccgugaacaaccugguggagcucaagagcacccagcagaaguccguccugcgcguggggacccugaacagcgacgaccugcucgugcuggccgccgaccuggagaagcucaaguccaaggucauccggaccgagcgcccccugagcuccggcaucuacauggggaaccugagcucccagcagcucgaccagcggcgcgcccugcugaacaugaucggcaugaccggcgggaaccggggcgggggcaccagcuccgacgggaucgugcgcgugugggacgucaagaacgcggagcuccugaacaaccaguucggcacgaugccgagccugacccucgccugccugaccaagcagggccagguggaccugaacgacgccgugcaggcccucaccgaccuggggcugaucuacacggcgaaguaccccaacuccagcgaccucgaccggcuggcccagagccaccccauccugaacaugaucgacaccaagaaguccagccucaacaucuccggcuacaacuucagccugggggccgccgucaaggccggcgcgugcaugcuggacggcgggaacaugcucgagaccaucaaggugagcccccagaccaucgacggcauccugaagacgauccugaaggugaagaagucccucgggauguucaucagcgacgucccgggcgagcgcaaccccuacgagaacauccuguacaagaucugccugagcggggacggcuggcccuacaucgccucccggaccagcaucgugggccgcgccugggagaacaccguggucgaccucgaguccgacaacaagccccagaagaccgggaacggcgggagcaacaagucccugcagagcgccggcuucgccgcggggcugacguacucccagcucaugacccugaaggacagcaugcugcagcuggacccgaacuccaagaccuggauggacaucgagggccggcccgaggaccccguggagaucgcccucuaccagcccaacagcggcugcuacauccacuucuuccgcgagccgaccgaccugaagcaguucaagcaggacgccaaguacucccacgggaucgacgugacggaccuguucgccgcccagcccggccucaccagcgcggucaucgaggcccugccccggaacauggugaucacgugccaggggagcgaggacauccgcaagcugcucgagucccagggccgccgggacaucaagcugaucgacaucagccugaacaaggccgacucccgcaaguucgagaacgccgucugggaccaguucaaggaccucugccacaugcacaccggggugguggucgagaagaagaagcggggcggcaaggaggagaucacgccccacugcgcccugauggacugcaucauguucgacgcggccgugagcgggggccuggacgccaaggugcuccgcgccguccugccgcgggacaugguguuccgcaccuccacccccaaggugguccuguga

SEQ ID NO: 8202 - RNA, 1710 nt, Artificial Sequence
  derived and/or modified CDS sequence (opt1) from LASV(BA366;Clade IV)__ADI39452__NP
augagcguguccaaggaggucaagagcuuccuguggacccagucccuccgccgggagcugagcggcuacugcuccaacaucaagcuccagguggugaaggacgcccaggcccugcugcacgggcuggacuucagcgaggucuccaacgugcagcgccucaugcggaagcagcgccgggacgacaacgaccugaagcgccugcgggaccucaaccaggcggugaacaaccuggucgagcucaagagcacccagcagaaguccgugcugcgcgugggcacccugaccagcgacgaccugcucauccuggccgccgaccuggagaagcucaagaccaaggucacccggacggagcgcccccuguccgccgggguguacaugggcaaccugagcucccagcagcucgagcagcggcgcgcccugcugaacaugaucgggaugaacggcggcaaccagggggugcaggcgggccgggacggggucgugcgcgugugggacgucaagaacgccgagcuccugaacaaccaguucggcaccaugccgagccugacccucgccugccugaccaagcagggccagguggaccugaacgacgccgugcaggcgcucacggaccuggggcugaucuacaccgccaaguaccccaacaccuccgaccucgaccggcuggcccagagccaccccauccugaacaugaucgacaccaagaaguccagccucaacaucuccggcuacaacuucagccugggggccgccgucaaggcgggcgccugcaugcuggacgggggcaacaugcucgagacgaucaaggugagcccccagaccauggacggcauccugaaguccauccugaaggugaagcgcacccucgggauguucgucagcgacaccccgggcgagcggaaccccuacgagaacauccuguacaagaucugccuguccggggacggcuggcccuacaucgccagccgcacguccaucaccgggcgggccugggagaacaccaucguggaccucgagagcgacggcaagccccagaaggugggcaacaacggguccaacaagagccugcaguccgccggcuucaccgcggggcugacguacagccagcucaugacccugaaggacgccaugcugcagcuggacccgaacgccaagaccuggauggacaucgagggccgccccgaggaccccgucgagguggcccucuaccagcccuccagcgggugcuacauccacuucuuccgggagccgaccgaccugaagcaguucaagcaggacgccaaguacucccacggcaucgacgucacggaccuguucgcggcccagcccggccucaccagcgccgugaucgaggcccugccccgcaacauggugaucacgugccagggguccgaggacguccgcaagcugcucgagagccagggccggaaggacaucaagcugaucgacaucgcccuguccaaggcggacagccgcaaguacgagaacgccgugugggaccaguacaaggaccucugccacaugcacaccgggguggucguggagaagaagaagcggggcgggaaggaggagaugacgccccacugcgcccugauggacugcaucauguucgacgccgcgguguccggcggccugagcacccagguccuccgcgccgugcugccgcgggacaugguguuccgcaccagcacccccaaggucgugcuguga

SEQ ID NO: 8203 - RNA, 1710 nt, Artificial Sequence
  derived and/or modified CDS sequence (opt1) from LASV(G1180-SLE-2010;Clade IV)__AIT17169__NP
augagcgccuccaaggagaucaagagcuuccuguggacccagucccuccgccgggagcugagcggcuacugcuccaacaucaagcuccagguggucaaggacgcccaggcgcugcugcacgggcuggacuucagcgagguguccaacgugcagcgccucaugcggaaggagcgccgggacgacaacgaccugaagcgccugcgggaccucaaccaggccgucaacaaccugguggagcucaagagcacccagcagaaguccauccugcgcgugggcacccugaccagcgacgaccugcucauccuggccgccgaccuggagaagcucaaguccaaggucauccggaccgagcgcccccugagcgccgggguguacaugggcaaccuguccagccagcagcucgaccagcggcgcgcgcugcuguccaugaucgggaugagcuccggcaaccagcgggcccaggccggccgcgacggggugguccgggugugggacgugaagaacgucgagcuccugaacaaccaguucggcaccaugccgagccugacgcucgccugccugaccaagcagggccagguggaccugaacgacgcggugcaggcccucaccgaccuggggcugaucuacaccgccaaguaccccaacacguccgaccucgaccgccugacccagagccaccccauccugaacaugaucgacaccaagaaguccagccucaacaucagcggguacaacuucucccugggcgccgccgucaaggcgggcgccugcaugcuggacgggggcaacaugcucgagaccaucaaggugagcccccagacgauggacgggauccugaaguccauccugaaggugaagaaggcccucggcauguucaucagcgacaccccgggcgagcggaaccccuacgagaacauccuguacaagaucugccuguccggggacggcuggcccuacaucgccagccgcaccuccaucaccgggcgggccugggagaacacggucguggaccucgagagcgacggcaagccccagaaggcgggguccaacaacagcaacaagucccugcagagcgugggcuucaccgccggccugaccuacucccagcucaugacccugaaggacgccaugcugcagcuggacccgaacgccaagacguggauggacaucgaggggcgccccgaggaccccgucgagaucgcccucuaccagcccagcuccggcugcuacauccacuucuuccgggagccgaccgaccugaagcaguucaagcaggacgcgaaguacagccacgggaucgacgugaccgaccuguucgccgcccagcccggccucaccuccgccgugaucgacgcccugccccgcaacauggucaucacgugccaggggagcgacgacauccgcaagcugcucgagagccagggccggaaggacaucaagcugaucgacaucgcgcuguccaagaccgacagccgcaaguacgagaacgccgugugggaccaguacaaggaccucugccacaugcacaccggcgucgugguggagaagaagaagcgcgggggcaaggaggagaucacgccccacugcgcccugauggacugcaucauguucgacgccgcggucuccgggggccugaacaccagcgugcuccgggccgugcugccgcgggacauggucuuccgcaccuccacgccccggguggugcuguga

SEQ ID NO: 8204 - RNA, 1710 nt, Artificial Sequence
  derived and/or modified CDS sequence (opt1) from LASV(G1190-SLE-2010;Clade IV)__AIT17173__NP
augagcgccuccaaggagaucaagagcuuccuguggacccagucccuccgccgggagcugagcggcuacugcuccaacaucaagcuccagguggucaaggacgcccaggcgcugcugcacgggcuggacuucagcgagguguccaacgugcagcgccucaugcggaaggagcgccgggacgacaacgaccugaagcgccugcgggaccucaaccaggccgucaacaaccugguggagcucaagagcacccagcagaaguccauccugcgcgugggcacccugaccagcgacgaccugcucauccuggccgccgaccuggagaagcucaaguccaaggucacccggaccgagcgcccccugagcgccgggguguacaugggcaaccuguccagccagcagcucgaccagcggcgcgcgcugcugaacaugaucgggauguccggcagcaaccagggcgcccgggccgggcgcgacggcgugguccgggugugggacgugaagaacgccgagcuccugaacaaccaguucgggacgaugccgucccugacccucgcgugccugaccaagcagggccaggucgaccugaacgacgccgugcaggcccucaccgaccuggggcugaucuacacggccaaguaccccaacaccagcgaccucgaccgccugacccagucccaccccauccugaacaugaucgacaccaagaaguccagccucaacaucuccggcuacaacuucagccugggcgccgcggugaaggccggggccugcaugcuggacggcgggaacaugcucgagacgaucaaggucagcccccagaccauggacggcauccucaagagcauccugaaggugaagaaggcccugggcauguucaucuccgacgccccgggggagcggaaccccuacgagaacauccuguacaagaucugccugagcggcgacggguggcccuacaucgcgucccgcaccagcaucaccggccgggccugggagaacacgguggucgaccucgaguccgacgggaagccccagaaggccggcagcaacggcuccaacaagagccugcaguccgccggguucaccgccggccugaccuacagccagcucaugacccugaaggacgcgaugcugcagcuggacccgaacgccaagacguggauggacaucgaggggcgccccgaggaccccguggagaucgcccucuaccagcccuccagcggcugcuacauccacuucuuccgggagccgaccgaccugaagcaguucaagcaggacgccaaguacucccacgggaucgacgugaccgaccuguucgccgcgcagcccggccucaccagcgccgucaucgacgcccugccccgcaacauggugaucacgugccagggcuccgacgacauccgcaagcuguucgagagccaggggcggaaggacaucaagcucaucgacaucgcccugagcaagaccgacucccgcaaguacgagaacgcggugugggaccaguacaaggaccugugccacaugcacaccggcaucgucguggagaagaagaagcgcgggggcaaggaggagaucacgccccacugcgcccucauggacugcaucauguucgacgccgccgucagcgggggccugaacaccuccgugcugcgggccgugcucccgcgggacauggucuuccgcaccagcacgccccggguggugcuguga

SEQ ID NO: 8205 - RNA, 1710 nt, Artificial Sequence
  derived and/or modified CDS sequence (opt1) from LASV(G1200-LIB-2010;Clade IV)__AIT17177__NP
augagcgccuccaaggagaucaagagcuuccuguggacccagucccuccgccgggagcugagcggcuacugcuccaacaucaagcuccagguggucaaggacgcccaggcgcugcugcacgggcuggacuucagcgagguguccaacgugcagcgccucaugcggaagcagcgccgggacgacaacgaccugaagcgccugcgggaccucaaccaggccgucaacaaccugguggagcucaagagcacccagcagaaguccgugcugcgcgucggcacgcugaccagcgacgaccugcucgugcuggccgccgaccuggagaagcucaaguccaaggugauccggaccgagcgcccccugagcgccgggaucuacaugggcaaccuguccagccagcagcucgaccagcggcgcgcgcugcugaacaugaucgggauguccggcggcaaccagggggcccgggccggccgcgacggggucgugcgggugugggacgucaagaacgccgaccuccugaacaaccaguucggcaccaugccgagccugacgcucgcgugccugaccaagcagggccagguggaccugaacgacgugguccaggcccucaccgaccuggggcugaucuacaccgccaaguaccccaacacguccgaccucgaccgccugacccagagccaccccauccugaagaugaucgacgccaacaaguccagccucaacaucagcggcuacaacuucucccugggggccgcggugaaggccggcgccugcaugcuggacgggggcaacaugcucgagaccaucaaggugagcccccagaccauggacggcauccugaaguccauccugaaggucaagaagucccucgggauguucaucagcgacacgccgggcgagcggaaccccuacgagaacauccuguacaagaucugccugagcggggacggcuggcccuacaucgccucccgcaccagcaucaucgggcgggccugggagaacaccgugguggaccucgaguccgacggcaagccccagaagaccggcagcaacaacuccagcaagucccugcagagcgcgggguucgccgccggccugacguacucccagcucaugacccugaaggacgccaugcugcagcuggacccgaacgccaagaccuggauggacaucgaggggcgccccgaggaccccgucgagaucgcgcucuaccagcccagcuccggcugcuacauccacuucuuccgggagccgaccgaccugaagcaguucaagcaggacgccaaguacagccacgggaucgacgugacggaccuguucgccgcccagcccggccucaccuccgccgugaucgaggcgcugccccgcaacauggucaucacgugccagggcagcgacgacauccgcaagcugcucgagagccaggggcggaaggacaucaagcugaucgacaucgcccuguccaagaccgacagccgcaaguacgagaacgccgugugggaccaguacaaggaccucugccacaugcacaccggcaucgucguggagaagaagaagcgcgggggcaaggaggagaucacgccccacugcgcccugauggacugcaucauguucgacgcggccguguccgggggccugaacacccucguccugcgggccgugcugccgcgggacaugguguuccgcaccagcacccccaaggucgugcucuga

SEQ ID NO: 8206 - RNA, 1710 nt, Artificial Sequence
  derived and/or modified CDS sequence (opt1) from LASV(G1442-SLE-2011;Clade IV)__AIT17181__NP
augagcgccuccaaggaggugaaguccuuccuguggacccagagccuccgccgggagcugagcggcuacugcuccaacaucaagcugcaggucgugaaggacgcccaggcgcuccugcacgggcuggacuucagcgagguguccaacguccagcgccucaugcggaagcagcgccgggacgacaacgaccugaagcgccugcgggaccucaaccaggccgugaacaaccugguggagcucaagagcacccagcagaaguccguccugcgcgugggcacccugaccagcgacgaccugcucgugcuggccgccgaccuggagaagcucaaguccaaggucauccggaccgagcgcccccugagcgccgggguguacaugggcaaccuguccagccagcagcucgaccagcggcgcgcgcugcugaacaugaucgggauguccggcggcauccaggggacccggacgggccgcgacggggugguccgggugugggacgugaagaacgccgaccuccugaacaaccaguucggcaccaugccgagccugacccucgccugccugaccaagcaggggcaggucgaccugaacgacguggugcaggcccucacggaccugggccugaucuacaccgcgaaguaccccaacgccuccgaccucgaccgccugacccagagccaccccauccugaacaugaucgacaccaagaaguccagccucaacaucagcggcuacaacuucucccugggggccgccgucaaggccggcgcgugcaugcuggacgggggcaacaugcucgagacgaucaaggugagcccccagaccauggacggcauccugaaguccauccugaaggugaagaagacccucgggauguucaucagcgacaccccgggcgagcggaaccccuacgagaacauccuguacaagaucugccuguccggggacggcuggcccuacaucgccagccgcacguccaucaccgggcgggccugggagaacaccgucguggaccucgagagcgacggcaagccccagaaggccggcuccaacaacagcaacaagucccugcagagcgccggguucgcggccggccugaccuacucccagcucaugacgcugaaggacgccaugcugcagcuggacccgaacgccaagaccuggauggacaucgaggggcgccccgaggaccccguggagaucgcccucuaccagcccagcuccggcugcuacauccacuucuuccgggagccgaccgaccugaagcaguucaagcaggacgcgaaguacagccacgggaucgacgucaccgaccuguucgccgcccagcccggccucacguccgccgugaucgaggcccugccccgcaacauggucaucacgugccagggcagcgacgacaucaagaagcugcucgagucccaggggcgcaaggacaucaagcugaucgacaucgcgcugagcaagaccgacagccggaaguacgagaacgccgugugggaccaguacaaggaccucugccacaugcacaccggcguggucguggagaagaagaagcgcgggggcaaggaggagaucaccccgcacugcgcccugauggacugcaucauguucgacgccgcgguguccgggggccugaacacccucguccugcgggccgugcugccccgcgacaugguguuccggaccagcacgccccgcgucgugcucuga

SEQ ID NO: 8207 - RNA, 1710 nt, Artificial Sequence
  derived and/or modified CDS sequence (opt1) from LASV(G1529-SLE-2011;Clade IV)__AIT17185__NP
augagcgccuccaaggagaucaagagcuuccuguggacccagucccuccgccgggagcugagcggcuacugcuccaacaucaagcuccagguggucaaggacgcccaggcgcugcugcacgggcuggacuucagcgagguguccaacgugcagcgccucaugcggaagcagcgccgggacgacggcgaccugaagcgccugcgggaccucaaccaggccgucaacaaccugguggagcucaagagcacccagcagaaguccgugcugcgcgucgggacccugaccagcgacgaccugcucauccuggccgccgaccuggagaagcucaaguccaaggugacccggaccgagcgcccccugagcgccggcguguacauggggaaccuguccagccagcagcucgaccagcggcgcgcgcugcugaacaugaucggcauguccggcgggaaccggggcgcccgcacggggaaggacggcgucgugcggaucugggacgugaagaacgccgaccuccugaacaaccaguucgggaccaugccgagccugacccucgccugccugaccaagcagggccaggucgaccugaacgacguggugcaggcgcucacggaccugggccugaucuacaccgccaaguaccccaacaccuccgaccucgaccgccugacccagagccaccccauccugaacaugaucgacacgaacaaguccagccucaacaucagcggguacaacuucucccugggcgccgccgucaaggccggggcgugcaugcuggacggcggcaacaugcucgagaccaucaaggugagcccccagaccauggacgggauccugaaguccauccugaaggugaagaagucccucggcauguucaucagcgacaccccgggggagcggaaccccuacgagaacauccuguacaagaucugccugagcggcgacggguggcccuacaucgccucccgcacgagcaucaccggccgggccugggagaacaccgucguggaccucgaguccgacgagaagccccagaaggccggcagcaacaacuccaacaagagccugcaguccaccggguucacggccggccugaccuacagccagcucaugacccugaaggacgcgaugcugcagcuggacccgaacgccaagaccuggauggacaucgaggggcgccccgaggaccccguggagaucgcccucuaccagcccuccagcggcugcuacauccacuucuuccgggagccgacggaccugaagcaguucaagcaggacgccaaguacucccacgggaucgacgucaccgaccuguucgccgcgcagcccggccucaccagcgccgugaucgacacccugccccgcaacauggugaucacgugccagggcuccgacgacauccgcaagcugcucgagagccaggggcggaaggacaucaagcugaucgacaucgcccugagcaagaccgacucccgcaaguacgagaacgccgucugggaccaguacaaggaccucugccacaugcacaccggcguggucguggagaagaagaagcgcgggggcaaggaggagaucacgccccacugcgcccugauggacugcaucauguucgacgcggccgugagcgggggccugaacgccuccguccuccgggccgugcugccgcgggacaugguguuccgcaccagcacgccccgggucgugcuguga

SEQ ID NO: 8208 - RNA, 1710 nt, Artificial Sequence
  derived and/or modified CDS sequence (opt1) from LASV(G1618-SLE-2011;Clade IV)__AIT17189__NP
augagcgccuccaaggagaucaagagcuuccuguggacccagucccuccgccgggagcugagcggcuacugcuccaacaucaagcuccagguggucaaggacgcccaggcgcugcugcacgggcuggacuucagcgagguguccaacgugcagcgccucaugcggaaggagcgccgggacgacaacgaccugaagcgccugcgggaccucaaccaggccgucaacaaccugguggagcucaagagcacccagcagaaguccgugcugcgcgucggcacccugaccagcgacgaccugcucauccuggccgccgaccuggagaagcucaaguccaaggugacccggaccgagcgcccccugagcgccgggguguacaugggcaaccuguccagccagcagcucgaccagcggcgcgcgcugcuguccaugaucgggaugagcggcggcaaccagggggcccggaccggccgcgacggggucgugcgggugugggacgucaagaacgccgagcuccugaacaaccaguucggcaccaugccgucccugacccucgccugccugaccaagcagggccagguggaccugaacgacgugguccaggcgcucacggaccuggggcugaucuacaccgccaaguaccccaacaccagcgaccucgaccgccugacccagucccaccccauccugaacaugaucgacacgaagaaguccagccucaacaucuccggcuacaacuucagccugggggccgccgugaaggccggcgcgugcaugcuggacgggggcaacaugcucgagaccaucaaggugagcccccagaccaucgacggcauccucaagagcauccugaaggucaagaaggcccuggggauguucaucuccgacaccccgggcgagcggaaccccuacgagaacauccuguacaagaucugccugagcggggacggcuggcccuacaucgccucccgcacgagcaucaccgggcgggccugggagaacaccgugguggaccucgaguccgacggcaagccccagaaggccggcagcaacaacuccaacaagagccugcaguccgcgggguucaccgccggccugacguacagccagcucaugacccugaaggacgccaugcugcagcuggacccgaacgccaagaccuggauggacaucgaggggcgccccgaggaccccgucgagaucgcccucuaccagcccuccagcggcugcuacauccacuucuuccgggagccgaccgaccugaagcaguucaagcaggacgcgaaguacucccacgggaucgacgugacggaccuguucgccgcccagcccggccucaccagcgccgugaucgacgcccugccccgcaacauggucaucacgugccagggcuccgacgacauccgcaagcugcucgagagccaggggcggaaggacaucaagcugaucgacaucgcgcugagcaagaccgacucccgcaaguacgagaacgccgugugggaccaguacaaggaccucugccacaugcacaccggcgucgugguggagaagaagaagcgcgggggcaaggaggagaucacgccccacugcgcccugauggacugcaucauguucgacgccgcggucagcgggggccugaacucccucgugcugcgggccgugcugccgcgggacauggucuuccgcaccagcacgccccggguggugcucuga

SEQ ID NO: 8209 - RNA, 1710 nt, Artificial Sequence
  derived and/or modified CDS sequence (opt1) from LASV(G1646-SLE-2011;Clade IV)__AIT17193__NP
augagcgccuccaaggagaucaagagcuuccuguggacccagucccuccgccgggagcugagcggcuacugcuccaacaucaagcuccagguggucaaggacgcccaggcgcugcugcacgggcuggacuucagcgagguguccaacgugcagcgccucaugcggaaggagcgccgggacgacaacgaccugaagcgccugcgggaccucaaccaggccgucaacaaccugguggagcucaagagcacccagcagaaguccgugcugcgcgucggcacccugaccagcgacgaccugcucauccuggccgccgaccuggagaagcucaaguccaaggugacccggaccgagcgcccccugagcgccgggguguacaugggcaaccuguccagccagcagcucgaccagcggcgcgcgcugcuguccaugaucgggaugagcggcggcaaccagggggcccggaccggccgcgacggggucgugcgggugugggacgucaagaacgccgagcuccugaacaaccaguucggcaccaugccgucccugacccucgccugccugaccaagcagggccagguggaccugaacgacgcggugcaggcccucacggaccuggggcugaucuacaccgccaaguaccccaacaccagcgaccucgaccgccugacccagucccaccccauccugaacaugaucgacacgaagaaguccagccucaacaucuccggcuacaacuucagccugggggccgccgucaaggcgggcgccugcaugcuggacgggggcaacaugcucgagaccaucaaggugagcccccagaccauggacggcauccucaagagcauccugaaggugaagaaggcccuggggauguucaucuccgacaccccgggcgagcggaaccccuacgagaacauccuguacaagaucugccugagcggggacggcuggcccuacaucgccucccgcacgagcaucaccgggcgggccugggagaacaccgucguggaccucgaguccgacggcaagccccagaaggcgggcaacaacaacagcaacaagucccugcagagcgccggguucaccgccggccugacguacucccagcucaugacccugaaggacgccaugcugcagcuggacccgaacgccaagaccuggauggacaucgaggggcgccccgaggaccccguggagaucgcgcucuaccagcccagcuccggcugcuacauccacuucuuccgggagccgaccgaccugaagcaguucaagcaggacgccaaguacagccacgggaucgacgucacggaccuguucgccgcccagcccggccucaccuccgccgugaucgacgcgcugccccgcaacauggugaucacgugccagggcagcgacgacauccgcaagcugcucgagucccaggggcggaaggacaucaagcugaucgacaucgcccugagcaagaccgacagccgcaaguacgagaacgccgucugggaccaguacaaggaccucugccacaugcacaccggcguggucguggagaagaagaagcgcgggggcaaggaggagaucacgccccacugcgcccugauggacugcaucauguucgacgcggccguguccgggggccugaacagccucguccugcgggccgugcugccgcgggacaugguguuccgcaccuccacgccccgggucgugcucuga

SEQ ID NO: 8210 - RNA, 1710 nt, Artificial Sequence
  derived and/or modified CDS sequence (opt1) from LASV(G1647-SLE-2011;Clade IV)__AIT17197__NP
augagcgccuccaaggagaucaagagcuuccuguggacccagucccuccgccgggagcugagcggcuacugcuccaacaucaagcuccagguggucaaggacgcccaggcgcugcugcacgggcuggacuucagcgagguguccaacgugcagcgccucaugcggaaggagcgccgggacgacaacgaccugaagcgccugcgggaccucaaccaggccgucaacaaccugguggagcucaagagcacccagcagaaguccauccugcgcgugggcacccugaccagcgacgaccugcucauccuggccgccgaccuggagaagcucaaguccaaggucauccggaccgagcgcccccugagcgccgggguguacaugggcaaccugucccuccagcagcuggaccagcggcgcgcgcugcucaacaugaucgggaugagcggcuccaaccagggcgugcgggccgggcgcgacggcgucgugcgggugugggacgucaagaacgccgagcugcugaacaaccaguucgggaccaugccgagccucacgcuggccugccugaccaagcagggccagguggaccucaacgacgcggugcaggcccugaccgaccuggggcucaucuacaccgccaaguaccccaacacguccgaccuggaccgccugacccagagccaccccauccucaacaugaucgacaccaagaaguccagccugaacaucagcggcuacaacuucucccugggcgccgccgucaaggcgggggccugcaugcucgacggcgggaacaugcuggagaccaucaaggugagcccccagacgauggacggcauccugaaguccauccucaaggugaagaaggcccugggcauguucaucagcgacaccccgggggagcggaaccccuacgagaacauccuguacaagaucugccucuccggcgacggguggcccuacaucgccagccgcaccuccaucaccggccgggccugggagaacacggucguggaccuggagagcgacgggaagccccagaaggcgggcuccaacggcagcaacaagucccugcagagcgccggguucaccgccggccucaccuacucccagcugaugacccugaaggacgccaugcugcagcucgacccgaacgccaagacguggauggacaucgaggggcgccccgaggaccccguggagaucgcgcuguaccagcccagcuccggcugcuacauccacuucuuccgggagccgaccgaccugaagcaguucaagcaggacgccaaguacagccacgggaucgacgucaccgaccucuucgccgcccagcccggccugaccuccgccgugaucgacgcgcugccccgcaacauggugaucacgugccagggcagcgacgacauccgcaagcuccuggagucccaggggcggaaggacaucaagcugaucgacaucgcccucagcaagaccgacagccgcaaguacgagaacgccgucugggaccaguacaaggaccugugccacaugcacaccggcaucguggucgagaagaagaagcgcgggggcaaggaggagaucacgccccacugcgcccugauggacugcaucauguucgacgcggccguguccgggggccucaacaccagcgugcugcgggccguccugccgcgggacaugguguuccgcaccuccacgccccgggugguccucuga

SEQ ID NO: 8211 - RNA, 1710 nt, Artificial Sequence
  derived and/or modified CDS sequence (opt1) from LASV(G1727-SLE-2011;Clade IV)__AIT17201__NP
augagcgccuccaaggagaucaagagcuuccuguggacccagucccuccgccgggagcugagcggcuacugcuccaacaucaagcuccagguggucaaggacgcccaggcgcugcugcacgggcuggacuucagcgagguguccaacgugcagcgccucaugcggaaggagcgccgggacgacaacgaccugaagcgccugcgggaccucaaccaggccgucaacaaccugguggagcucaagagcacccagcagaaguccauccugcgcgugggcacccugaccagcgacgaccugcucauccuggccgccgaccuggagaagcucaaguccaaggucacccggaccgagcgcccccugagcgccgggguguacaugggcaaccuguccagccagcagcucgaccagcggcgcgcgcugcugaacaugaucgggauguccggcagcaaccagggcgcccgggccgggcgcgacggcgugguccgggugugggacgugaagaacgccgagcuccugaacaaccaguucgggacgaugccgucccugacccucgcgugccugaccaagcagggccaggucgaccugaacgacgccgugcaggcccucaccgaccuggggcugaucuacacggccaaguaccccaacaccagcgaccucgaccgccugacccagucccaccccauccugaacaugaucgacaccaagaaguccagccucaacaucuccggcuacaacuucagccugggcgccgcggugaaggccggggccugcaugcuggacggcgggaacaugcucgagacgaucaaggucagcccccagaccauggacggcauccucaagagcauccugaaggugaagaaggcccugggcauguucaucuccgacgccccgggggagcggaaccccuacgagaacauccuguacaagaucugccugagcggcgacggguggcccuacaucgcgucccgcaccagcaucaccggccgggccugggagaacacgguggucgaccucgaguccgacgggaagccccagaaggccggcagcaacggcuccaacaagagccugcaguccgccggguucaccgccggccugaccuacagccagcucaugacccugaaggacgcgaugcugcagcuggacccgaacgccaagacguggauggacaucgaggggcgccccgaggaccccguggagaucgcccucuaccagcccuccagcggcugcuacauccacuucuuccgggagccgaccgaccugaagcaguucaagcaggacgccaaguacucccacgggaucgacgugaccgaccuguucgccgcgcagcccggccucaccagcgccgucaucgacgcccugccccgcaacauggugaucacgugccagggcuccgacgacaucaagaagcuguucgagagccaggggcgcaaggacaucaagcucaucgacaucgcccugagcaagaccgacucccggaaguacgagaacgcggugugggaccaguacaaggaccugugccacaugcacaccggcaucgucguggagaagaagaagcgcgggggcaaggaggagaucacgccccacugcgcccucauggacugcaucauguucgacgccgccgucagcgggggccugaacaccuccgugcugcgggccgugcucccgcgcgacauggucuuccggaccagcacgccccgcguggugcuguga

SEQ ID NO: 8212 - RNA, 1710 nt, Artificial Sequence
  derived and/or modified CDS sequence (opt1) from LASV(G1774-SLE-2011;Clade IV)__AIT17205__NP
augagcgccuccaaggagaucaagagcuuccuguggacccagucccuccgccgggagcugagcggcuacugcuccaacaucaagcuccagguggucaaggacgcccaggcgcugcugcacgggcuggacuucagcgagguguccaacgugcagcgccucaugcggaaggagcgccgggacgacaacgaccugaagcgccugcgggaccucaaccaggccgucaacaaccugguggagcucaagagcacccagcagaaguccauccugcgcgugggcacccugaccagcgacgaccugcucauccuggccgccgaccuggagaagcucaaguccaaggucacccggaccgagcgcccccugagcgccgggguguacaugggcaaccuguccagccagcagcucgaccagcggaaggcgcugcugaacaugaucgggauguccggcagcaaccagggcgcccgcaucgggcgggacggcgugguccgcgugugggacgugaagaacgccgagcuccugaacaaccaguucgggacgaugccgucccugacccucgccugccugaccaagcagggccaggucgaccugaacgacgcggugcaggcccucaccgaccuggggcugaucuacacggccaaguaccccaacaccagcgaccucgaccggcugacccagucccaccccauccugaacaugaucgacaccaagaaguccagccucaacaucuccggcuacaacuucagccugggcgccgccgugaaggcgggggccugcaugcuggacggcgggaacaugcucgagacgaucaaggucagcccccagaccauggacggcauccucaagagcauccugaaggugaagaaggcccugggcauguucaucuccgacaccccgggggagcgcaaccccuacgagaacauccuguacaagaucugccugagcggcgacggguggcccuacaucgccucccggaccagcaucacgggccgcgccugggagaacaccguggucgaccucgaguccgacgggaagccccagaaggcgggcagcaacuccagcaacaagucccugcagagcgccggccugaccgccgggcucaccuacucccagcugaugacgcugaaggacgccaugcugcagcucgacccgaacgccaagaccuggauggacaucgagggccggcccgaggaccccguggagaucgcgcuguaccagcccagcuccgggugcuacauccacuucuuccgcgagccgaccgaccugaagcaguucaagcaggacgccaaguacagccacggcaucgacgugaccgaccucuucgccgcccagcccgggcugacguccgccgucaucgacgcgcugccccggaaccucgugaucacgugccagggcagcgacgacauccgcaagcugcuggagagccagggccgcaaggacaucaagcucaucgacaucgcccuguccaagaccgacagccggaaguacgagaacgccgugugggaccaguacaaggaccugugccacaugcacaccgggaucgucguggagaagaagaagcgcggcgggaaggaggagaucaccccgcacugcgcccucauggacugcaucauguucgacgcggccgucuccggcgggcugaacgccagcgugcugcgggccgugcucccccgcgacauggucuuccggaccuccacgccccgcguggugcuguga

SEQ ID NO: 8213 - RNA, 1710 nt, Artificial Sequence
  derived and/or modified CDS sequence (opt1) from LASV(G1792-SLE-2011;Clade IV)__AIT17209__NP
augagcgccuccaaggagaucaagagcuuccuguggacccagucccuccgccgggagcugagcggcuacugcuccaacaucaagcuccagguggucaaggacgcccaggcgcugcugcacgggcuggacuucagcgagguguccaacgugcagcgccucaugcggaaggagcgccgggacgacaacgaccugaagcgccugcgggaccucaaccaggccgucaacaaccugguggagcucaagagcacccagcagaaguccauccugcgcgugggcacccugaccagcgacgaccugcucauccuggccgccgaccuggagaagcucaaguccaaggucacccggaccgagcgcccccugagcgccgggguguacaugggcaaccuguccagccagcagcucgaccagcggcgcgcgcugcuguccaugaucgggaugagcggcggcaaccagggggcccgggccggccgcgacggggugguccgggugugggacgugaagaacgccgagcuccugaacaaccaguucggcacgaugccgucccugacccucgcgugccugaccaagcaggggcaggucgaccugaacgacguggugcaggcccucaccgaccugggccugaucuacacggccaaguaccccaacaccagcgaccucgaccgccugacccagucccaccccauccugaacaugaucgacaccaagaaguccagccucaacaucuccggcuacaacuucagccugggggccgccgucaaggcgggcgccugcaugcuggacgggggcaacaugcucgagacgaucaaggugagcccccagaccauggacggcauccucaagagcauccugaaggugaagaaggcccuggggauguucaucuccgacaccccgggcgagcggaaccccuacgagaacauccuguacaagaucugccugagcggggacggcuggcccuacaucgccucccgcaccagcaucacggggcgggccugggagaacaccgucguggaccucgaguccgacggcaagcugcagaagaccggcagcaacaacuccaacaagagccugcaguccgcgggguucaccgccggccucacguacagccagcugaugacccugaaggacgccaugcugcagcucgaccccaacgccaagaucuggauggacaucgaggggcgcccggaggaccccguggagaucgcccuguaccagcccuccagcggcugcuacauccacuucuuccgggagcccaccgaccugaagcaguucaagcaggacgcgaaguacucccacgggaucgacgucaccgaccucuucgccgcccagccgggccugacgagcgccgugaucgacgcccugccccgcaacauggugaucacgugccagggcuccgacgacauccgcaagcuccuggagagccaggggcggaaggacaucaagcugaucgacaucgcgcucaacaagaccgacagccgcaaguacgagaacgccgucugggaccaguacaaggaccugugccacaugcacaccggcguggucguggagaagaagaagaagggcgggaaggaggagaucacgccccacugcgcccugauggacugcaucauguucgacgccgcgguguccgggggccucaacaccagcguccugcgggccgugcugccccgcgacaugguguuccggaccuccaccccgcgcgucgugcucuga

SEQ ID NO: 8214 - RNA, 1710 nt, Artificial Sequence
  derived and/or modified CDS sequence (opt1) from LASV(G1897-SLE-2011;Clade IV)__AIT17211__NP
augagcgccuccaaggagaucaagagcuuccuguggacccagucccuccgccgggagcugagcggcuacugcuccaacaucaagcuccagguggucaaggacgcccaggcgcugcugcacgggcuggacuucagcgagguguccaacgugcagcgccucaugcggaaggagcgccgggacgacaacgaccugaagcgccugcgggaccucaaccaggccgucaacaaccugguggagcucaagagcacccagcagaaguccauccugcgcgugggcacccugaccagcgacgaccugcucauccuggccgccgaccuggagaagcucaaguccaaggucacccggaccgagcgcccccugagcgccgggguguacaugggcaaccuguccagccagcagcucgaccagcggcgcgcgcugcugaacaugaucgggauguccggcggcaaccagggggcccaggccggccgggacggggugguccgcgugugggacgugaagaacgccgagcuccugaacaaccaguucggcacgaugccgagccugacccucgcgugccugaccaagcaggggcaggucgaccugaacgacgccgugcaggcccucaccgaccugggccugaucuacacggccaaguaccccaacaccuccgaccucgaccggcugacccagagccaccccauccugaacaugaucgacaccaagaaguccagccucaacaucagcggcuacaacuucucccugggggccgcggugaaggccggcgccugcaugcuggacgggggcaacaugcucgagacgaucaaggucagcccccagaccauggacggcauccugaaguccauccugaaggugaagaaggcccucgggauguucaucagcgacaccccgggcgagcgcaaccccuacgagaacauccuguacaagaucugccuguccggggacggcuggcccuacaucgccagccggaccuccaucacggggcgcgcgugggagaacaccguggucgaccucgagagcgacggcaagccccagaaggccaacuccaacagcuccaacaagagccugcaguccgccggcuucaccgccgggcugaccuacagccagcucaugacgcugaaggacgccaugcugcagcuggacccgaacgcgaagaccuggauggacaucgagggccggcccgaggaccccguggagaucgcccucuaccagcccuccagcgggugcuacauccacuucuuccgcgagccgaccgaccugaagcaguucaagcaggacgccaaguacucccacggcaucgacgugaccgaccuguucgccgcccagcccgggcucacgagcgcggucaucgacgcccugccccggaacauggugaucacgugccagggcuccgacgacauccgcaagcugcucgagagccagggccgcaaggacaucaagcugaucgacaucgcccugagcaagaccgacucccggaaguacgagaacgccgugugggaccaguacaaggaccucugccacaugcacaccgggaucgucguggagaagaagaagcgcggcgggaaggaggagaucaccccgcacugcgcgcugauggacugcaucauguucgacgccgccgucagcggcgggcugaacaccuccgugcuccgggccgugcugccccgcgacauggucuuccggaccagcacgccccgcguggugcuguga

SEQ ID NO: 8215 - RNA, 1710 nt, Artificial Sequence
  derived and/or modified CDS sequence (opt1) from LASV(G1932-SLE-2011;Clade IV)__AIT17213__NP
augagcgccuccaaggagaucaagagcuuccuguggacccagucccuccgccgggagcuggccggcuacugcagcaacaucaagcuccagguggucaaggacgcgcaggcccugcugcacgggcuggacuucuccgaggugagcaacgugcagcgccucaugcggaaggagcgccgggacgacaacgaccugaagcgccugcgggaccucaaccaggccgucaacaaccugguggagcugaaguccacccagcagaaguccgugcuccgcgucggcacccugaccagcgacgaccugcucauccuggccgccgaccuggagaagcucaagagcaaggugauccggaccgagcgcccccuguccgcggggguguacaugggcaaccugagcucccagcagcucgaccagcggcgcgcccugcugaacaugaucgggaugagcggcuccaaccagggcguccgggccgggcgcgacggcguggugcgggucugggacgugaagaacgccgagcuccugaacaaccaguucgggaccaugccgagccugacgcucgcgugccugaccaagcagggccagguggaccugaacgacgccguccaggcccucaccgaccuggggcugaucuacaccgccaaguaccccaacacguccgaccucgaccgccugacccagagccaccccauccugaacaugaucgacaccaagaaguccagccucaacaucagcggcuacaacuucucccugggcgccgcggugaaggccggggccugcaugcuggacggcgggaacaugcucgagaccaucaaggugagcccccagacgauggacggcauccugaaguccauccugaaggucaagaaggcccucggcauguucaucagcgacaccccgggggagcggaaccccuacgagaacauccuguacaagaucugccuguccggcgacggguggcccuacaucgccagccgcaccuccaucaccggccgggcgugggagaacacggugguggaccucgagagcgacgggaagccccagaaggccggcuccaacggcagcaacaagucccugcagagcgccggguucaccgccggccugaccuacucccagcucaugacccugaaggacgccaugcugcagcuggacccgaacgcgaagacguggauggacaucgaggggcgccccgaggaccccgucgagaucgcccucuaccagcccagcuccggcugcuacauccacuucuuccgggagccgaccgaccugaagcaguucaagcaggacgccaaguacagccacgggaucgacgugaccgaccuguucgccgcccagcccggccucaccuccgcggugaucgacgcccugccccgcaacauggucaucacgugccagggcagcgacgacauccgcaagcugcucgagucccaggggcggaaggacaucaagcugaucgacaucgcccugagcaagaccgacagccgcaaguacgagaacgccgugugggaccaguacaaggaccucugccacaugcacaccggcaucgucguggagaagaagaagcgcgggggcaaggaggagaucacgccccacugcgcgcugauggacugcaucauguucgacgccgccguguccgggggccugaacaccagcguccuccgggccgugcugccgcgggacaugguguuccgcaccuccacgccccgggucgugcuguga

SEQ ID NO: 8216 - RNA, 1710 nt, Artificial Sequence
  derived and/or modified CDS sequence (opt1) from LASV(G1959-SLE-2011;Clade IV)__AIT17217__NP
augagcgccuccaaggagaucaagagcuuccuguggacccagucccuccgccgggagcugagcggcuacugcuccaacaucaagcuccagguggucaaggacgcccaggcgcugcugcacgggcuggacuucagcgagguguccaacgugcagcgccucaugcggaaggagcgccgggacgacaacgaccugaagcgccugcgggaccucaaccaggccgucaacaaccugguggagcucaagagcacccagcagaaguccauccugcgcgugggcacccugaccagcgacgaccugcucauccuggccgccgaccuggagaagcucaaguccaaggucacccggaccgagcgcccccugagcgccgggguguacaugggcaaccuguccagccagcagcucgaccagcggcgcgcgcugcuguccaugaucgggaugagcuccggcgugcagggcgcccgggccgggcgcgacggcgucgugcgggugugggacgucaagaacgccgagcuccugaacaaccaguucgggacgaugccgagccugacccucgcgugccugaccaagcagggccagguggaccugaacgacgugguccaggcccucaccgaccuggggcugaucuacacggccaaguaccccaacaccuccgaccucgaccgccugacccagagccaccccauccugaacaugaucgacaccaagaaguccagccucaacaucagcggcuacaacuucucccugggcgccgccgugaaggcgggggccugcaugcuggacggcgggaacaugcucgagacgaucaaggugagcccccagaccauggacggcauccugaaguccauccugaaggucaagaaggcccucggcauguucaucagcgagaccccgggggagcggaaccccuacgagaacauccuguacaagaucugccuguccggcgacggguggcccuacaucgccagccgcaccuccaucacgggccgggccugggagaacaccgugguggaccucgagagcgacgggaagccccagaaggcgggcuccaacaacagcaacaagucccugcagagcaccggcuucgccgccgggcugaccuacucccagcucaugacgcugaaggacgccaugcugcagcuggacccgaacgccaagaccuggauggacaucgagggccgccccgaggaccccgucgagguggcgcucuaccagcccagcuccgggugcuacauccacuucuuccgggagccgaccgaccugaagcaguucaagcaggacgccaaguacagccacggcaucgacgugaccgaccuguucgccgcccagcccgggcucacguccgccgucaucgacgcgcugccccgcaacauggugaucacgugccagggcagcgacgacaucaagaagcugcucgagagccagggccgcaaggacaucaagcugaucgacaucgcccuguccaagaccgacagccggaaguacgagaacgccgucugggaccaguacaaggaccucugccacaugcacaccggggugguggucgagaagaagaagcgcggcgggaaggaggagaucaccccgcacugcgcccugauggacugcaucauguucgacgcggccguguccggcgggcugaacaccagcgugcuccgggccguccugccccgcgacaugguguuccggaccuccacgccccgcgugguccuguga

SEQ ID NO: 8217 - RNA, 1710 nt, Artificial Sequence
  derived and/or modified CDS sequence (opt1) from LASV(G2141-SLE-2011;Clade IV)__AIT17225__NP
augagcgccuccaaggagaucaagagcuuccuguggacccagucccuccgccgggagcugagcggcuacugcuccaacaucaagcuccagguggucaaggacgcccaggcgcugcugcacgggcuggacuucagcgagguguccaacgugcagcgccucaugcggaagcagcgccgggacgacaacgaccugaagcgccugcgggaccucaaccaggccgucaacaaccugguggagcucaagagcacccagcagaaguccgugcugcgcgucggcacccugaccagcgacgaccugcucgugcuggccgccgaccuggagaagcucaaguccaaggugacccggaccgagcgcccccugagcgccggggucuacaugggcaaccuguccagccagcagcucgaccagcggcgcgcgcugcugaacaugaucgggauguccggcggcaaccagggggcccgggccggcaacgacgggguggugcgcgucugggacgugaagaacgccgaccuccugaacaaccaguucggcacgaugccgagccugacccucgcgugccugaccaagcagggccagguggaccugaacgacgucgugcaggcccucaccgaccuggggcugaucuacacggccaaguaccccaacaccuccgaccucgaccggcugacccagagccaccccauccugaacaugaucgacaccaagaaguccagccucaacaucagcggcuacaacuucucccugggggccgccgugaaggcgggcgccugcaugcuggacgggggcaacaugcucgagacgaucaaggucagcccccagaccauggacggcauccugaaguccauccugaaggugaagaaggcccucgggauguucaucagcgacaccccgggcgagcgcaaccccuacgagaacauccuguacaagaucugccuguccggggacggcuggcccuacaucgccagccggaccuccaucacggggcgcgccugggagaacaccguggucgaccucgagagcgacggcaagccccagaagaccggcaacaacuccagcaacaagucccugcagagcgcgggguucaccgccggccugacguacucccagcucaugacccugaaggacgccaugcugcagcuggacccgaacgccaagaccuggauggacaucgaggggcggcccgaggaccccguggagguggcccucuaccagcccagcuccggcugcuacauccacuucuuccgcgagccgaccgaccugaagcaguucaagcaggacgcgaaguacagccacgggaucgacgucacggaccuguucgccgcccagcccggccucaccuccgccgugaucgaggcccugccccggaacauggucaucacgugccagggcagcgacgacauccgcaagcugcucgagucccaggggcgcaaggacaucaagcugaucgacaucgcgcugagcaagaucgacagccggaaguacgagaacgccgugugggaccaguacaaggaccucugccacaugcacaccggcguggucguggagaagaagaagcgcgggggcaaggaggagaucacgccccacugcgcccugauggacugcaucauguucgacgccgcgguguccgggggccugaacacccucguccugcgggccgugcugccgcgcgacaugguguuccggaccagcacccccaaggucgugcucuga

SEQ ID NO: 8218 - RNA, 1710 nt, Artificial Sequence
  derived and/or modified CDS sequence (opt1) from LASV(G2147-SLE-2011;Clade IV)__AIT17229__NP
augagcgccuccaaggagaucaagagcuuccuguggacccagucccuccgccgggagcugagcggcuacugcuccaacaucaagcuccagguggucaaggacgcccaggcgcugcugcacgggcuggacuucagcgagguguccaacgugcagcgccucaugcggaaggagcgccgggacgacaacgaccugaagcgccugcgggaccucaaccaggccgucaacaaccugguggagcucaagagcacccagcagaaguccgugcugcgcgucggcacccugaccagcgacgaccugcucauccuggccgccgaccuggagaagcucaaguccaaggugauccggaccgagcgcccccugagcgccgggguguacaugggcaaccuguccagccagcagcucgaccagcggcgcgcgcugcuguccaugaucgggaugagcggcggcaaccaggggacccgggccggccgcgacggggucgugcgggugugggacgucaagaacgccgagcuccugaacaaccaguucggcaccaugccgucccugacccucgccugccugaccaagcagggccagguggaccugaacgacgcggugcaggcccucaccgaccuggggcugaucuacacggccaaguaccccaacaccagcgaccucgaccgccugacccagucccaccccauccugaacaugaucgacaccaagaaguccagccucaacaucuccggcuacaacuucagccugggggccgccgucaaggcgggcgccugcaugcuggacgggggcaacaugcucgagacgaucaaggugagcccccagaccauggacggcauccucaagagcauccugaaggugaagaaggcccuggggauguucaucuccgacaccccgggcgagcggaaccccuacgagaacauccuguacaagaucugccugagcggggacggcuggcccuacaucgccucccgcaccagcaucacggggcgggccugggagaacaccgucguggaccucgaguccgacggcaagccccagaaggcgggcagcaacaacuccaacaagagccugcaguccgccggguucaccgccggccugaccuacagccagcucaugacgcugaaggacgccaugcugcagcuggacccgaacgccaagaccuggauggacaucgaggggcgccccgaggaccccguggagaucgcgcucuaccagcccuccagcggcugcuacauccacuucuuccgggagccgaccgaccugaagcaguucaagcaggacgccaaguacucccacgggaucgacgucaccgaccuguucgccgcccagcccggccucacgagcgccgugaucgacgcgcugccccgcaacauggugaucacgugccagggcuccgacgacauccgcaagcugcucgagagccaggggcggaaggacaucaagcugaucgacaucgcccugagcaaggccgacucccgcaaguacgagaacgccgucugggaccaguacaaggaccucugccacaugcacaccggcguggucguggagaagaagaagcgcgggggcaaggaggagaucacgccccacugcgcgcugauggacugcaucauguucgacgccgccgugagcgggggccugaacaccuccguccuccgggccgugcugccgcgggacaugguguuccgcaccagcacgccccgggucgugcuguga

SEQ ID NO: 8219 - RNA, 1710 nt, Artificial Sequence
  derived and/or modified CDS sequence (opt1) from LASV(G2165-SLE-2011;Clade IV)__AIT17233__NP
augagcgccuccaaggaggugaaguccuuccuguggacccagucccuccgccgggagcugagcggcuacugcuccaacaucaagcugcaggucgugaaggacgcccaggcgcuccugcacgggcuggacuucagcgagguguccaacguccagcgccucaugcggaaggagcgccgggacgacaacgaccugaagcgccugcgggaccucaaccaggccgugaacaaccugguggagcucaagagcacccagcagaaguccauccugcgcgucggcacccugaccagcgacgaccugcucgugcuggccgccgaccuggagaagcucaaguccaaggugacccggaccgagcgcccccugagcgccggggucuacaugggcaaccuguccagccagcagcucgaccagcggcgcgcgcugcuguccaugaucgggaugagcggcggcaaccagggggcccaggccggccgggacgggguggugcgcgucugggacgugaagaacgccgagcuccugaacaaccaguucggcacgaugccgucccugacccucgcgugccugaccaagcagggccagguggaccugaacgacgccguccaggcccucaccgaccuggggcugaucuacacggccaaguaccccaacaccagcgaccucgaccggcugacccagucccaccccauccugaacaugaucgacaccaagaaguccagccucaacaucagcggcuacaacuucagccugggggccgcggugaaggccggcgccugcaugcuggacgggggcaacaugcucgagacgaucaaggugagcccccagaccauggacggcauccucaagagcauccugaaggucaagaaggcccuggggauguucaucuccgacaccccgggcgagcgcaaccccuacgagaacauccuguacaagaucugccugagcggggacggcuggcccuacaucgccucccggaccagcaucacggggcgcgcgugggagaacaccgugguggaccucgaguccgacggcaagccccagaaggccggcagcaacaacuccaacaagagccugcaguccgccggguucaccgccggccugaccuacagccagcucaugacgcugaaggacgccaugcugcagcuggacccgaacgcgaagaccuggauggacaucgaggggcggcccgaggaccccgucgagguggcccucuaccagcccuccagcggcugcuacauccacuucuuccgcgagccgaccgaccugaagcaguucaagcaggacgccaaguacucccacgggaucgacgugaccgaccuguucgccgcccagcccggccucacgagcgcggucaucgacgcccugccccggaacauggugaucacgugccagggcuccgacgacauccgcaagcugcucgagagccaggggcgcaaggacaucaagcugaucgacaucgcccugagcaagaccgacucccggaaguacgagaacgccgucugggaccaguacaaggaccucugccacaugcacaccggcgugguggucgagaagaagaagcgcgggggcaaggaggagaucaccccgcacugcgcgcugauggacugcaucauguucgacgccgccgugagcgggggccugaacaccuccgugcuccgggccguccugccccgcgacaugguguuccggaccagcacgccccgcgugguccuguga

SEQ ID NO: 8220 - RNA, 1710 nt, Artificial Sequence
  derived and/or modified CDS sequence (opt1) from LASV(G2184-SLE-2011;Clade IV)__AIT17237__NP
augagcgccuccaaggagaucaagagcuuccuguggacccagucccuccgccgggagcugagcggcuacugcuccaacaucaagcuccagguggucaaggacgcccaggcgcugcugcacgggcuggacuucagcgagguguccaacgugcagcgccucaugcggaaggagcgccgggacgacaacgaccugaagcgccugcgggaccucaaccaggccgucaacaaccugguggagcucaagagcacccagcagaaguccauccugcgcgugggcacccugaccagcgacgaccugcucauccuggccgccgaccuggagaagcucaaguccaaggucacccggaccgagcgcccccugagcgccgggguguacaugggcaaccuguccagccagcagcucgaccagcggcgcgcgcugcuguccaugaucgggaugagcggcggcaaccagggggcccgggccggccgcgacggggugguccgggugugggacgugaagaacgccgagcuccugaacaaccaguucggcacgaugccgucccugacccucgcgugccugaccaagcaggggcaggucgaccugaacgacgccgugcaggcccucaccgaccugggccugaucuacacggccaaguaccccaacaccagcgaccucgaccgccugacccagucccaccccauccugaacaugaucgacaccaagaaguccagccucaacaucuccggcuacaacuucagccugggggccgcggugaaggccggcgccugcaugcuggacgggggcaacaugcucgagacgaucaaggucagcccccagaccauggacggcauccucaagagcauccugaaggugaagaaggcccuggggauguucaucuccgacaccccgggcgagcggaaccccuacgagaacauccuguacaagaucugccugagcggggacggcuggcccuacaucgccucccgcaccagcaucacggggcgggcgugggagaacaccguggucgaccucgaguccgacggcaagccccagaaggccggcagcaacaacuccaacaagagccugcaguccgccggguucaccgccggccugaccuacagccagcucaugacgcugaaggacgccaugcugcagcuggacccgaacgcgaagaccuggauggacaucgaggggcgccccgaggaccccguggagguggcccucuaccagcccuccagcggcugcuacauccacuucuuccgggagccgaccgaccugaagcaguucaagcaggacgccaaguacucccacgggaucgacgucaccgaccuguucgccgcccagcccggccucacgagcgcggugaucgacgcccugccccgcaacauggugaucacgugccagggcuccgacgacauccgcaagcugcucgagagccaggggcggaaggacaucaagcugaucgacaucgcccugagcaagaccgacucccgcaaguacgagaacgccgucugggaccaguacaaggaccucugccacaugcacaccggcguggucguggagaagaagaagcgcgggggcaaggaggagaucaccccgcacugcgcgcugauggacugcaucauguucgacgccgccgugagcgggggccugaacaccuccguccuccgggccgugcugccccgggacaugguguuccgcaccagcacgccccgggucgugcuguga

SEQ ID NO: 8221 - RNA, 1710 nt, Artificial Sequence
  derived and/or modified CDS sequence (opt1) from LASV(G2197-SLE-2011;Clade IV)__AIT17241__NP
augagcgccuccaaggagaucaagagcuuccuguggacccagucccuccgccgggagcugagcggcuacugcuccaacaucaagcuccagguggucaaggacgcccaggcgcugcugcacgggcuggacuucagcgagguguccaacgugcagcgccucaugcggaaggagcgccgggacgacaacgaccugaagcgccugcgggaccucaaccaggccgucaacaaccugguggagcucaagagcacccagcagaaguccauccugcgcgugggcacccugaccagcgacgaccugcucauccuggccgccgaccuggagaagcucaaguccaaggucacccggaccgagcgcccccugagcgccgggguguacaugggcaaccuguccagccagcagcucgaccagcggcgcgcgcugcuguccaugaucgggaugagcggcggcaaccagggggcccgggccggccgcgacggggugguccgggugugggacgugaagaacgccgagcuccugaacaaccaguucggcacgaugccgucccugacccucgcgugccugaccaagcaggggcaggucgaccugaacgacgccgugcaggcccucaccgaccugggccugaucuacacggccaaguaccccaacaccagcgaccucgaccgccugacccagucccaccccauccugaacaugaucgacaccaagaaguccagccucaacaucuccggcuacaacuucagccugggggccgcggugaaggccggcgccugcaugcuggacgggggcaacaugcucgagacgaucaaggucagcccccagaccauggacggcauccucaagagcauccugaaggugaagaaggcccuggggauguucaucuccgacaccccgggcgagcggaaccccuacgagaacauccuguacaagaucugccugagcggggacggcuggcccuacaucgccucccgcaccagcaucacggggcgggcgugggagaacaccguggucgaccucgaguccgacggcaagccccagaaggccggcagcaacaacuccaacaagagccugcaguccgccggguucaccgccggccugaccuacagccagcucaugacgcugaaggacgccaugcugcagcuggacccgaacgcgaagaccuggauggacaucgaggggcgccccgaggaccccguggagaucgcccucuaccagcccuccagcggcugcuacauccacuucuuccgggagccgaccgaccugaagcaguucaagcaggacgccaaguacucccacgggaucgacgugaccgaccuguucgccgcccagcccggccucacgagcgcggucaucgacgcccugccccgcaacauggugaucacgugccagggcuccgacgacauccgcaagcuguucgagagccaggggcggaaggacaucaagcucaucgacaucgcccugagcaagaccgacucccgcaaguacgagaacgccgugugggaccaguacaaggaccugugccacaugcacaccggcgucguggucgagaagaagaagcgcgggggcaaggaggagaucaccccgcacugcgcgcucauggacugcaucauguucgacgccgccgugagcgggggccugaacaccuccgugcugcgggccguccucccccgggacaugguguuccgcaccagcacgccccgggugguccuguga

SEQ ID NO: 8222 - RNA, 1710 nt, Artificial Sequence
  derived and/or modified CDS sequence (opt1) from LASV(G2222-SLE-2011;Clade IV)__AIT17245__NP
augagcgccuccaaggagaucaagagcuuccuguggacccagucccuccgccgggagcugagcggcuacugcuccaacaucaagcuccagguggucaaggacgcccaggcgcugcugcacgggcuggacuucagcgagguguccaacgugcagcgccucaugcggaaggagcgccgggacgacaacgaccugaagcgccugcgggaccucaaccaggccgucaacaaccugguggagcucaagagcacccagcagaaguccauccugcgcgugggcacccugaccagcgacgaccugcucauccuggccgccgaccuggagaagcucaaguccaaggucacccggaccgagcgcccccugagcgccgggguguacaugggcaaccuguccagccagcagcucgaccagcggcgcgcgcugcugaacaugaucgggauguccggcagcaaccagggcgcccggacggggcgcgacggcgugguccgggugugggacgugaagaacgccgagcuccugaacaaccaguucgggaccaugccgucccugacccucgccugccugaccaagcagggccaggucgaccugaacgacgcggugcaggcccucacggaccuggggcugaucuacaccgccaaguaccccaacaccagcgaccucgaccgccugacccagucccaccccauccugaacaugaucgacacgaagaaguccagccucaacaucuccggcuacaacuucagccugggcgccgccgugaaggcgggggccugcaugcuggacggcgggaacaugcucgagaccaucaaggucagcccccagaccauggacggcauccucaagagcauccugaaggugaagaaggcccugggcauguucaucuccgacaccccgggggagcggaaccccuacgagaacauccuguacaagaucugccugagcggcgacggguggcccuacaucgccucccgcacgagcaucaccggccgggccugggagaacaccguggucgaccucgaguccgacgggaagccccagaaggcgggcagcaacaacuccaacaagagccugcaguccgccggccugaccgccgggcucacguacagccagcugaugacccugaaggacgccaugcugcagcucgacccgaacgccaagaccuggauggacaucgagggccgccccgaggaccccguggagaucgcgcuguaccagcccuccagcgggugcuacauccacuucuuccgggagccgaccgaccugaagcaguucaagcaggacgccaaguacucccacggcaucgacguggccgaccucuucgccgcccagcccgggcugacgagcgcggucaucgacgcccugccccgcaaccucgugaucacgugccagggcuccgacgacauccgcaagcugcuggagagccagggccggaaggacaucaagcucaucgacaucgcccugagcaagaccgacucccgcaaguacgagaacgccgugugggaccaguacaaggaccugugccacaugcacaccgggaucgucguggagaagaagaagcggggcgggaaggaggagaucaccccgcacugcgcgcucauggacugcaucauguucgacgccgccgucagcggcgggcugaacgccuccgugcugcgcgccgugcucccccgggacauggucuuccgcaccagcacgccccggguggugcuguga

SEQ ID NO: 8223 - RNA, 1710 nt, Artificial Sequence
  derived and/or modified CDS sequence (opt1) from LASV(G2230-SLE-2012;Clade IV)__AIT17247__NP
augagcgccuccaaggagaucaagagcuuccuguggacccagucccuccgccgggagcugagcggcuacugcuccaacaucaagcuccagguggucaaggacgcccaggcgcugcugcacgggcuggacuucagcgagguguccaacgugcagcgccucaugcggaagcagcgccgggacgacagcgaccugaagcgccugcgggaccucaaccaggccgucaacaaccugguggagcugaaguccacccagcagaaguccgugcuccgcgucggcacgcugaccagcgacgaccugcucauccuggccgccgaccuggagaagcucaagagcaaggugauccggaccgagcgcccccuguccagcgggguguacaugggcaaccuguccagccagcagcucgaccagcggcgcgcccugcugaacaugaucgggauguccggcggcaaccagggggcgcaggucggccgggacgggguggugcgcgucugggacgugaagaacgccgaccuccugaacaaccaguucggcaccaugccgagccugacgcucgccugccugaccaagcagggccagguggaccugaacgacgucgugcaggcccucaccgaccuggggcugaucuacaccgcgaaguaccccaacacguccgaccucgaccggcuggcccagagccaccccauccugaacaugaucgacaccaagaaguccagccucaacaucagcggcuacaacuucucccugggggccgccgugaaggccggcgcgugcaugcuggacgggggcaacaugcucgagaccaucaaggucagcccccagaccauggacggcauccugaaguccauccugaaggugaagaaggcccucgggauguucaucagcgagacgccgggcgagcgcaaccccuacgagaacauccuguacaagaucugccuguccggggacggcuggcccuacaucgccagccggaccuccaucaccgggcgcgccugggagaacaccaucguggaccucgagagcgacggcaagccccagaaggccggcuccaacaacagcaacaagucccugcagagcgcgggguucacggccggccugaccuacucccagcucaugacccugaaggacagcaugcugcagcuggacccgaacgccaagaccuggauggacaucgaggggcggcccgaggaccccgucgagguggcccucuaccagcccuccagcggcugcuacauccacuucuuccgcgagccgacggaccugaagcaguucaagcaggacgccaaguacucccacgggaucgacgugaccgaccuguucgcggcccagcccggccucaccagcgccgucaucgaggcccugccccggaacauggugaucacgugccagggcagcgacgacauccgcaagcugcucgagucccaggggcgcaaggacaucaagcugaucgacaucgcccugaacaagaccgacagccggaaguacgagaacgcggucugggaccaguacaaggaccucugccacaugcacaccggcgugguggucgagaagaagaagcgcgggggcaaggaggagaucacgccccacugcgcccugauggacugcaucauguucgacgccgccguguccgggggccugaagacccucgugcugcgggcgguccugccgcgcgacaugguguuccggaccagcacccccaaggugguccucuga

SEQ ID NO: 8224 - RNA, 1710 nt, Artificial Sequence
  derived and/or modified CDS sequence (opt1) from LASV(G2259-SLE-2012;Clade IV)__AIT17251__NP
augagcgccuccaaggagaucaagagcuuccuguggacccagucccuccgccgggagcugagcggcuacugcuccaacaucaagcuccagguggucaaggacgcccaggcgcugcugcacgggcuggacuucagcgagguguccaacgugcagcgccucaugcggaagcagcgccgggacgacagcgaccugaagcgccugcgggaccucaaccaggccgucaacaaccugguggagcugaaguccacccagcagaaguccgugcuccgcgucggcacgcugaccagcgacgaccugcucauccuggccgccgaccuggagaagcucaagagcaaggugauccggaccgagcgcccccuguccagcgggguguacaugggcaaccuguccagccagcagcucgaccagcggcgcgcccugcugaacaugaucgggauguccggcggcaaccagggggcgcaggucggccgggacgggguggugcgcgucugggacgugaagaacgccgaccuccugaacaaccaguucggcaccaugccgagccugacgcucgccugccugaccaagcagggccagguggaccugaacgacgucgugcaggcccucaccgaccuggggcugaucuacaccgcgaaguaccccaacacguccgaccucgaccggcuggcccagagccaccccauccugaacaugaucgacaccaagaaguccagccucaacaucagcggcuacaacuucucccugggggccgccgugaaggccggcgcgugcaugcuggacgggggcaacaugcucgagaccaucaaggucagcccccagaccauggacggcauccugaaguccauccugaaggugaagaaggcccucgggauguucaucagcgagacgccgggcgagcgcaaccccuacgagaacauccuguacaagaucugccuguccggggacggcuggcccuacaucgccagccggaccuccaucaccgggcgcgccugggagaacaccaucguggaccucgagagcgacggcaagccccagaagacgggcuccaacaacagcaacaagucccugcagagcgccggguucaccgcgggccugaccuacucccagcucaugacccugaaggacagcaugcugcagcuggacccgaacgccaagacguggauggacaucgaggggcggcccgaggaccccgucgagguggcccucuaccagcccuccagcggcugcuacauccacuucuuccgcgagccgaccgaccugaagcaguucaagcaggacgccaaguacucccacgggaucgacgugaccgaccuguucgccgcgcagcccggccucaccagcgccgucaucgaggcccugccccggaacauggugaucacgugccagggcagcgacgacauccgcaagcugcucgagucccaggggcgcaaggacaucaagcugaucgacaucgcccugaacaagaccgacagccggaaguacgagaacgccgucugggaccaguacaaggaccucugccacaugcacaccggcgugguggucgagaagaagaagcgcgggggcaaggaggagaucacgccccacugcgcgcugauggacugcaucauguucgacgccgccguguccgggggccugaagacccucgugcugcgggccguccugccgcgcgacaugguguuccggaccagcacccccaaggugguccucuga

SEQ ID NO: 8225 - RNA, 1710 nt, Artificial Sequence
  derived and/or modified CDS sequence (opt1) from LASV(G2263-SLE-2012;Clade IV)__AIT17255__NP
augagcgccuccaaggagaucaagagcuuccuguggacccagucccuccgccgggagcugagcggcuacugcuccaacaucaagcuccagguggucaaggacgcccaggcgcugcugcacgggcuggacuucagcgagguguccaacgugcagcgccucaugcggaaggagcgccgggacgacaacgaccugaagcgccugcgggaccucaaccaggccgucaacaaccugguggagcucaagagcacccagcagaaguccgugcugcgcgucggcacccugaccagcgacgaccugcucgugcuggccgccgaccuggagaagcucaaguccaaggugacccggaccgagcgcccccugagcgccggggucuacaugggcaaccuguccagccagcagcucgaccagcggcgcgcgcugcuguccaugaucgggaugagcggcggcaaccagcgggcccaggccgggcgcgacggcguggugcgggucugggacgugaagaacgccgagcuccugaacaaccaguucgggacgaugccgucccugacccucgcgugccugaccaagcagggccagguggaccugaacgacgccguccaggcccucaccgaccuggggcugaucuacacggugaaguaccccaacgccagcgaccucgaccgccugacccagucccaccccauccugaacaugaucgacaccaagaaguccagccucaacaucuccggcuacaacuucagccugggcgccgcggugaaggccggggccugcaugcuggacggcgggaacaugcucgagaccaucaaggucagcccccagacgauggacggcauccucaagagcauccugaaggugaagaagacccugggcauguucaucuccgacaccccgggggagcggaaccccuacgagaacauccuguacaagaucugccugagcggcgacggguggcccuacaucgccucccgcaccagcaucacgggccgggccugggagaacaccguggucgaccucgaguccaacgggaagccccagaaggcggacagcaacuccagcaacaagucccugcagagcgccggcuucaccgccggccugaccuacucccagcucaugacgcugaaggacgccaugcugcagcuggacccgaacgccaagaccuggauggacaucgaggggcgccccgaggaccccguggagaucgcguucuaccagcccagcuccggcugcuacauccacuucuuccgggagccgaccgaccucaagcaguucaagcaggacgccaaguacagccacgggaucgacgugaccgaccuguucgccgcccagcccggccugacguccgccgucaucgacgcgcucccccgcaacauggugaucacgugccaggggagcgacgacauccgcaagcugcuggagagccagggccggaaggacaucaagcucaucgacaucgcccuguccaagaccgacagccgcaaguacgagaacgccgucugggaccaguacaaggaccugugccacaugcacaccggcgugguggucgagaagaagaagcgcgggggcaaggaggagaucaccccgcacugcgcccucauggacugcaucauguucgacgcggccguguccgggggccugaacacccuggugcuccgggccguccugccccgggacaugguguuccgcaccagcacgccccgggugguccuguga

SEQ ID NO: 8226 - RNA, 1710 nt, Artificial Sequence
  derived and/or modified CDS sequence (opt1) from LASV(G2280-SLE-2012;Clade IV)__AIT17259__NP
augagcgccuccaaggagaucaagagcuuccuguggacccagucccuccgccgggagcugagcuccuacugcagcaacaucaagcuccagguggucaaggacgcccaggcgcugcugcacggccuggacuucuccgaggugagcaacgugcagcgccucaugcggaaggagcgccgggacgacaacgaccugaagcgccugcgggaccucaaccaggccgucaacaaccugguggagcugaaguccacccagcagaaguccauccuccgcguggggacccugaccagcgacgaccugcucauccuggccgccgaccuggagaagcucaagagcaaggucacccggaccgagcgcccccuguccgccggcguguacauggggaaccugagcucccagcagcucgaccagcggcgcgcgcugcugaacaugcucggcaugagcggguccaaccagggcgcccgggccggccgcgacggggugguccgggugugggacgugaagaacgccgagcugcugaacaaccaguucggcacgaugccgagccucacccuggcgugccugaccaagcaggggcaggucgaccucaacgacgccgugcaggcccugaccgaccugggccucaucuacacggccaaguaccccaacaccuccgaccuggaccgccugacccagagccaccccauccucaacaugaucgacaccaagaaguccagccugaacaucagcggguacaacuucucccugggcgccgcggugaaggccggcgccugcaugcucgacgggggcaacaugcuggagacgaucaaggucagcccccagaccauggacgggauccugaaguccauccucaaggugaagaaggcccugggcauguucaucagcgacaccccgggcgagcggaaccccuacgagaacauccuguacaagaucugccucuccggggacggcuggcccuacaucgccagccgcaccuccaucacggggcgggcgugggagaacaccguggucgaccuggagagcgacggcaagccccagaaggccggguccaacagcuccaacaagagccugcaguccgccggcuucaccgccggccucaccuacagccagcugaugacgcugaaggacgccaugcugcagcucgacccgaacgcgaagaccuggauggacaucgaggggcgccccgaggaccccguggagaucgcccuguaccagcccuccagcggcugcuacauccacuucuuccgggagccgaccgaccugaagcaguucaagcaggacgccaaguacucccacgggaucgacgugaccgaccucuucgccgcccagcccggccugacgagcgcggucaucgacgcccugccccgcaacauggugaucacgugccaggggagcgacgacauccgcaagcuccuggagucccagggccggaaggacaucaagcugaucgacaucgcccucagcaagaccgacucccgcaaguacgagaacgccgugugggaccaguacaaggaccugugccacaugcacaccggcaucgucguggagaagaagaagcgcgggggcaaggaggagaucaccccgcacugcgcgcugauggacugcaucauguucgacgccgccgucagcgggggccucaacgccuccgugcugcgggccgugcugccccgggacauggucuuccgcaccagcacgccccggguggugcucuga

SEQ ID NO: 8227 - RNA, 1710 nt, Artificial Sequence
  derived and/or modified CDS sequence (opt1) from LASV(G2295-SLE-2012;Clade IV)__AIT17263__NP
augagcgccuccaaggagaucaagagcuuccuguggacccagucccuccgccgggagcugagcggcuacugcuccaacaucaagcuccagguggucaaggacgcccaggcgcugcugcacgggcuggacuucagcgagguguccaacgugcagcgccucaugcggaaggagcgccgggacgacaacgaccugaagcgccugcgggaccucaaccaggccgucaacaaccugguggagcucaagagcacccagcagaaguccgugcugcgcgucggcacccugaccagcgacgaccugcucauccuggccgccgaccuggagaagcucaaguccaaggugauccggaccgagcgcccccugagcgccgggguguacaugggcaaccuguccagccagcagcucgaccagcggcgcgcgcugcugaacaugaucgggaugggcggcuccaaccagggggcccgggccggccgcgacggggucgugcgggugugggacgucaagaacgccgagcuccugaacaaccaguucggcaccaugccgagccugacgcucgcgugccugaccaagcagggccagguggaccugaacgacgccgugcaggcccucaccgaccuggggcugaucuacaccgccaaguaccccaacacguccgaccucgaccgccugacccagagccaccccauccugaacaugaucgacaccaagaaguccagccucaacaucagcggcuacaacuucucccugggggccgcggucaaggccggcgccugcaugcuggacgggggcaacaugcucgagaccaucaaggugagcccccagacgauggacggcauccugaaguccauccugaaggugaagaaggcccucgggauguucaucagcgacaccccgggcgagcggaaccccuacgagaacauccuguacaagaucugccuguccggggacggcuggcccuacaucgccagccgcaccuccaucaccgggcgggcgugggagaacacggucguggaccucgagagcgacggcaagccccagaaggccggcuccaacgggagcaacaagucccugcagagcgccggcuucaccgccgggcugaccuacucccagcucaugacccugaaggacgccaugcugcagcuggacccgaacacgaagaccuggauggacaucgagggccgccccgaggaccccguggaggucgcgcucuaccagcccagcuccgggugcuacauccacuucuuccgggagccgaccgaccugaagcaguucaagcaggacgccaaguacagccacggcaucgacgugaccgaccuguucgccgcccagcccggccucacguccgccgugaucgacgcgcugccccgcaacauggucaucacgugccaggggagcgacgacauccgcaagcugcucgagucccagggccggaaggacaucaagcugaucgacaucgcccugagcaagaccgacagccgcaaguacgagaacgccgugugggaccaguacaaggaccucugccacaugcacaccgggaucgucguggagaagaagaagcggggcgggaaggaggagaucaccccgcacugcgcccugauggacugcaucauguucgacgcggccguguccggcggccugaacaccagcguccuccgcgccgugcugccccgggacaugguguuccgcaccuccacgccccgggucgugcuguga

SEQ ID NO: 8228 - RNA, 1710 nt, Artificial Sequence
  derived and/or modified CDS sequence (opt1) from LASV(G2315-SLE-2012;Clade IV)__AIT17267__NP
augagcgccuccaaggagaucaagagcuuccuguggacccagucccuccgccgggagcugagcggcuacugcuccaacaucaagcuccagguggucaaggacgcccaggcgcugcugcacgggcuggacuucagcgagguguccaacgugcagcgccucaugcggaaggagcgccgggacgacaacgaccugaagcgccugcgggaccucaaccaggccgucaacaaccugguggagcucaagagcacccagcagaaguccgugcugcgcgucggcacccugaccagcgacgaccugcucauccuggccgccgaccuggagaagcucaaguccaaggugacccggaccgagcgcccccugagcgccgggguguacaugggcaaccuguccagccagcagcucgaccagcggcgcgcgcugcugaacaugaucgggauguccggcggcaaccagggggcccgggccggccgcgacggggucgugcgggugugggacgucaagaacgccgagcuccugaacaaccaguucggcacgaugccgagccugacccucgcgugccugaccaagcagggccagguggaccugaacgacgccgugcaggcccucaccgaccuggggcugaucuacacggccaaguaccccaacaccuccgaccucgaccgccugacccagagccaccccauccugaacaugaucgacaccaagaaguccagccucaacaucagcggcuacaacuucucccugggggccgcggucaaggccggcgccugcaugcuggacgggggcaacaugcucgagacgaucaaggugagcccccagaccauggacuccauccucaagagcauccugaaggugaagaaggcccugggcauguucaucuccgacaccccgggggagcggaaccccuacgagaacauccuguacaagaucugccugagcggcgacggguggcccuacaucgccucccgcaccagcaucacgggccgggcgugggagaacaccgucguggaccucgaguccgacgggaagccccagaaggccggcagcaacaacuccaacaagagccugcaguccgccggcuucgccgccgggcugaccuacagccagcucaugacccugaaggacgcgaugcugcagcuggacccgaacgccaagacguggauggacaucgagggccgccccgaggaccccguggagaucgcccucuaccagcccuccagcgggugcuacauccacuucuuccgggagccgaccgaccugaagcaguucaagcaggacgccaaguacucccacggcaucgacgucaccgaccuguucgccgcgcagcccgggcucaccagcgccgugaucgacgcccugccccgcaacauggugaucacgugccagggcuccgacgacauccgcaagcugcucgagagccagggccggaaggacaucaagcugaucgacaucgcccugagcaagaccgacucccgcaaguacgagaacgcggucugggaccaguacaaggaccucugccacaugcacaccgggguggucguggagaagaagaagcggggcgggaaggaggagaucacgccccacugcgcccugauggacugcaucauguucgacgccgccgugagcggcgggcugaacaccuccguccuccgcgccgugcugccgcgggacaugguguuccgcaccaccacgccccgggucgugcuguga

SEQ ID NO: 8229 - RNA, 1710 nt, Artificial Sequence
  derived and/or modified CDS sequence (opt1) from LASV(G2318-SLE-2012;Clade IV)__AIT17271__NP
augagcgccuccaaggagaucaagagcuuccuguggacccagucccuccgccgggagcugagcggcuacugcuccaacaucaagcuccagguggucaaggacgcccaggcgcugcugcacgggcuggacuucagcgagguguccaacgugcagcgccucaugcggaaggagcgccgggacgacaacgaccugaagcgccugcgggaccucaaccaggccgucaacaaccugguggagcucaagagcacccagcagaaguccauccugcgcgugggcacccugaccagcgacgaccugcucauccuggccgccgaccuggagaagcucaaguccaaggucacccggaccgagcgcccccugagcgccgggguguacaugggcaaccuguccagccagcagcucgaccagcggcgcgcgcugcugaacaugaucgggauguccggcggcaaccagggggcccgggccggccgcgacggggugguccgggugugggacgugaagaacgccgagcuccugaacaaccaguucggcacgaugccgagccugacccucgcgugccugaccaagcaggggcaggucgaccugaacgacgccgugcaggcccucaccgaccugggccugaucuacacggccaaguaccccaacaccuccgaccucgaccgccugacccagagccaccccauccugaacaugaucgacaccaagaaguccagccucaacaucagcggcuacaacuucucccugggggccgcggugaaggccggcgccugcaugcuggacgggggcaacaugcucgagacgaucaaggucagcccccagaccauggacggcauccugaagaccauccugaaggugaagaaggcccucgggauguucaucuccgacaccccgggcgagcggaaccccuacgagaacauccuguacaagaucugccugagcggggacggcuggcccuacaucgccucccgcacgagcaucaccgggcgggcgugggagaacaccguggucgaccucgaguccgacggcaagccccagaagaccggcagcaacaacuccaacaagagccugcaguccgccggguucgccgccggccugacguacagccagcucaugacccugaaggacgccaugcugcagcuggacccgaacgcgaagaccuggauggacaucgaggggcgccccgaggaccccguggagaucgcccucuaccagcccuccagcggcugcuacauccacuucuuccgggagccgaccgaccugaagcaguucaagcaggacgccaaguacucccacgggaucgacgugacggaccuguucgccgcccagcccggccucaccagcgcggucaucgacgcccugccccgcaacauggugaucacgugccagggcuccgacgacauccgcaagcugcucgagagccaggggcggaaggacaucaagcugaucgacaucgcccuguccaaggccgacagccgcaaguacgagaacgcggugugggaccaguacaaggaccucugccacaugcacaccggcgucguggucgagaagaagaagcgcgggggcaaggaggagaucaccccgcacugcgcccugauggacugcaucauguacgacgccgccgugagcgggggccuguccaccagcgugcuccgggccguccugccccgggacaugguguuccgcaccuccacgccccgggugguccuguga

SEQ ID NO: 8230 - RNA, 1710 nt, Artificial Sequence
  derived and/or modified CDS sequence (opt1) from LASV(G2363-SLE-2012;Clade IV)__AIT17275__NP
augagcgccuccaaggagaucaagagcuuccuguggacccagucccuccgccgggagcugagcggcuacugcuccaacaucaagcuccagguggucaaggacgcccaggcgcugcugcacgggcuggacuucagcgagguguccaacgugcagcgccucaugcggaagcagcgccgggacgacggcgaccugaagcgccugcgggaccucaaccaggccgucaacaaccugguggagcugaaguccacccagcagaaguccgugcuccgcgucgggacgcugaccagcgacgaccugcucacccuggccgccgaccuggagaagcucaaguccaaggugacccggacggagcgcccccugagcgccggcguguacauggggaaccuguccagccagcagcucgaccagcggcgcgcgcugcugaacaugaucggcauguccggcgggaaccagggcgcccggaccgggaaggacggcgucgugcgcaucugggacgugaagaacgccgaccuccugaacaaccaguucgggaccaugccgagccugacccucgccugccugacgaagcagggccaggucgaccugaacgacguggugcaggcgcucaccgaccugggccugaucuacaccgccaaguaccccaacaucuccgaccucgaccggcuggcccagagccaccccauccugaagaugaucgacaccuccaagagcagccucaacaucuccggguacaacuucagccugggcgccgccgucaaggcgggggccugcaugcuggacggcggcaacaugcucgagacggugaaggugagcccccagaccauggacgggauccucaagagcauccugaaggucaagaagucccugggcauguucaucagcgacaccccgggggagcgcaaccccuacgagaacauccuguacaagaucugccuguccggcgacggguggcccuacaucgccagccggaccuccaucacgggccgcgccugggagaacaccgugguggaccucgagagcgacggcaagccccagaaggucggguccaacaacagcaacaagucccugcagagcaccggcuucaccgccgggcugacguacucccagcucaugacccugaaggacgcgaugcugcagcuggacccgaacgccaagaccuggauggacaucgagggccggcccgaggaccccguggagaucgcccucuaccagcccagcuccgggugcuacauccacuucuuccgcgagccgaccgaccugaagcaguucaagcaggacgccaaguacagccacggcaucgacgugacggaccuguucgccgcgcagcccggccucaccuccgccgucaucgacacccugccccggaacauggugaucacgugccaggggagcgacgacaucggcaagcugcucgagagccaggggcgcaaggacaucaagcugaucgacaucgcccuguccaagaccgacagccgcaaguacgagaacgccgucugggaccaguacaaggaccucugccacaugcacaccggcgugguggucgagaagaagaagcgcgggggcaaggaggagaucaccccgcacugcgcccugauggacugcaucauguucgacgcggccguguccggcgggcugaacgccagcgugcuccgggccguccugccccgggacaugguguuccgcaccuccacgccccgggugguccuguga

SEQ ID NO: 8231 - RNA, 1710 nt, Artificial Sequence
  derived and/or modified CDS sequence (opt1) from LASV(G2384-SLE-2012;Clade IV)__AIT17277__NP
augagcgccuccaaggagaucaagagcuuccuguggacccagucccuccgccgggagcugagcuccuacugcagcaacaucaagcuccagguggucaaggacgcccaggcgcugcugcacggccuggacuucuccgaggugagcaacgugcagcgccucaugcggaaggagcgccgggacgacaacgaccugaagcgccugcgggaccucaaccaggccgucaacaaccugguggagcugaaguccacccagcagaaguccauccuccgcguggggacccugaccuccgacgaccugcucauccuggccgccgaccuggagaagcucaagagcaaggucacccggaccgagcgcccccuguccgccggcguguacauggggaaccugagcucccagcagcucgaccagcggcgcgcgcugcugagcaugaucggcauguccgggagcaaccagggcgcccgggccggccgcgacggggugguccgggugugggacgugaagaacgccgagcuccugaacaaccaguucggcacgaugccgucccugacccucgcgugccugaccaagcaggggcaggucgaccugaacgacgccgugcaggcccucaccgaccugggccugaucuacacggccaaguaccccaacaccagcgaccucgaccgccugacccagagccaccccauccugaacaugaucgacaccaagaaguccagccucaacaucuccggguacaacuucagccugggcgccgcggugaaggccggcgccugcaugcuggacgggggcaacaugcucgagacgaucaaggucagcccccagaccauggacgggauccucaagagcauccugaaggugaagaaggcccugggcauguucaucuccgacaccccgggcgagcggaaccccuacgagaacauccuguacaagaucugccugagcggggacggcuggcccuacaucgccucccgcaccagcaucacggggcgggcgugggagaacaccguggucgaccucgaguccgacggcaagccccagaaggccgggagcaacaacuccaacaagagccugcaguccgccggcuucaccgccggccugaccuacagccagcucaugacgcugaaggacgccaugcugcagcuggacccgaacgcgaagaccuggauggacaucgaggggcgccccgaggaccccguggagguggcccucuaccagcccuccagcggcugcuacauccacuucuuccgggagccgaccgaccugaagcaguucaagcaggacgccaaguacucccacgggaucgacgucaccgaccuguucgccgcccagcccggccucacgagcgcggugaucgacgcccugccccgcaacauggugaucacgugccaggggagcgacgacauccgcaagcugcucgagucccagggccggaaggacaucaagcugaucgacaucgcccugagcaagaccgacucccgcaaguacgagaacgccgucugggaccaguacaaggaccucugccacaugcacaccggcguggucguggagaagaagaagcgcgggggcaaggaggagaucaccccgcacugcgcgcugauggacugcaucauguucgacgccgccgugagcgggggccugaacaccuccguccuccgggccgugcugccccgggacaugguguuccgcaccagcacgccccgggucgugcuguga

SEQ ID NO: 8232 - RNA, 1710 nt, Artificial Sequence
  derived and/or modified CDS sequence (opt1) from LASV(G2392-SLE-2012;Clade IV)__AIT17281__NP
augagcgccuccaaggagaucaagagcuuccuguggacccagucccuccgccgggagcugagcggcuacugcuccaacaucaagcuccagguggucaaggacgcccaggcgcugcugcacgggcuggacuucagcgagguguccaacgugcagcgccucaugcggaaggagcgccgggacgacagcgaccugaagcgccugcgggaccucaaccaggccgucaacaaccugguggagcugaaguccacccagcagaaguccgugcuccgcgucggcacccugaccagcgacgaccugcucgugcuggccgccgaccuggagaagcucaagagcaaggugacccggaccgagcgcccccuguccgccggggucuacaugggcaaccugagcucccagcagcucgaccagcggcgcgcgcugcugagcaugaucgggauguccggcggcaaccagggggcccgggccggccgcgacgggguggugcggaucugggacgucaagaacgccgagcuccugaacaaccaguucggcacgaugccgagccugacccucgcgugccugaccaagcagggccagguggaccugaacgacgugguccaggcccucaccgaccuggggcugaucuacacggccaaguaccccaacaccuccgaccucgaccgccugacccagagccaccccauccugaacaugaucgacaccaagaaguccagccucaacaucagcggcuacaacuucucccugggggccgccgugaaggcgggcgccugcaugcuggacgggggcaacaugcucgagacgaucaaggugagcccccagaccauggacggcauccugaaguccauccugaaggucaagaaggcccucgggauguucaucagcgacaccccgggcgagcggaaccccuacgagaacauccuguacaagaucugccuguccggggacggcuggcccuacaucgccagccgcaccuccaucacggggcgggccugggagaacaccaucguggaccucgagagcgacggcaagccccagaagaccuccaccacgaacagcaacaagucccugcagagcgcgggcuucgccgccgggcugaccuacucccagcucaugacccugaaggacgccaugcugcagcuggacccgaacgccaagaccuggauggacaucgagggccgccccgaggaccccguggagaucgcgcucuaccagcccagcuccgggugcuacauccacuucuuccgggagccgacggaccugaagcaguucaagcaggacgccaaguacagccacggcaucgacgucaccgaccuguucgccgcccagcccgggcucaccuccgccgugaucgacacccugccccgcaacauggugaucacgugccagggcagcgaggacauccgccggcugcucgagagccagggccgcaaggacaucaagcugaucgacaucgcgcuguccaagaccgacagccggaaguacgagaacgccgucugggaccaguacaaggaccucugccacaugcacaccgggguggucguggagaagaagaagaagggcgggaaggaggagaucacgccccacugcgcccugauggacugcaucauguucgacgccgcgguguccggcgggcugaacaccagcguccuccgcgccgugcugccgcgggacaugguguuccgcaccuccacgccccgggucgugcuguga

SEQ ID NO: 8233 - RNA, 1710 nt, Artificial Sequence
  derived and/or modified CDS sequence (opt1) from LASV(G2405-SLE-2012;Clade IV)__AIT17285__NP
augagcgccuccaaggagaucaagagcuuccuguggacccagucccuccgccgggagcugagcggcuacugcuccaacaucaagcuccagguggucaaggacgcccaggcgcugcugcacgggcuggacuucagcgagguguccaacgugcagcgcagcaugcggaaggagcgccgggacgacaacgaccucaagcgccugcgggaccugaaccaggccgucaacaaccucguggagcugaaguccacccagcagaaguccauccugcgcgugggcacccucaccagcgacgaccugcugauccucgccgccgaccuggagaagcucaagagcaaggucacccggaccgagcgcccccuguccgccgggguguacaugggcaaccugagcucccagcagcuggaccagcggcgcgcgcuccugaacaugaucgggaugagcggcuccaaccagggcgcccgggccgggcgcgacggcgugguccgggugugggacgugaagaacgccgagcugcucaacaaccaguucgggacgaugccgagccugacccuggcgugccucaccaagcagggccaggucgaccugaacgacguggugcaggcccugaccgaccucgggcugaucuacacggccaaguaccccaacgccuccgaccuggaccgccucacccagagccaccccauccugaacaugaucgacaccaagaaguccagccugaacaucagcggcuacaacuucucccucggcgccgcggucaaggccggggccugcaugcuggacggcgggaacaugcuggagaccaucaaggugagcccccagacgauggacggcauccucaaguccauccugaaggugaagaaggcccugggcauguucaucagcgacaccccgggggagcggaaccccuacgagaacauccucuacaagaucugccuguccggcgacggguggcccuacaucgccagccgcaccuccaucaccggccgggcgugggagaacacgaucgucgaccuggagagcgacgggaagccccagaaggccggcaacaacggcuccaacaagagccuccaguccgccggguucaccgccggccugaccuacagccagcugaugacccucaaggacgccaugcugcagcuggacccgaacgcgaagacguggauggacaucgaggggcgccccgaggaccccguggagaucgcccuguaccagcccuccagcggcugcuacauccacuucuuccgggagccgaccgaccucaagcaguucaagcaggacgccaaguacucccacgggaucgacgugaccgaccuguucgccgcccagcccggccugaccagcgcggucaucgacgcccucccccgcaaccuggugaucacgugccagggcuccgacgacauccgcaagcugcucgagagccaggggcggaaggacaucaagcugaucgacaucgcccugagcaagaccgacucccgcaaguacgagaacgccgugugggaccaguacaaggaccucugccacaugcacaccggcaucgucguggagaagaagaagcgcgggggcaaggaggagaucacgccccacugcgcgcugauggacugcaucauguucgacgccgccgucagcgggggccugaacaccuccgugcuccgggccgugcugccgcgggacauggucuuccgcaccagcacgccccggguggugcuguga

SEQ ID NO: 8234 - RNA, 1710 nt, Artificial Sequence
  derived and/or modified CDS sequence (opt1) from LASV(G2427-SLE-2012;Clade IV)__AIT17289__NP
augagcgccuccaaggagaucaagagcuuccuguggacccagucccuccgccgggagcugagcggcuacugcuccaacaucaagcuccagguggucaaggacgcccaggcgcugcugcacgggcuggacuucagcgagguguccaacgugcagcgccucaugcggaaggagcgccgggacgacagcgaccugaagcgccugcgggaccucaaccaggccgucaacaaccugguggagcugaaguccacccagcagaaguccgugcuccgcgucggcacgcugaccagcgacgaccugcucgugcuggccgccgaccuggagaagcucaagagcaaggugacccggaccgagcgcccccuguccgccggggucuacaugggcaaccugagcucccagcagcucgaccagcggcgcgcgcugcugagcaugaucgggauguccggcggcaaccagggggugcgggccggccgcgacggggugguccggaucugggacgugaagaacgccgagcuccugaacaaccaguucggcacgaugccgagccugacccucgccugccugaccaagcagggccagguggaccugaacgacgucgugcaggcgcucaccgaccuggggcugaucuacacggccaaguaccccaacaccuccgaccucgaccgccugacccagagccaccccauccugaacaugaucgacaccaagaaguccagccucaacaucagcggcuacaacuucucccugggggccgccgugaaggccggcgcgugcaugcuggacgggggcaacaugcucgagacgaucaaggucagcccccagaccauggacggcauccugaaguccauccugaaggugaagaaggcccucgggauguucaucagcgacaccccgggcgagcggaaccccuacgagaacauccuguacaagaucugccuguccggggacggcuggcccuacaucgccagccgcaccuccaucacggggcgggccugggagaacaccaucguggaccucgagagcgacggcaagccccagaagaccggcuccaucaacagcaacaagucccugcagagcaccggguucgccgcgggccugacguacucccagcucaugacccugaaggacgccaugcugcagcuggacccgaacgccaagaccuggauggacaucgaggggcgccccgaggaccccgucgagaucgcccucuaccagcccagcuccggcugcuacauccacuucuuccgggagccgaccgaccugaagcaguucaagcaggacgccaaguacagccacgggaucgacgugacggaccuguucgcggcccagcccggccucaccuccgccgugaucgacgcccugccccgcaacauggucaucacgugccagggcagcgacgacauccgcaagcugcucgagagccaggggcggaaggacaucaagcugaucgacaucgcccuguccaagaccgacagccgcaaguacgagaacgcggugugggaccaguacaaggaccucugccacaugcacaccggcaucgucguggagaagaagaagcgcgggggcaaggaggagaucaccccgcacugcgcccugauggacugcaucauguucgacgccgccguguccgggggccugaacaccagcguccuccgggcggugcugccccgggacaugguguuccgcaccuccacgccccgggucgugcuguga

SEQ ID NO: 8235 - RNA, 1710 nt, Artificial Sequence
  derived and/or modified CDS sequence (opt1) from LASV(G2431-SLE-2012;Clade IV)__AIT17293__NP
augagcgccuccaaggagaucaagagcuuccuguggacccagucccuccgccgggagcugagcggcuacugcuccaacaucaagcuccagguggucaaggacgcccaggcgcugcugcacgggcuggacuucagcgagguguccaacgugcagcgccucaugcggaagcagcgccgggacgacaacgaccugaagcgccugcgggaccucaaccaggccgucaacaaccugguggagcugaaguccacccagcagaaguccgugcuccgcgucggcacgcugaccagcgacgaccugcucgugcuggccgccgaccuggagaagcucaaguccaaggugacccggaccgagcgcccccugagcgccggggucuacaugggcaaccuguccacgcagcagcucgaccagcggcgcgcgcugcugaacaugaucgggaugagcggcggcaaccagggggcccgggccggccgcgacgggguggugcgggucugggacgugaagaacgccgaccuccugaacaaccaguucggcaccaugccgucccugacccucgcgugccugaccaagcagggccagguggaccugaacgacgucgugcaggcccucacggaccuggggcugaucuacaccgccaaguaccccaacaccagcgaccucgaccgccugacccagucccaccccauccugaacaugaucgacacgaacaagagcucccucaacaucagcggcuacaacuucagccugggggccgccgugaaggcgggcgccugcaugcuggacgggggcaacaugcucgagaccaucaaggucagcccccagaccauggacggcauccucaagagcauccugaaggugaagaaggcccuggggauguucaucuccgacaccccgggcgagcggaaccccuacgagaacauccuguacaagaucugccugagcggggacggcuggcccuacaucgccucccgcacgagcaucaccgggcgggccugggagaacaccguggucgaccucgaguccgacggcaagccccagaaggcgggcgggaacaacagcaacaagucccugcagagcgccggcuucaccgccgggcugacguacucccagcucaugacccugaaggacgccaugcugcagcuggacccgaacgccaagaccuggauggacaucgagggccgccccgaggaccccguggagaucgcgcucuaccagcccagcuccgggugcuacauccacuucuuccgggagccgaccgaccugaagcaguucaagcaggacgccaaguacagccacggcaucgacgugacggaccuguucgccgcccagcccggccucaccuccgccgucaucgacgcgcugccccgcaacauggugaucacgugccaggggagcgacgacauccgcaagcugcucgagucccagggccggaaggacaucaagcugaucgacaucgcccugagcaagaccgacucccgcaaguacgagaacgccgucugggaccaguacaaggaccucugcaacaugcacaccgggaucgugguggagaagaagaagcggggcgggaaggaggagaucaccccgcacugcgcccugauggacugcaucauguucgacgcggccgucagcggcggcaugaacaccagcgugcugcgcgccgugcucccccgggacauggucuuccgcaccuccacgccccggguggugcuguga

SEQ ID NO: 8236 - RNA, 1710 nt, Artificial Sequence
  derived and/or modified CDS sequence (opt1) from LASV(G2511-SLE-2012;Clade IV)__AIT17295__NP
augagcgccuccaaggagaucaagagcuuccuguggacccagucccuccgccgggagcugagcggcuacugcuccaacaucaagcuccagguggucaaggacgcccaggcgcugcugcacgggcuggacuucagcgagguguccaacgugcagcgccucaugcggaaggagcgccgggacgacaacgaccugaagcgccugcgggaccucaaccaggccgucaacaaccugguggagcucaagagcacccagcagaaguccgugcugcgcgucggcacccugaccagcgacgaccugcucauccuggccgccgaccuggagaagcucaaguccaaggugauccggaccgagcgcccccugagcgccgggguguacaugggcaaccuguccagccagcagcucgaccagcggcgcgcgcugcugaacaugaucgggaugggcggcuccaaccagggggcccgggccggccgcgacggggucgugcgggugugggacgucaagaacgccgagcuccugaacaaccaguucggcaccaugccgagccugacgcucgcgugccugaccaagcagggccagguggaccugaacgacgccgugcaggcccucaccgaccuggggcugaucuacaccgccaaguaccccaacacguccgaccucgaccgccugacccagagccaccccauccugaacaugaucgacaccaagaaguccagccucaacaucagcggcuacaacuucucccugggggccgcggucaaggccggcgccugcaugcuggacgggggcaacaugcucgagaccaucaaggugagcccccagacgauggacggcauccugaaguccauccugaaggugaagaaggcccucgggauguucaucagcgacaccccgggcgagcggaaccccuacgagaacauccuguacaagaucugccuguccggggacggcuggcccuacaucgccagccgcaccuccaucaccgggcgggcgugggagaacacgaucgucgaccucgagagcgacggcaagccccagaaggccggcuccaacgggagcaacaagucccugcagagcgccggcuucaccgccgggcugaccuacucccagcucaugacccugaaggacgccaugcugcagcuggacccgaacgcgaagacguggauggacaucgagggccgccccgaggaccccguggagaucgcccucuaccagcccagcuccgggugcuacauccacuucuuccgggagccgaccgaccugaagcaguucaagcaggacgccaaguacagccacggcaucgacgugaccgaccuguucgccgcccagcccggccucaccuccgcgaucaucgacgcccugccccgcaacauggucaucacgugccaggggagcgacgacauccgcaagcugcucgagucccagggccggaaggacaucaagcugaucgacaucgcccugagcaagaccgacagccgcaaguacgagaacgccgugugggaccaguacaaggaccucugccacaugcacaccgggaucguggucgagaagaagaagcggggcgggaaggaggagaucacgccccacugcgcgcugauggacugcaucauguucgacgccgccguguccggcggccugaacaccagcguccuccgcgccgugcugccgcgggacaugguguuccgcaccuccacgccccgggucgugcuguga

SEQ ID NO: 8237 - RNA, 1710 nt, Artificial Sequence
  derived and/or modified CDS sequence (opt1) from LASV(G2554-SLE-2012;Clade IV)__AIT17299__NP
augagcgccuccaaggagaucaagagcuuccuguggacccagucccuccgccgggagcugagcggcuacugcuccaacaucaagcuccagguggucaaggacgcccaggcgcugcugcacgggcuggacuucagcgagguguccaacgugcagcgccucaugcggaaggagcgccgggacgacaacgaccugaagcgccugcgggaccucaaccaggccgucaacaaccugguggagcucaagagcacccagcagaaguccgugcugcgcgucggcacccugaccagcgacgaccugcucgugcuggccgccgaccuggagaagcucaaguccaaggugacccggaccgagcgcccccugagcgccggggucuacaugggcaaccuguccagccagcagcucgaccagcggcgcgcgcugcuguccaugaucgggaugagcggcggcaaccagggggcccggacgggccgcgacgggguggugcgggucugggacgugaagaacgccgagcuccugaacaaccaguucggcaccaugccgucccugacccucgccugccugaccaagcagggccagguggaccugaacgacgucgugcaggcgcucacggaccuggggcugaucuacaccgccaaguaccccaacaccagcgaccucgaccgccugacccagucccaccccauccugaacaugaucgacacgaagaaguccagccucaacaucuccggcuacaacuucagccugggggccgccgugaaggccggcgcgugcaugcuggacgggggcaacaugcucgagaccaucaaggucagcccccagaccauggacggcauccucaagagcauccugaaggugaagaaggcccuggggauguucaucuccgacaccccgggcgagcggaaccccuacgagaacauccuguacaagaucugccugagcggggacggcuggcccuacaucgccucccgcacgagcaucaccgggcgggccugggagaacaccguggucgaccucgaguccgacggcaagccccagaaggccggcagcaacaacuccaacaagagccugcaguccgcgggguucaccgccggccugacguacagccagcucaugacccugaaggacgccaugcugcagcuggacccgaacgccaagaccuggauggacaucgaggggcgccccgaggaccccguggagaucgcccucuaccagcccuccagcggcugcuacauccacuucuuccgggagccguccgaccugaagcaguucaagcaggacgcgaaguacagccacgggaucgacgugaccgaccuguucgccgcccagcccggccucacguccgccgucaucgacgcccugccccgcaacauggugaucacgugccagggcagcgacgacauccgcaagcuguucgagagccaggggcggaaggacaucaagcucaucgacaucgcgcuguccaagaccgacagccgcaaguacgagaacgccgucugggaccaguacaaggaccugugccacaugcacaccggcgugguggucgagaagaagaagcgcgggggcaaggaggagaucaccccgcacugcgcccucauggacugcaucauguucgacgccgcgguguccgggggccugaacagccuggugcuccgggccguccugccccgggacaugguguuccgcaccuccacgccccgggugguccuguga

SEQ ID NO: 8238 - RNA, 1710 nt, Artificial Sequence
  derived and/or modified CDS sequence (opt1) from LASV(G2557-SLE-2012;Clade IV)__AIT17303__NP
augagcgccuccaaggagaucaagagcuuccuguggacccagucccuccgccgggagcugagcggcuacugcuccaacaucaagcuccagguggucaaggacgcccaggcgcugcugcacgggcuggacuucagcgagguguccaacgugcagcgccucaugcggaagcagcgccgggacgacagcgaccugaagcgccugcgggaccucaaccaggccgucaacaaccugguggagcugaaguccacccagcagaaguccgugcuccgcgucggcacgcugaccagcgacgaccugcucgugcuggccgccgaccuggagaagcucaagagcaaggugauccggaccgagcgcccccuguccagcggggucuacaugggcaaccuguccagccagcagcucgaccagcggcgcgcccugcugaacaugaucgggauguccggcggcaaccagggggcccaggugggccgggacggggugguccgcgugugggacgugaagaacgcggaccuccugaacaaccaguucggcaccaugccgagccugacgcucgccugccugaccaagcaggggcaggucgaccugaacgacguggugcaggcccucaccgaccugggccugaucuacaccgcgaaguaccccaacacguccgaccucgaccggcugguccagagccaccccauccugaacaugaucgacaccaagaaguccagccucaacaucagcggcuacaacuucucccugggggccgccgugaaggccggcgccugcaugcuggacgggggcaacaugcucgagaccaucaaggugagcccccagaccauggacggcauccugaaguccauccugaaggucaagaaggcgcucgggauguucaucagcgagacgccgggcgagcgcaaccccuacgagaacauccuguacaagaucugccuguccggggacggcuggcccuacaucgccagccggaccuccaucaccgggcgcgccugggagaacaccaucguggaccucgagagcgacggcaagccccagaaggccggcuccaacaacagcaacaagucccugcagagcgccggguucacggcgggccugaccuacucccagcucaugacccugaaggacagcaugcugcagcuggacccgaacgccaagaccuggauggacaucgaggggcggcccgaggaccccguggaggucgcccucuaccagcccuccagcggcugcuacauccacuucuuccgcgagccgacggaccugaagcaguucaagcaggacgccaaguacucccacgggaucgacgugaccgaccuguucgccgcgcagcccggccucaccagcgccgucaucgaggcccugccccggaacauggugaucacgugccagggcagcgacgacauccgcaagcugcucgagucccaggggcgcaaggacaucaagcugaucgacaucgcccugaacaagaccgacagccggaaguacgagaacgccgugugggaccaguacaaggaccucugccacaugcacaccggcgucgugguggagaagaagaagcgcgggggcaaggaggagaucacgccccacugcgcgcugauggacugcaucauguucgacgccgccgucuccgggggccugaagacccucgugcugcgggccgugcugccgcgcgacauggucuuccggaccagcacccccaagguggugcucuga

SEQ ID NO: 8239 - RNA, 1710 nt, Artificial Sequence
  derived and/or modified CDS sequence (opt1) from LASV(G2565-SLE-2012;Clade IV)__AIT17307__NP
augagcgccuccaaggagaucaagagcuuccuguggacccagucccuccgccgggagcugagcggcuacugcuccaacaucaagcuccagguggucaaggacgcccaggcgcugcugcacgggcuggacuucagcgagguguccaacgugcagcgccucaugcggaaggagcgccgggacgacaacgaccugaagcgccugcgggaccucaaccaggccgucaacaaccugguggagcucaagagcacccagcagaaguccgugcugcgcgucggcacgcugaccagcgacgaccugcucauccuggccgccgaccuggagaagcucaaguccaaggugacccggaccgagcgcccccugagcgccgggguguacaugggcaaccuguccagccagcagcucgaccagcggcgcgcgcugcuguccaugaucgggaugagcggcggcaaccagggggcccggacgggccgcgacggggucgugcgggugugggacgucaagaacgccgagcuccugaacaaccaguucggcaccaugccgucccugacccucgccugccugaccaagcagggccagguggaccugaacgacgugguccaggcgcucacggaccuggggcugaucuacaccgccaaguaccccaacaccagcgaccucgaccgccugacccagucccaccccauccugaacaugaucgacacgaagaaguccagccucaacaucuccggcuacaacuucagccugggggccgccgugaaggccggcgcgugcaugcuggacgggggcaacaugcucgagaccaucaaggugagcccccagaccauggacggcauccucaagagcauccugaaggucaagaaggcccuggggauguucaucuccgacaccccgggcgagcggaaccccuacgagaacauccuguacaagaucugccugagcggggacggcuggcccuacaucgccucccgcacgagcaucaccgggcgggccugggagaacaccgugguggaccucgaguccgacggcaagcugcagaagaccggcagcaacaacuccaacaagagccugcaguccgccggguucacggcgggccucaccuacagccagcugaugacccugaaggacgccaugcugcagcucgaccccaacgccaagaucuggauggacaucgaggggcgcccggaggaccccgucgagaucgcccuguaccagcccuccagcggcugcuacauccacuucuuccgggagcccaccgaccugaagcaguucaagcaggacgccaaguacucccacgggaucgacgugacggaccucuucgcggcccagccgggccugaccagcgccgugaucgacgcccugccccgcaacauggucaucacgugccagggcuccgacgacauccgcaagcuccuggagagccaggggcggaaggacaucaagcugaucgacaucgcccucaacaagaccgacagccgcaaguacgagaacgcggugugggaccaguacaaggaccugugccacaugcacaccggcgucgugguggagaagaagaagaagggcgggaaggaggagaucacgccccacugcgcccugauggacugcaucauguucgacgccgccgucuccgggggccucaacaccagcgugcugcgggcggugcugccccgcgacauggucuuccggaccuccaccccgcgcguggugcucuga

SEQ ID NO: 8240 - RNA, 1710 nt, Artificial Sequence
  derived and/or modified CDS sequence (opt1) from LASV(G2587-SLE-2012;Clade IV)__AIT17311__NP
augagcgccuccaaggagaucaagagcuuccuguggacccagucccuccgccgggagcugagcggcuacugcuccaacaucaagcuccagguggucaaggacgcccaggcgcugcugcacgggcuggacuucagcgagguguccaacgugcagcgccucaugcggaaggagcgccgggacgacaacgaccugaagcgccugcgggaccucaaccaggccgucaacaaccugguggagcucaagagcacccagcagaaguccgugcugcgcgucggcacccugaccagcgacgaccugcucauccuggccgccgaccuggagaagcucaaguccaaggugauccggaccgagcgcccccugagcgccgggguguacaugggcaaccuguccagccagcagcucgaccagcggcgcgcgcugcugaacaugaucgggaugggcggcuccaaccagggggcccgggccggccgcgacggggucgugcgggugugggacgucaagaacgccgagcuccugaacaaccaguucggcaccaugccgagccugacgcucgcgugccugaccaagcagggccagguggaccugaacgacgccgugcaggcccucaccgaccuggggcugaucuacaccgccaaguaccccaacacguccgaccucgaccgccugacccagagccaccccauccugaacaugaucgacaccaagaaguccagccucaacaucagcggcuacaacuucucccugggggccgcggucaaggccggcgccugcaugcuggacgggggcaacaugcucgagaccaucaaggugagcccccagacgauggacggcauccugaaguccauccugaaggugaagaaggcccucgggauguucaucagcgacaccccgggcgagcggaaccccuacgagaacauccuguacaagaucugccuguccggggacggcuggcccuacaucgccagccgcaccuccaucaccgggcgggcgugggagaacacggucguggaccucgagagcgacggcaagccccagaaggccggcuccaacgggagcaacaagucccugcagagcgccggcuucaccgccgggcugaccuacucccagcucaugacccugaaggacgccaugcugcagcuggacccgaacgcgaagacguggauggacaucgagggccgccccgaggaccccguggaggucgcccucuaccagcccagcuccgggugcuacauccacuucuuccgggagccgaccgaccugaagcaguucaagcaggacgccaaguacagccacggcaucgacgugaccgaccuguucgccgcccagcccggccucaccuccgcggugaucgacgcccugccccgcaacauggucaucacgugccaggggagcgacgacauccgcaagcugcucgagucccagggccggaaggacaucaagcugaucgacaucgcccugagcaagaccgacagccgcaaguacgagaacgccgugugggaccaguacaaggaccucugccacaugcacaccgggaucgucguggagaagaagaagcggggcgggaaggaggagaucacgccccacugcgcgcugauggacugcaucauguucgacgccgccguguccggcggccugaacaccagcguccuccgcgccgugcugccgcgggacaugguguuccgcaccuccacgccccgggucgugcuguga

SEQ ID NO: 8241 - RNA, 1710 nt, Artificial Sequence
  derived and/or modified CDS sequence (opt1) from LASV(G2612-SLE-2012;Clade IV)__AIT17315__NP
augagcgccuccaaggagaucaagagcuuccuguggacccagucccuccgccgggagcugagcggcuacugcuccaacaucaagcuccagguggucaaggacgcccaggcgcugcugcacgggcuggacuucagcgagguguccaacgugcagcgccucaugcggaaggagcgccgggacgacaacgaccugaagcgccugcgggaccucaaccaggccgucaacaaccugguggagcucaagagcacccagcagaaguccgugcugcgcgucggcacccugaccagcgacgaccugcucauccuggccgccgaccuggagaagcucaaguccaaggugacccggaccgagcgcccccugagcgccgggguguacaugggcaaccuguccagccagcagcucgaccagcggcgcgcgcugcugaacaugaucgggauguccggcagcaaccagggcgcccgggccgggcgcgacggcgucgugcgggugugggacgucaagaacguggagcuccugaacaaccaguucgggacgaugccgucccugacccucgccugccugaccaagcagggccagguggaccugaacgacgcgguccaggcccucaccgaccuggggcugaucuacacggccaaguaccccaacaccagcgaccucgaccgccugacccagucccaccccauccugaacaugaucgacaccaagaaguccagccucaacaucuccggcuacaacuucagccugggcgccgccgugaaggcgggggccugcaugcuggacggcgggaacaugcucgagacgaucaaggugagcccccagaccauggacggcauccucaagagcauccugaaggucaagaaggcccugggcauguucaucuccgacaccccgggggagcggaaccccuacgagaacauccuguacaagaucugccugagcggcgacggguggcccuacaucgccucccgcaccagcaucacgggccgggccugggagaacaccgugguggaccucgaguccgacgggaagccccagaaggcgggcagcaacuccagcaacaagucccugcagagcgccggcuucaccgccgggcugaccuacucccagcucaugacgcugaaggacgccaugcugcagcuggacccgaacgccaagaccuggauggacaucgagggccgccccgaggaccccgucgagaucgcgcucuaccagcccagcuccgggugcuacauccacuucuuccgggagccgaccgaccugaagcaguucaagcaggacgccaaguacagccacggcaucgacgugaccgaccuguucgccgcccagcccgggcucacguccgccgugaucgacgcgcugccccgcaacauggucaucacgugccagggcagcgacgacauccgcaagcugcucgagagccagggccggaaggacaucaagcugaucgacaucgcccuguccaagaccgacagccgcaaguacgagaacgccgugugggaccaguacaaggaccucugccacaugcacaccgggaucgucguggagaagaagaagaagggcuccaaggaggagaucaccccgcacugcgcccugauggacugcaucauguucgacgcggccgugagcgggggccugaacgccuccguccuccgggccgugcugccccgcgacaugguguuccggaccagcacgccccgcgucgugcuguga

SEQ ID NO: 8242 - RNA, 1710 nt, Artificial Sequence
  derived and/or modified CDS sequence (opt1) from LASV(G2615-SLE-2012;Clade IV)__AIT17319__NP
augagcgccuccaaggagaucaagagcuuccuguggacccagucccuccgccgggagcugagcggcuacugcuccaacaucaagcuccagguggucaaggacgcccaggcgcugcugcacgggcuggacuucagcgagguguccaacgugcagcgccucaugcggaagcagcgccgggacgacagcgaccugaagcgccugcgggaccucaaccaggccgucaacaaccugguggagcugaaguccacccagcagaaguccgugcuccgcgucggcacgcugaccagcgacgaccugcucgugcuggccgccgaccuggagaagcucaagagcaaggugauccggaccgagcgcccccuguccagcggggucuacaugggcaaccuguccagccagcagcucgaccagcggcgcgcccugcugaacaugaucgggauguccggcggcaaccagggggcccaggugggccgggacggggugguccgcgugugggacgugaagaacgcggacaugcucaacaaccaguucggcaccaugccgagccugacgcuggccugccucaccaagcaggggcaggucgaccugaacgacguggugcaggcccugaccgaccucggccugaucuacaccgcgaaguaccccaacacguccgaccuggaccggcucgcccagagccaccccauccugaacaugaucgacaccaagaaguccagccugaacaucagcggcuacaacuucucccucggggccgccgucaaggccggcgcgugcaugcuggacgggggcaacaugcuggagaccaucaaggugagcccccagaccauggacggcauccucaaguccauccugaaggugaagaaggcccuggggauguucaucagcgagacgccgggcgagcgcaaccccuacgagaacauccucuacaagaucugccuguccggggacggcuggcccuacaucgccagccggaccuccaucaccgggcgcgccugggagaacaccaucgucgaccuggagagcgacggcaagccccagaaggccggcuccaacaacagcaacaagucccuccagagcgcgggguucacggccggccugaccuacucccagcugaugacccucaaggacagcaugcugcagcuggacccgaacgccaagaccuggauggacaucgaggggcggcccgaggaccccguggagguggcccuguaccagcccuccagcggcugcuacauccacuucuuccgcgagccgacggaccucaagcaguucaagcaggacgccaaguacucccacgggaucgacgucaccgaccuguucgcggcccagcccggccugaccagcgccgugaucgaggcccucccccggaacauggucaucacgugccagggcagcgacgacauccgcaagcugcuggagucccaggggcgcaaggacaucaagcucaucgacaucgugcugaacaagaccgacagccggaaguacgagaacgccgugugggaccaguacaaggaccugugccacaugcacaccggcgucgugguggagaagaagaagcgcgggggcaaggaggagaucacgccccacugcgcgcucauggacugcaucauguucgacgccgccgucuccgggggccugaagaccauggugcugcgggccgugcucccgcgcgacauggucuuccggaccagcacccccaagguggugcuguga

SEQ ID NO: 8243 - RNA, 1710 nt, Artificial Sequence
  derived and/or modified CDS sequence (opt1) from LASV(G2723-SLE-2012;Clade IV)__AIT17323__NP
augagcgccuccaaggagaucaagagcuuccuguggacccagucccuccgccgggagcugagcggcuacugcuccaacaucaagcuccagguggucaaggacgcccaggcgcugcugcacgggcuggacuucagcgagguguccaacgugcagcgccucaugcggaagcagcgccgggacgacagcgaccugaagcgccugcgggaccucaaccaggccgucaacaaccugguggagcugaaguccacccagcagaaguccgugcuccgcgucggcacgcugaccagcgacgaccugcucgugcuggccgccgaccuggagaagcucaagagcaaggugauccggaccgagcgcccccuguccagcggggucuacaugggcaaccuguccagccagcagcucgaccagcggcgcgcccugcugaacaugaucgggauguccggcggcaaccagggggcccaggugggccgggacggggugguccgcgugugggacgugaagaacgcggaccuccugaacaaccaguucggcaccaugccgagccugacgcucgccugccugaccaagcaggggcaggucgaccugaacgacguggugcaggcccucaccgaccugggccugaucuacaccgcgaaguaccccaacacguccgaccucgaccggcuggcccagagccaccccauccugaacaugaucgacaccaagaaguccagccucaacaucagcggcuacaacuucucccugggggccgccgucaaggccggcgcgugcaugcuggacgggggcaacaugcucgagaccaucaaggugagcccccagaccauggacggcauccugaaguccauccugaaggugaagaaggcccucgggauguucaucagcgagacgccgggcgagcgcaaccccuacgagaacauccuguacaagaucugccuguccggggacggcuggcccuacaucgccagccggaccuccaucaccgggcgcgccugggagaacaccaucgucgaccucgagagcgacggcaagccccagaaggccggcuccaacaacagcaacaagucccugcagagcgcgggguucacggccggccugaccuacucccagcucaugacccugaaggacagcaugcugcagcuggacccgaacgccaagaccuggauggacaucgaggggcggcccgaggaccccguggagguggcccucuaccagcccuccagcggcugcuacauccacuucuuccgcgagccgacggaccugaagcaguucaagcaggacgccaaguacucccacgggaucgacgucaccgaccuguucgcggcccagcccggccucaccagcgccgugaucgaggcccugccccggaacauggucaucacgugccagggcagcgacgacauccgcaagcugcucgagucccaggggcgcaaggacaucaagcugaucgacaucgcccugaacaagaccgacagccggaaguacgagaacgcggugugggaccaguacaaggaccucugccacaugcacaccggcguggucguggagaagaagaagcgcgggggcaaggaggagaucacgccccacugcgcccugauggacugcaucauguucgacgccgccguguccgggggccugaagacccucguccugcgggcggugcugccgcgcgacaugguguuccggaccagcacccccaaggucgugcucuga

SEQ ID NO: 8244 - RNA, 1710 nt, Artificial Sequence
  derived and/or modified CDS sequence (opt1) from LASV(G2789-SLE-2012;Clade IV)__AIT17325__NP
augagcgccuccaaggagaucaagagcuuccuguggacccagucccuccgccgggagcugagcggcuacugcuccaacaucaagcuccagguggucaaggacgcccaggcgcugcugcacgggcuggacuucagcgagguguccaacgugcagcgccucaugcggaagcagcgccgggacgacaacgaccugaagcgccugcgggaccucaaccaggccgucaacaaccugguggagcucaagagcacccagcagaaguccgugcugcgcgucggcacgcugaccagcgacgaccugcucgugcuggccgccgaccuggagaagcucaaguccaaggugacccggaccgagcgcccccugagcgccggggucuacaugggcaaccuguccagccagcagcucgaccagcggcgcgcgcugcugaacaugaucgggaugacgggcggcucccgcggggcccaggccggcggggacggcguggugcgggucugggacgugaagaacgccgaccuccugaacaaccaguucgggaccaugccgagccugacccucgcgugccugaccaagcagggccagguggaccugaacgacgucgugcaggcccucacggaccugggccugaucuacaccgccaaguaccccaacaccuccgaccucgaccggcugacccagagccaccccauccugaacaugaucgacacgaagaaguccagccucaacaucagcggguacaacuucucccugggcgccgccgugaaggcgggggccugcaugcuggacggcggcaacaugcucgagaccaucaaggucagcccccagaccauggacgggauccugaaguccauccugaaggugaagaagucccucggcauguucaucagcgacaccccgggggagcgcaaccccuacgagaacauccuguacaagaucugccugagcggcgacggguggcccuacaucgccucccggacgagcaucaccggccgcgccugggagaacaccguggucgaccucgaguccgacggcaagccccagaaggccgggggcaacaacagcaacaagucccugcagagcgcgggguucaccgccggccugacguacucccagcucaugacccugaaggacaccaugcugcagcuggacccgaacgccaagaccuggauggacaucgaggggcggcccgaggaccccguggagguggcccucuaccagcccagcuccggcugcuacauccacuucuuccgcgagccgacggaccugaagcaguucaagcaggacgccaaguacagccacggcaucgacgucaccgaccuguucgcggcccagcccgggcucaccuccgccgugaucgaggcccugccccggaacauggucaucacgugccagggcagcgacgacauccgcaagcugcucgagucccaggggcgcaaggacaucaagcugaucgacaucgcccugagcaagguggacagccggaaguacgagaacgcggugugggaccaguacaaggaccucugccacaugcacaccggcgucgugguggagaagaagaagcgcgggggcaaggaggagaucacgccccacugcgcccugauggacugcaucauguucgacgccgccgucuccggcgggcugaacacccucgugcugcgggcggugcugccgcgcgacauggucuuccggaccagcacccccaagguggugcucuga

SEQ ID NO: 8245 - RNA, 1710 nt, Artificial Sequence
  derived and/or modified CDS sequence (opt1) from LASV(G2868-SLE-2012;Clade IV)__AIT17329__NP
augagcgccuccaaggagaucaagagcuuccuguggacccagucccuccgccgggagcugagcggcuacugcuccaacaucaagcuccagguggucaaggacgcccaggcgcugcugcacgggcuggacuucagcgagguguccaacgugcagcgccucaugcggaaggagcgccgggacgacagcgaccugaagcgccugcgggaccucaaccagaccgucaacaaccugguggagcugaaguccacccagcagaaguccauccuccgcgugggcacccugaccagcgacgaccugcucauccuggccgccgaccuggagaagcucaagagcaaggucauccggaccgagcgcccccuguccgccgggguguacaugggcaaccugagcucccagcagcucgaccagcggcgcgcccugcugaacaugaucgggaugagcuccggcaaccagggcgcgcaggccgggcgggacggcgugguccgcgugugggacgugaagaacgccgagcuccugaacaaccaguucgggacgaugccgagccugacccucgccugccugaccaagcagggccaggucgaccugaacgacgcggugcaggcccucaccgaccuggggcugaucuacacggccaaguaccccaacaccuccgaccucgaccggcugacccagagccaccccauccugaacaugaucgacaccaagaaguccagccucaacaucagcggcuacaacuucucccugggcgccgccgugaaggcgggggccugcaugcuggacggcgggaacaugcucgagacgaucaaggucagcccccagaccauggacggcauccugaaguccauccugaaggugaagaaggcccucggcauguucaucagcgacaccccgggggagcgcaaccccuacgagaacauccuguacaagaucugccuguccggcgacggguggcccuacaucgccagccggaccuccaucacgggccgcgccugggagaacaccguggucgaccucgagagcgacgggaugccccagaaggcgggcuccagcuccagcaacaagucccugcagagcgccggcuucguggccgggcugaccuacucccagcucaugacccugaaggacgccaugcugcagcuggacccgaacgccaagacguggauggacaucgagggccggcccgaggaccccguggagaucgcgcucuaccagcccagcuccgggugcuacauccacuucuuccgcgagccgaccgaccugaagcaguucaagcaggacgccaaguacagccacggcaucgacgucaccgaccuguucgccgcccagcccgggcucaccagcgccgugaucgacgcgcugccccggaacauggugaucacgugccagggcuccgacgacauccgcaagcugcucgagagccagggccgcaaggacaucaagcugaucgacaucgcccuguccaaggccgacagccggaaguacgagaacgccgucugggaccaguacaaggaccucugccacaugcacaccgggguggucguggagaagaagaagcgcggcgggaaggaggagaucacgccccacugcgcgcugauggacugcaucauguacgacgccgccguguccggcgggcugaacaccagcguccuccgggccgugcugccgcgcgacaugguguuccggaccuccacgccccgcgucgugcuguga

SEQ ID NO: 8246 - RNA, 1710 nt, Artificial Sequence
  derived and/or modified CDS sequence (opt1) from LASV(G2903-SLE-2012;Clade IV)__AIT17333__NP
augagcgccuccaaggagaucaagagcuuccuguggacccagucccuccgccgggagcugagcggcuacugcuccaacaucaagcuccagguggucaaggacgcccaggcgcugcugcacgggcuggacuucagcgagguguccaacgugcagcgccucaugcggaaggagcgccgggacgacaacgaccugaagcgccugcgggaccucaaccaggccgucaacaaccugguggagcucaagagcacccagcagaaguccgugcugcgcgucggcacccugaccagcgacgaccugcucauccuggccgccgaccuggagaagcucaaguccaaggugacccggaccgagcgcccccugagcgccgggguguacaugggcaaccuguccagccagcagcucgaccagcggcgcgcgcugcugaacaugaucgggauguccggcggcaaccagggggcccgggccggccgcgacggggucgugcgggugugggacgucaagaacgccgagcuccugaacaaccaguucggcacgaugccgagccugacccucgcgugccugaccaagcagggccagguggaccugaacgacgccgugcaggcccucaccgaccuggggcugaucuacacggccaaguaccccaacaccuccgaccucgaccgccugacccagagccaccccauccugaacaugaucgacaccaagaaguccagccucaacaucagcggcuacaacuucucccugggggccgcggucaaggccggcgccugcaugcuggacgggggcaacaugcucgagacgaucaaggugagcccccagaccauggacuccauccucaagagcauccugaaggugaagaaggcccugggcauguucaucuccgacaccccgggggagcggaaccccuacgagaacauccuguacaagaucugccugagcggcgacggguggcccuacaucgccucccgcaccagcaucacgggccgggcgugggagaacaccgucguggaccucgaguccgacgggaagccccagaaggccggcagcaacaacuccaacaagagccugcaguccgccggcuucgccgccgggcugaccuacagccagcucaugacccugaaggacgcgaugcugcagcuggacccgaacgccaagacguggauggacaucgagggccgccccgaggaccccguggagaucgcccucuaccagcccuccagcgggugcuacauccacuucuuccgggagccgaccgaccugaagcaguucaagcaggacgccaaguacucccacggcaucgacgucaccgaccuguucgccgcgcagcccgggcucaccagcgccgugaucgacgcccugccccgcaacauggugaucacgugccagggcuccgacgacauccgcaagcugcucgagagccagggccggaaggacaucaagcugaucgacaucgcccugagcaagaccgacucccgcaaguacgagaacgcggucugggaccaguacaaggaccucugccacaugcacaccgggaucguggucgagaagaagaagcggggcgggaaggaggagaucacgccccacugcgcccugauggacugcaucauguucgacgccgccgugagcggcgggcugaacaccuccgugcuccgcgccguccugccgcgggacaugguguuccgcaccagcacgccccgggugguccuguga

SEQ ID NO: 8247 - RNA, 1710 nt, Artificial Sequence
  derived and/or modified CDS sequence (opt1) from LASV(G2906-SLE-2012;Clade IV)__AIT17335__NP
augagcgccuccaaggagaucaagagcuuccuguggacccagucccuccgccgggagcugagcggcuacugcuccaacaucaagcuccagguggucaaggacgcccaggcgcugcugcacgggcuggacuucagcgagguguccaacgugcagcgccucaugcggaaggagcgccgggacgacagcgaccugaagcgccugcgggaccucaaccaggccgucaacaaccugguggagcugaaguccacccagcagaaguccauccuccgcgugggcacccugaccuccgacgaccugcucauccuggccgccgaccuggagaagcucaagagcaaggucacccggaccgagcgcccccuguccgccgggguguacaugggcaaccugagcucccagcagcucgaccagcggcgcgcgcugcugagcaugaucgggauguccagcggcgugcagggcgcccgggccgggcgcgacggcgucgugcgggugugggacgucaagaacgccgagcuccugaacaaccaguucgggacgaugccgucccugacccucgcgugccugaccaagcagggccagguggaccugaacgacgugguccaggcccucaccgaccuggggcugaucuacacggccaaguaccccaacaccagcgaccucgaccgccugacccagagccaccccauccugaacaugaucgacaccaagaaguccagccucaacaucuccggcuacaacuucagccugggcgccgccgugaaggcgggggccugcaugcuggacggcgggaacaugcucgagacgaucaaggugagcccccagaccauggacggcauccucaagagcauccugaaggucaagaaggcccugggcauguucaucuccgagaccccgggggagcggaaccccuacgagaacauccuguacaagaucugccugagcggcgacggguggcccuacaucgccucccgcaccagcaucacgggccgggccugggagaacaccgugguggaccucgaguccgacgggaagccccagaaggcgggcagcaacaacuccaacaagagccugcaguccaccggcuucgccgccgggcugaccuacagccagcucaugacgcugaaggacgccaugcugcagcuggacccgaacgccaagaccuggauggacaucgagggccgccccgaggaccccgucgagguggcgcucuaccagcccuccagcgggugcuacauccacuucuuccgggagccgaccgaccugaagcaguucaagcaggacgccaaguacucccacggcaucgacgugaccgaccuguucgccgcccagcccgggcucacgagcgccgucaucgacgcgcugccccgcaacauggugaucacgugccagggcagcgacgacaucaagaagcugcucgagucccagggccgcaaggacaucaagcugaucgacaucgcccugagcaagaccgacucccggaaguacgagaacgccgucugggaccaguacaaggaccucugccacaugcacaccggggugguggucgagaagaagaagcgcggcgggaaggaggagaucaccccgcacugcgcccugauggacugcaucauguucgacgcggccgugagcggcgggcugaacaccuccgugcuccgggccguccugccccgcgacaugguguuccggaccagcacgccccgcgugguccuguga

SEQ ID NO: 8248 - RNA, 1710 nt, Artificial Sequence
  derived and/or modified CDS sequence (opt1) from LASV(G2944-SLE-2012;Clade IV)__AIT17341__NP
augagcgccuccaaggagaucaagagcuuccuguggacccagucccuccgccgggagcugagcggcuacugcuccaacaucaagcuccagguggucaaggacgcccaggcgcugcugcacgggcuggacuucagcgagguguccaacgugcagcgccucaugcggaaggagcgccgggacgacaacgaccugaagcgccugcgggaccucaaccaggccgucaacaaccugguggagcucaagagcacccagcagaaguccauccugcgcgugggcacccugaccagcgacgaccugcucauccuggccgccgaccuggagaagcucaaguccaaggucacccggaccgagcgcccccugagcgccgggguguacaugggcaaccuguccagccagcagcucgaccagcggcgcgcgcugcugaacaugaucgggauguccggcggcaaccagggggcccgggccggccgcgacggggugguccgggugugggacgugaagaacgccgagcuccugaacaaccaguucggcacgaugccgagccugacccucgcgugccugaccaagcaggggcaggucgaccugaacgacgccgugcaggcccucaccgaccugggccugaucuacacggccaaguaccccaacaccuccgaccucgaccgccugacccagagccaccccauccugaacaugaucgacaccaagaaguccagccucaacaucagcggcuacaacuucucccugggggccgcggugaaggccggcgccugcaugcuggacgggggcaacaugcucgagacgaucaaggucagcccccagaccauggacggcauccugaaguccauccugaaggugaagaaggcccucgggauguucaucagcgacgccccgggcgagcggaaccccuacgagaacauccuguacaagaucugccuguccggggacggcuggcccuacaucgcgagccgcaccuccaucaccgggcgggccugggagaacacgguggucgaccucgagagcgacggcaagccccagaaggccggcuccaacgggagcaacaagucccugcagagcgccggcuucaccgccgggcugaccuacucccagcucaugacccugaaggacgcgaugcugcagcuggacccgaacgccaagacguggauggacaucgagggccgccccgaggaccccguggagaucgcccucuaccagcccagcuccgggugcuacauccacuucuuccgggagccgaccgaccugaagcaguucaagcaggacgccaaguacagccacggcaucgacgugaccgaccuguucgccgcgcagcccggccucaccuccgccgucaucgacgcccugccccgcaacauggugaucacgugccaggggagcgacgacauccgcaagcuguucgagucccagggccggaaggacaucaagcucaucgacaucgcccugagcaaggcggacagccgcaaguacgagaacgccgugugggaccaguacaaggaccugugccacaugcacaccggggucguggucgagaagaagaagcggggcgggaaggaggagaucacgccccacugcgcccucauggacugcaucauguucgacgccgccguguccggcggccugaacaccagcgugcugcgcgcgguccucccgcgggacaugguguuccgcaccuccacgccccgggugguccuguga

SEQ ID NO: 8249 - RNA, 1710 nt, Artificial Sequence
  derived and/or modified CDS sequence (opt1) from LASV(G3010-SLE-2013;Clade IV)__AIT17345__NP
augagcgccuccaaggagaucaagagcuuccuguggacccagucccuccgccgggagcugagcggcuacugcuccaacaucaagcuccagguggucaaggacgcccaggcgcugcugcacgggcuggacuucagcgagguguccaacgugcagcgccucaugcggaaggagcgccgggacgacaacgaccugaagcgccugcgggaccucaaccaggccgucaacaaccugguggagcucaagagcacccagcagaaguccauccugcgcgugggcacccugaccagcgacgaccugcucauccuggccgccgaccuggagaagcucaaguccaaggucacccggaccgagcgcccccugagcgccgggguguacaugggcaaccuguccagccagcagcucgaccagcggcgcgcgcugcuguccaugaucgggaugagcuccggcgugcagggcgcccgggccgggcgcgacggcgucgugcgggugugggacgucaagaacgccgagcuccugaacaaccaguucgggacgaugccgagccugacccucgcgugccugaccaagcagggccagguggaccugaacgacgugguccaggcccucaccgaccuggggcugaucuacacggccaaguaccccaacaccuccgaccucgaccgccugacccagagccaccccauccugaacaugaucgacaccaagaaguccagccucaacaucagcggcuacaacuucucccugggcgccgccgugaaggcgggggccugcaugcuggacggcgggaacaugcucgagacgaucaaggugagcccccagaccauggacggcauccugaaguccauccugaaggucaagaaggcccucggcauguucaucagcgagaccccgggggagcggaaccccuacgagaacauccuguacaagaucugccuguccggcgacggguggcccuacaucgccagccgcaccuccaucacgggccgggccugggagaacaccgugguggaccucgagagcgacgggaagccccagaaggcgggcuccaacaacagcaacaagucccugcagagcgccggcuucaccgccgggcugaccuacucccagcucaugacgcugaaggacgccaugcugcagcuggacccgaacgccaagaccuggauggacaucgagggccgccccgaggaccccgucgagguggcgcucuaccagcccagcuccgggugcuacauccacuucuuccgggagccgaccgaccugaagcaguucaagcaggacgccaaguacagccacggcaucgacgugaccgaccuguucgccgcccagcccgggcucacguccgccgucaucgacgcgcugccccgcaacauggugaucacgugccagggcagcgacgacaucaagaagcugcucgagagccagggccgcaaggacaucaagcugaucgacaucgcccuguccaagaccgacagccggaaguacgagaacgccgucugggaccaguacaaggaccucugccacaugcacaccggggugguggucgagaagaagaagcgcggcgggaaggaggagaucaccccgcacugcgcccugauggacugcaucauguucgacgcggccguguccggcgggcugaacaccagcgugcuccgggccguccugccccgcgacaugguguuccggaccuccacgccccgcgugguccuguga

SEQ ID NO: 8250 - RNA, 1710 nt, Artificial Sequence
  derived and/or modified CDS sequence (opt1) from LASV(G3016-SLE-2013;Clade IV)__AIT17349__NP
augagcgccuccaaggagaucaagagcuuccuguggacccagucccuccgccgggagcugagcggcuacugcuccaacaucaagcuccagguggucaaggacgcccaggcgcugcugcacgggcuggacuucagcgagguguccaacgugcagcgccucaugcggaaggagcgccgggacgacagcgaccugaagcgccugcgggaccucaaccaggccgucaacaaccugguggagcugaaguccacccagcagaaguccauccuccgcgugggcacccugaccagcgacgaccugcucauccuggccgccgaccuggagaagcucaagagcaaggucacccggaccgagcgcccccuguccgccgggguguacaugggcaaccugagcucccagcagcucgaccagcggcgcgcgcugcugaacaugcucgggaugagcggcuccaaccagggcgcccgggccgggcgcgacggcgugguccgggugugggacgugaagaacgccgagcugcugaacaaccaguucgggacgaugccgagccucacccuggcgugccugaccaagcagggccaggucgaccucaacgacgccgugcaggcccugaccgaccuggggcucaucuacacggccaaguaccccaacaccuccgaccuggaccgccugacccagagccaccccauccucaacaugaucgacaccaagaaguccagccugaacaucagcggcuacaacuucucccugggcgccgcggugaaggccggggccugcaugcucgacggcgggaacaugcuggagacgaucaaggucagcccccagaccauggacggcauccugaaguccauccucaaggugaagaaggcccugggcauguucaucagcgacaccccgggggagcggaaccccuacgagaacauccuguacaagaucugccucuccggcgacggguggcccuacaucgccagccgcaccuccaucacgggccgggcgugggagaacaccguggucgaccuggagagcgacgagaagccccagaaggccggguccaacagcuccaacaagagccugcaguccgccggcuucaccgccggccucaccuacagccagcugaugacgcugaaggacgccaugcugcagcucgacccgaacgcgaagaccuggauggacaucgaggggcgccccgaggaccccguggagaucgcccuguaccagcccuccagcggcugcuacauccacuucuuccgggagccgaccgaccugaagcaguucaagcaggacgccaaguacucccacgggaucgacgugaccgaccucuucgccgcccagcccggccugacgagcgcggucaucgacgcccugccccgcaacauggugaucacgugccaggggagcgacgacauccgcaagcuccuggagucccagggccggaaggacaucaagcugaucgacaucgcccucagcaagaccgacucccgcaaguacgagaacgccgugugggaccaguacaaggaccugugccacaugcacaccggcaucgucguggagaagaagaagcgcgggggcaaggaggagaucaccccgcacugcgcgcugauggacugcaucauguucgacgccgccgucagcgggggccucaacgccuccgugcugcgggccgugcugccccgggacauggucuuccgcaccagcacgccccggguggugcucuga

SEQ ID NO: 8251 - RNA, 1710 nt, Artificial Sequence
  derived and/or modified CDS sequence (opt1) from LASV(G3034-SLE-2013;Clade IV)__AIT17351__NP
augagcgccuccaaggagaucaagagcuuccuguggacccagucccuccgccgggagcugagcggcuacugcuccaacaucaagcuccagguggucaaggacgcccaggcgcugcugcacgggcuggacuucagcgagguguccaacgugcagcgccucaugcggaagcagcgccgggacgacggcgaccugaagcgccugcgggaccucaaccaggccgucaacaaccugguggagcucaagagcacccagcagaaguccgugcugcgcgucgggacccugaccagcgacgaccugcucauccuggccgccgaccuggagaagcucaaguccaaggugauccggaccgagcgcccccugagcgccggcguguacauggggaaccuguccagccagcagcucgagcagcggcgcgcgcugcugaacaugaucggcauguccagcggcaaccagggggcccggaccggcaaggacggggucgugcgcaucugggacgugaagaacgccgaccuccugaacaaccaguucggcaccaugccgucccugacccucgccugccugaccaagcaggggcaggucgaccugaacgacguggugcaggcgcucaccgaccugggccugaucuacacggccaaguaccccaacaccagcgaccucgaccggcugacccagucccaccccauccugaacauggucgacaccagcaagagcucccucaacaucagcggcuacaacuucucccugggggccgccgugaaggccggcgcgugcaugcuggacgggggcaacaugcucgagacgaucaaggugagcccccagaccauggacggcauccugaaguccauccugaaggucaagaagucccucgggauguucgugagcgacaccccgggcgagcgcaaccccuacgagaacauccuguacaagaucugccugagcggggacggcuggcccuacaucgccucccggaccagcaucacggggcgcgccugggagaacaccguggucgaccucgaguccaacggcaagccccagaaggccggcagcaacaacuccaacaagagccugcaguccaccggguucaccgccggccugacguacagccagcucaugacccugaaggacgcgaugcugcagcuggacccgaacgccaagaccuggauggacaucgaggggcggcccgaggaccccguggagaucgcccucuaccagcccuccagcggcugcuacauccacuucuuccgcgagccgaccgaccugaagcaguucaagcaggacgccaaguacucccacgggaucgacgugacggaccuguucgccgcgcagcccggccucaccagcgccgucaucgacacccugccccggaacauggugaucacgugccagggcagcgacgacauccgcaagcugcucgagucccaggggcgcaaggacaucaagcugaucgacaucgcccugagcaagaucgacucccggaaguacgagaacgccgucugggaccaguacaaggaccucugccacaugcacaccggcgugguggucgagaagaagaagcgcgggggcaaggaggagaucacgccccacugcgcccugauggacugcaucauguucgacgcggccgugagcgggggccugaacgccuccgugcuccgggccguccugccgcgcgacaugguguuccggaccagcacgccccgcgugguccuguga

SEQ ID NO: 8252 - RNA, 1710 nt, Artificial Sequence
  derived and/or modified CDS sequence (opt1) from LASV(G3110-SLE-2013;Clade IV)__AIT17361__NP
augagcgccuccaaggagaucaagagcuuccuguggacccagucccuccgccgggagcugagcggcuacugcuccaacaucaagcuccagguggucaaggacgcccaggcgcugcugcacgggcuggacuucagcgagguguccaacgugcagcgccucaugcggaaggagcgccgggacgacagcgaccugaagcgccugcgggaccucaaccaggccgucaacaaccugguggagcugaaguccacccagcagaaguccgugcuccgcgucggcacccugaccuccgacgaccugcucgugcuggccgccgaccuggagaagcucaagagcaaggugacccggaccgagcgcccccuguccgccggggucuacaugggcaaccugagcucccagcagcucgaccagcggcgcgcgcugcugaacaugaucgggaugagcggcggcaaccagggggcccgggccggccgcgacgggguggugcggaucugggacgucaagaacgccgagcuccugaacaaccaguucggcacgaugccgucccugacccucgcgugccugaccaagcagggccagguggaccugaacgacgugguccaggcccucaccgaccuggggcugaucuacacggccaaguaccccaacaccagcgaccucgaccgccugacccagucccaccccauccugaacaugaucgacaccaagaaguccagccucaacaucagcggcuacaacuucagccugggggccgccgugaaggcgggcgccugcaugcuggacgggggcaacaugcucgagacgaucaaggugagcccccagaccauggacggcauccucaagagcauccugaaggucaagaaggcccuggggauguucaucuccgacaccccgggcgagcggaaccccuacgagaacauccuguacaagaucugccugagcggggacggcuggcccuacaucgccucccgcaccagcaucacggggcgggccugggagaacaccaucguggaccucgaguccgacggcaagccccagaagaccaacaacaccaacagcaacaagucccugcagagcgcgggcuucgccgccgggcugacguacucccagcucaugacccugaaggacgccaugcugcagcuggacccgaacgccaagaccuggauggacaucgagggccgccccgaggaccccguggagaucgcgcucuaccagcccagcuccgggugcuacauccacuucuuccgggagccgaccgaccugaagcaguucaagcaggacgccaaguacagccacggcaucgacgucacggaccuguucgccgcccagcccgggcucaccuccgccgugaucgacacccugccccgcaacauggugaucacgugccagggcagcgaggacauccgccggcugcucgagucccagggccgcaaggacaucaagcugaucgacaucgcgcugagcaagaccgacagccggaaguacgagaacgccgucugggaccaguacaaggaccucugccacaugcacaccgggguggucguggagaagaagaagaagggcgggaaggaggagaucacgccccacugcgcccugauggacugcaucauguucgacgccgcgguguccggcgggcugaacaccagcguccuccgcgccgugcugccgcgggacaugguguuccgcaccuccacgccccgggucgugcuguga

SEQ ID NO: 8253 - RNA, 1710 nt, Artificial Sequence
  derived and/or modified CDS sequence (opt1) from LASV(G3148-SLE-2013;Clade IV)__AIT17365__NP
augagcgccuccaaggagaucaagagcuuccuguggacccagucccuccgccgggagcugagcggcuacugcuccaacaucaagcuccagguggucaaggacgcccaggcgcugcugcacgggcuggacuucagcgagguguccaacgugcagcgccucaugcggaaggagcgccgggacgacaacgaccugaagcgccugcgggaccucaaccaggccgucaacaaccugguggagcucaagagcacccagcagaaguccauccugcgcgugggcacccugaccagcgacgaccugcucauccuggccgccgaccuggagaagcucaaguccaaggucacccggaccgagcgcccccugagcgccgggguguacaugggcaaccuguccagccagcagcucgaccagcggcgcgcgcugcugaacaugaucgggauguccggcagcaaccagggcgcccaggccgggcgggacggcgugguccgcgugugggacgugaagaacgccgagcuccugaacaaccaguucgggacgaugccgucccugacccucgcgugccugaccaagcagggccaggucgaccugaacgacgccgugcaggcccucaccgaccuggggcugaucuacacggccaaguaccccaacaccagcgaccucgaccggcugacccagucccaccccauccugaacaugaucgacaccaagaaguccagccucaacaucuccggcuacaacuucagccugggcgccgcggugaaggccggggccugcaugcuggacggcgggaacaugcucgagacgaucaaggucagcccccagaccauggacggcauccucaagagcauccugaaggugaagaaggcccugggcauguucaucuccgacgccccgggggagcgcaaccccuacgagaacauccuguacaagaucugccugagcggcgacggguggcccuacaucgcgucccggaccagcaucaccggccgcgccugggagaacacgguggucgaccucgaguccgacgggaagccccagaaggccggcagcaacggcuccaacaagagccugcaguccgccggguucaccgccggccugaccuacagccagcucaugacccugaaggacgcgaugcugcagcuggacccgaacgccaagacguggauggacaucgaggggcggcccgaggaccccguggagaucgcccucuaccagcccuccagcggcugcuacauccacuucuuccgcgagccgaccgaccugaagcaguucaagcaggacgccaaguacucccacgggaucgacgugaccgaccuguucgccgcgcagcccggccucaccagcgccgucaucgacgcccugccccggaacauggugaucacgugccagggcuccgacgacauccgcaagcuguucgagagccaggggcgcaaggacaucaagcucaucgacaucgcccugagcaagaccgacucccggaaguacgagaacgcggugugggaccaguacaaggaccugugccacaugcacaccggcaucgucguggagaagaagaagcgcgggggcaaggaggagaucacgccccacugcgcccucauggacugcaucauguucgacgccgccgucagcgggggccugaacaccuccgugcugcgggccgugcucccgcgcgacauggucuuccggaccagcacgccccgcguggugcuguga

SEQ ID NO: 8254 - RNA, 1710 nt, Artificial Sequence
  derived and/or modified CDS sequence (opt1) from LASV(G3151-SLE-2013;Clade IV)__AIT17369__NP
augagcgccuccaaggagaucaagagcuuccuguggacccagucccuccgccgggagcugagcggcuacugcuccaacaucaagcuccagguggucaaggacgcccaggcgcugcugcacgggcuggacuucagcgagguguccaacgugcagcgccucaugcggaaggagcgccgggacgacagcgaccugaagcgccugcgggaccucaaccaggccgucaacaaccugguggagcugaaguccacccagcagaaguccgugcuccgcgucggcacgcugaccagcgacgaccugcucgugcuggccgccgaccuggagaagcucaagagcaaggugacccggaccgagcgcccccuguccgccggggucuacaugggcaaccugagcucccagcagcucgaccagcggcgcgcgcugcugagcaugaucgggauguccggcggcaaccagggggcccgggccggccgcgacgggguggugcggaucugggacgucaagaacgccgagcuccugaacaaccaguucggcacgaugccgagccugacccucgcgugccugaccaagcagggccagguggaccugaacgacgugguccaggcccucaccgaccuggggcugaucuacacggccaaguaccccaacaccuccgaccucgaccgccugacccagagccaccccauccugaacaugaucgacaccaagaaguccagccucaacaucagcggcuacaacuucucccugggggccgccgugaaggcgggcgccugcaugcuggacgggggcaacaugcucgagacgaucaaggugagcccccagaccauggacggcauccugaaguccauccugaaggucaagaaggcccucgggauguucaucagcgacaccccgggcgagcggaaccccuacgagaacauccuguacaagaucugccuguccggggacggcuggcccuacaucgccagccgcaccuccaucacggggcgggccugggagaacaccaucguggaccucgagagcgacggcaagccccagaagaccuccaacaccaacagcaacaagucccugcagagcgcgggcuucgccgccgggcugacguacucccagcucaugacccugaaggacgccaugcugcagcuggacccgaacgccaagaccuggauggacaucgagggccgccccgaggaccccguggagaucgcgcucuaccagcccagcuccgggugcuacauccacuucuuccgggagccgaccgaccugaagcaguucaagcaggacgccaaguacagccacggcaucgacgucacggaccuguucgccgcccagcccgggcucaccuccgccgugaucgacgcgcugccccgcaacauggugaucacgugccagggcagcgaggacauccgcaagcugcucgagagccagggccggaaggacaucaagcugaucgacaucgcccuguccaagaccgacagccgcaaguacgagaacgccgucugggaccaguacaaggaccucugccacaugcacaccgggguggucguggagaagaagaagaagggcgggaaggaggagaucaccccgcacugcgcccugauggacugcaucauguucgacgcggccguguccggcgggcugaacaccagcguccuccgggccgugcugccccgcgacaugguguuccggaccuccacgccccgcgucgugcuguga

SEQ ID NO: 8255 - RNA, 1710 nt, Artificial Sequence
  derived and/or modified CDS sequence (opt1) from LASV(G3157-SLE-2013;Clade IV)__AIT17371__NP
augagcgccuccaaggagaucaagagcuuccuguggacccagucccuccgccgggagcugagcggcuacugcuccaacaucaagcuccagguggucaaggacgcccaggcgcugcugcacgggcuggacuucagcgagguguccaacgugcagcgccucaugcggaaggagcgccgggacgacaacgaccugaagcgccugcgggaccucaaccaggccgucaacaaccugguggagcucaagagcacccagcagaaguccauccugcgcgugggcacccugaccagcgacgaccugcucauccuggccgccgaccuggagaagcucaaguccaaggucacccggaccgagcgcccccugagcgccgggguguacaugggcaaccuguccagccagcagcucgaccagcggcgcgcgcugcugaacaugaucgggauguccggcagcaaccagggcgcccaggccgggcgggacggcgugguccgcgugugggacgugaagaacgccgagcuccugaacaaccaguucgggacgaugccgucccugacccucgcgugccugaccaagcagggccaggucgaccugaacgacgccgugcaggcccucaccgaccuggggcugaucuacacggccaaguaccccaacaccagcgaccucgaccggcugacccagucccaccccauccugaacaugaucgacaccaagaaguccagccucaacaucuccggcuacaacuucagccugggcgccgcggugaaggccggggccugcaugcuggacggcgggaacaugcucgagacgaucaaggucagcccccagaccauggacggcauccucaagagcauccugaaggugaagaaggcccugggcauguucaucuccgacgccccgggggagcgcaaccccuacgagaacauccuguacaagaucugccugagcggcgacggguggcccuacaucgcgucccggaccagcaucaccggccgcgccugggagaacacgguggucgaccucgaguccgacgggaagccccagaaggccggcagcaacuccagcaacaagucccugcagagcgccggcuucaccgccgggcugaccuacucccagcucaugacccugaaggacgcgaugcugcagcuggacccgaacgccaagacguggauggacaucgagggccggcccgaggaccccguggagaucgcccucuaccagcccagcuccgggugcuacauccacuucuuccgcgagccgaccgaccugaagcaguucaagcaggacgccaaguacagccacggcaucgacgugaccgaccuguucgccgcgcagcccgggcucaccuccgccgucaucgacgcccugccccggaacauggugaucacgugccagggcagcgacgacauccgcaagcuguucgagagccagggccgcaaggacaucaagcucaucgacaucgcccuguccaagaccgacagccggaaguacgagaacgcggugugggaccaguacaaggaccugugccacaugcacaccgggaucgucguggagaagaagaagcgcggcgggaaggaggagaucacgccccacugcgcccucauggacugcaucauguucgacgccgccgucuccggcgggcugaacaccagcgugcugcgggccgugcucccgcgcgacauggucuuccggaccuccacgccccgcguggugcuguga

SEQ ID NO: 8256 - RNA, 1710 nt, Artificial Sequence
  derived and/or modified CDS sequence (opt1) from LASV(G3206-SLE-2013;Clade IV)__AIT17379__NP
augagcgccuccaaggagaucaagagcuuccuguggacccagucccuccgccgggagcugagcggcuacugcuccaacaucaagcuccagguggucaaggacgcccaggcgcugcugcacgggcuggacuucagcgagguguccaacgugcagcgccucaugcggaaggagcgccgggacgacagcgaccugaagcgccugcgggaccucaaccaggccgucaacaaccugguggagcugaaguccacccagcagaaguccgugcuccgcgucggcacccugaccagcgacgaccugcucauccuggccgccgaccuggagaagcucaagagcaaggugacccggaccgagcgcccccuguccgccgggguguacaugggcaaccugagcucccagcagcucgaccagcggcgcgcgcugcugaacaugaucgggaugagcuccggcaaccggggcgcccaggccgggcgcgacggcgucgugcgggugugggacgucaagaacgccgagcuccugaacaaccaguucgggacgaugccgagccugacccucgcgugccugaccaagcagggccagguggaccugaacgacgccgugcaggcccucaccgaccuggggcugaucuacacggccaaguaccccaacaccuccgaccucgaccgccugacccagagccaccccauccugaacauggucgacaccaagaaguccagccucaacaucagcggcuacaacuucucccugggcgccgcggugaaggccggggccugcaugcuggacggcgggaacaugcucgagacgaucaaggugagcccccagaccauggacggcauccugaaguccauccugaaggucaagaaggcccucggcauguucaucagcgacaccccgggggagcggaaccccuacgagaacauccuguacaagaucugccuguccggcgacggguggcccuacaucgccagccgcaccuccaucacgggccgggcgugggagaacaccgugguggaccucgagagcgacgggaagccccagaaggccggcuccaacaacagcaacaagucccugcagagcgccggcuucgccgccgggcugaccuacucccagcucaugacccugaaggacgcgaugcugcagcuggacccgaacgccaagacguggauggacaucgagggccgccccgaggaccccgucgagaucgcccucuaccagcccagcuccgggugcuacauccacuucuuccgggagccgaccgaccugaagcaguucaagcaggacgccaaguacagccacggcaucgacgugaccgaccuguucgccgcgcagcccgggcucaccuccgccgugaucgacgcccugccccgcaacauggucaucacgugccagggcagcgacgacauccgcaagcugcucgagagccagggccggaaggacaucaagcugaucgacaucgcccuguccaagaccgacagccgcaaguacgagaacgcggugugggaccaguacaaggaccucugccacaugcacaccgggaucgucguggagaagaagaagcggggcgggaaggaggagaucacgccccacugcgcccugauggacugcaucauguucgacgccgccguguccggcgggcugaacaccagcguccuccgcgccgugcugccgcgggacaugguguuccgcaccuccacgccccgggucgugcuguga

SEQ ID NO: 8257 - RNA, 1710 nt, Artificial Sequence
  derived and/or modified CDS sequence (opt1) from LASV(G3234-SLE-2013;Clade IV)__AIT17389__NP
augagcgccuccaaggagaucaagagcuuccuguggacccagucccuccgccgggagcugagcggcuacugcuccaacaucaagcuccagguggucaaggacgcccaggcgcugcugcacgggcuggacuucagcgagguguccaacgugcagcgccucaugcggaagcagcgccgggacgacggcgaccugaagcgccugcgggaccucaaccaggccgucaacaaccugguggagcugaaguccacccagcagaaguccgugcuccgcgucgggacccugaccagcgacgaccugcucauccuggccgccgaccuggagaagcucaaguccaaggugacccggaccgagcgcccccugagcgccggcguguacauggggaaccuguccagccagcagcucgaccagcggcgcgcgcugcugaacaugaucggcauguccggcgggaaccagggcgcccggacggggaaggacggcgucgugcgcaucugggacgugaagaacgccgaccuccugaacaaccaguucgggaccaugccgagccugacccucgccugccugaccaagcagggccaggucgaccugaacgacguggugcaggcgcucacggaccugggccugaucuacaccgccaaguaccccaacaccuccgaccucgaccggcugacccagagccaccccauccugaacaugaucgacacguccaagagcagccucaacaucuccggguacaacuucagccugggcgccgccgucaaggccggggcgugcaugcuggacggcggcaacaugcucgagaccaucaaggugagcccccagaccauggacgggauccucaagagcauccugaaggugaagaagucccugggcauguucaucagcgacaccccgggggagcgcaaccccuacgagaacauccuguacaagaucugccuguccggcgacggguggcccuacaucgccagccggacguccaucaccggccgcgccugggagaacaccgucguggaccucgagagcgacggcaagccccagaaggccggguccaacaacagcaacaagucccugcagagcaccggcuucacggccgggcugaccuacucccagcucaugacccugaaggacgcgaugcugcagcuggacccgaacgccaagaccuggauggacaucgagggccggcccgaggaccccguggagaucgcccucuaccagcccagcuccgggugcuacauccacuucuuccgcgagccgacggaccugaagcaguucaagcaggacgccaaguacagccacggcaucgacgucaccgaccuguucgccgcgcagcccggccucaccuccgccgugaucgacacccugccccggaacauggugaucacgugccaggggagcgacgacauccgcaagcugcucgagagccagggccgcaaggacaucaagcugaucgacaucgcccuguccaagaccgacagccggaaguacgagaacgccgucugggaccaguacaaggaccucugccacaugcacaccgggguggucguggagaagaagaagcgcggcgggaaggaggagaucacgccccacugcgcccugauggacugcaucauguucgacgcggccguguccggcggccugaacgucagcgugcuccgggccgugcugccgcgcgacauggucuuccggaccuccacgccccgcguggugcuguga

SEQ ID NO: 8258 - RNA, 1710 nt, Artificial Sequence
  derived and/or modified CDS sequence (opt1) from LASV(G3278-SLE-2013;Clade IV)__AIT17399__NP
augagcgccuccaaggagaucaagagcuuccuguggacccagucccuccgccgggagcugagcggcuacugcuccaacaucaagcuccagguggucaaggacgcccaggcgcugcugcacgggcuggacuucagcgagguguccaacgugcagcgccucaugcggaagcagcgccgggacgacagcgaccugaagcgccugcgggaccucaaccaggccgucaacaaccugguggagcugaaguccacccagcagaaguccgugcuccgcgucggcacccugaccagcgacgaccugcucgugcuggccgccgaccuggagaagcucaagagcaaggugauccggaccgagcgcccccuguccagcggggucuacaugggcaaccuguccagccagcagcucgaccagcggcgcgcccugcugaacaugaucgggauguccggcggcaaccagggggcccaggugggccgggacggggugguccgcgugugggacgugaagaacgcggaccuccugaacaaccaguucggcaccaugccgagccugacgcucgccugccugaccaagcaggggcaggucgaccugaacgacguggugcaggcccucaccgaccugggccugaucuacaccgcgaaguaccccaacacguccgaccucgaccggcuggcccagagccaccccauccugaacaugaucgacaccaagaaguccagccucaacaucagcggcuacaacuucucccugggggccgccgucaaggccggcgcgugcaugcuggacgggggcaacaugcucgagaccaucaaggugacgccccagaccauggacggcauccucaagagcauccugaaggugaagaaggcccuggggauguucaucuccgagaccccgggcgagcgcaaccccuacgagaacauccuguacaagaucugccugagcggggacggcuggcccuacaucgccucccggaccagcaucaccgggcgcgccugggagaacacggucguggaccucgaguccgacggcaagccccagaaggccggcaacaacaacagcaacaagucccugcagagcgcgggguucaccgccggccugaccuacucccagcucaugacccugaaggacagcaugcugcagcuggacccgaacgccaagacguggauggacaucgaggggcggcccgaggaccccguggaggucgcccucuaccagcccuccagcggcugcuacauccacuucuuccgcgagccgaccgaccugaagcaguucaagcaggacgccaaguacucccacgggaucgacgugaccgaccuguucgcgacccagcccggccucacgagcgccgucaucgaggcccugccccggaacauggugaucacgugccagggcuccgacgacauccgcaagcugcucgagagccaggggcgcaaggacaucaagcugaucgacaucgcccugaacaagaccgacagccggaaguacgagaacgccgugugggaccaguacaaggaccucugccacaugcacaccggcgucgugguggagaagaagaagcgcgggggcaaggaggagaucacgccccacugcgcgcugauggacugcaucauguucgacgccgccgucuccgggggccugaagacccucgcccugcgggcggugcugccgcgcgacaugguguuccggaccagcacccccaaggucgugcucuga

SEQ ID NO: 8259 - RNA, 1710 nt, Artificial Sequence
  derived and/or modified CDS sequence (opt1) from LASV(G502-SLE-2009;Clade IV)__AIT17127__NP
augagcgccuccaaggagaucaagagcuuccuguggacccagucccuccgccgggagcugagcggcuacugcuccaacaucaagcuccagguggucaaggacgcccaggcgcugcugcacgggcuggacuucagcgagguguccaacgugcagcgccucaugcggaaggagcgccgggacgacaacgaccugaagcgccugcgggaccucaaccaggccgucaacaaccugguggagcucaagagcacccagcagaaguccauccugcgcgugggcacccugaccagcgacgaccugcucauccuggccgccgaccuggagaagcucaaguccaaggucauccggaccgagcgcccccugagcgccgggguguacaugggcaaccuguccagccagcagcucgaccagcggcgcgcgcugcuguccaugaucgggaugagcggcggcaaccagggggugcgggccggcaaggacggggucgugcgcgugugggacgucaagaacgccgagcuccugaacaaccaguucggcaccaugccgucccugacgcucgccugccugaccaagcagggccagguggaccugaacgacgcggugcaggcccucaccgaccuggggcugaucuacaccgccaaguaccccaacacgagcgaccucgaccggcugacccagucccaccccauccugaacaugaucgacaccaagaaguccagccucaacaucuccggcuacaacuucagccugggggccgccgucaaggcgggcgccugcaugcuggacgggggcaacaugcucgagaccaucaaggugagcccccagacgauggacggcauccucaagagcauccugaaggugaagaaggcccuggggauguucaucuccgacaccccgggcgagcgcaaccccuacgagaacauccuguacaagaucugccugagcggggacggcuggcccuacaucgccucccggaccagcaucaccgggcgcgccugggagaacacggucguggaccucgaguccgacggcaagccccagaaggcgggcagcaacaacuccaacaagagccugcaguccgccggguucaccgccggccugaccuacagccagcucaugacccugaaggacgccaugcugcagcuggacccgaacacgaagaccuggauggacaucgaggggcggcccgaggaccccguggagaucgcccucuaccagcccuccagcggcugcuacauccacuucuuccgcgagccgaccgaccugaagcaguucaagcaggacgcgaaguacucccacgggaucgacgucaccgaccuguucgccgcccagcccggccucacgagcgccgugaucgacgcccugccccggaacauggugaucacgugccagggcuccgacgacauccgcaagcugcucgagagccaggggcgcaaggacaucaagcugaucgacaucgcgcugaacaagaccgacagccggaaguacgagaacgccgucugggaccaguacaaggaccucugccacaugcacaccggcguggucguggagaagaagaagcgcgggggcaaggaggagaucaccccgcacugcgcccugauggacugcaucauguucgacgccgcgguguccgggggccugaacaccagcguccuccgggccgugcugccccgcgacaugguguuccggaccuccacgccccgcgucgugcuguga

SEQ ID NO: 8260 - RNA, 1710 nt, Artificial Sequence
  derived and/or modified CDS sequence (opt1) from LASV(G503-SLE-2009;Clade IV)__AIT17131__NP
augagcgccuccaaggagaucaagagcuuccuguggacccagucccuccgccgggagcugagcggcuacugcuccaacaucaagcuccagguggucaaggacgcccaggcgcugcugcacgggcuggacuucagcgagguguccaacgugcagcgccucaugcggaaggagcgccgggacgacaacgaccugaagcgccugcgggaccucaaccaggccgucaacaaccugguggagcucaagagcacccagcagaaguccauccugcgcgugggcacgcugagcuccgacgaccugcucguccuggccgccgaccuggagaagcucaagagcaaggugacccggaccgagcgcccccuguccgccgggguguacaugggcaaccugagcucccagcagcucgaccagcggcgcgcgcugcugaacaugaucgggaugagcggcggcaaccagggggcccgggccggccgcgacggggucgugcgggugugggacgucaagaacgccgagcuccugaacaaccaguucggcaccaugccgucccugacgcucgcgugccugaccaagcagggccagguggaccugaacgacgugguccaggcccucaccgaccuggggcugaucuacaccgccaaguaccccaacacgagcgaccucgaccgccugacccagucccaccccauccugaacaugguggacaccaagaaguccagccucaacaucuccggcuacaacuucagccugggggccgccgugaaggcgggcgccugcaugcuggacgggggcaacaugcucgagaccaucaaggucagcccccagacgaucgacggcauccucaagagcauccugaaggugaagaaggcccuggggauguucaucuccgacaccccgggcgagcggaaccccuacgagaacauccuguacaagaucugccugagcggggacggcuggcccuacaucgccucccgcaccagcaucaccgggcgggccugggagaacacgguggucgaccucgaguccgacggcaagccccagaaggcgggcagcaacaacuccaacaagagccugcaguccgccggguucaccgccggccugaccuacagccagcucaugacccugaaggacgccaugcugcagcuggacccgaacgccaagaucuggauggacaucgaggggcgccccgaggaccccguggagaucgcgcucuaccagcccuccagcggcugcuacauccacuucuuccgggagccgacggaccugaagcaguucaagcaggacgccaaguacucccacgggaucgacgugaccgaccuguucgccgcccagcccggccucaccagcgccgucaucgacgcgcugccccgcaacauggugaucacgugccagggcgccgacgacauccgcaagcugcucgagucccaggggcggaaggacaucaagcugaucgacaucgcccugaacaaggccgacagccgcaaguacgagaacgcggucugggaccaguacaaggaccucugccacaugcacaccggcgugguggucgagaagaagaagcgcgggggcaaggaggagaucaccccgcacugcgcccugauggacugcaucauguucgacgccgccgugagcgggggccugaacaccuccgugcuccgggccguccugccccgggacaugguguuccgcaccagcacgccccgggugguccuguga

SEQ ID NO: 8261 - RNA, 1710 nt, Artificial Sequence
  derived and/or modified CDS sequence (opt1) from LASV(G610-SLE-2009;Clade IV)__AIT17135__NP
augagcgccuccaaggagaucaagagcuuccuguggacccagucccuccgccgggagcugagcggcuacugcuccaacaucaagcuccagguggucaaggacgcccaggcgcugcugcacgggcuggacuucagcgagguguccaacgugcagcgccucaugcggaaggagcgccgggacgacaacgaccugaagcgccugcgggaccucaaccaggccgucaacaaccugguggagcucaagagcacccagcagaaguccauccugcgcgugggcacccugaccagcgacgaccugcucauccuggccgccgaccuggagaagcucaaguccaaggucacccggaccgagcgcccccugagcgccgggguguacaugggcaaccuguccagccagcagcucgaccagcggcgcgcgcugcuguccaugaucgggaugagcggcggcaaccagggggcccgggccggccgcgacggggugguccgggugugggacgugaagaacgccgagcuccugaacaaccaguucggcacgaugccgucccugacccucgcgugccugaccaagcaggggcaggucgaccugaacgacguggugcaggcccucaccgaccugggccugaucuacacggccaaguaccccaacaccagcgaccucgaccgccugacccagucccaccccauccugaacaugaucgacaccaagaaguccagccucaacaucuccggcuacaacuucagccugggggccgccgucaaggcgggcgccugcaugcuggacgggggcaacaugcucgagacgaucaaggugagcccccagaccauggacggcauccucaagagcauccugaaggugaagaaggcccuggggauguucaucuccgacaccccgggcgagcggaaccccuacgagaacauccuguacaagaucugccugagcggggacggcuggcccuacaucgccucccgcaccagcaucacggggcgggccugggagaacaccgucguggaccucgaguccgacggcaagcugcagaaggcgggcagcaacaacuccaacaagagccugcaguccgccggguucaccgccggccucaccuacagccagcugaugacgcugaaggacgccaugcugcagcucgaccccaacgccaagaccuggauggacaucgaggggcgcccggaggaccccguggagaucgcgcuguaccagcccuccagcggcugcuacauccacuucuuccgggagcccaccgaccugaagcaguucaagcaggacgccaaguacucccacgggaucgacgucaccgaccucuucgccgcccagccgggccugacgagcgccgugaucgacgcgcugccccgcaacauggugaucacgugccagggcuccgacgacauccgcaagcuccuggagagccaggggcggaaggacaucaagcugaucgacaucgcccucaacaagaccgacagccgcaaguacgagaacgccgucugggaccaguacaaggaccugugccacaugcacaccggcguggucguggagaagaagaagaagggcgggaaggaggagaucacgccccacugcgcccugauggacugcaucauguucgacgcggccguguccgggggccucaacaccagcguccugcgggccgugcugccccgcgacaugguguuccggaccuccaccccgcgcgucgugcucuga

SEQ ID NO: 8262 - RNA, 1710 nt, Artificial Sequence
  derived and/or modified CDS sequence (opt1) from LASV(G636-SLE-2009;Clade IV)__AIT17139__NP
augagcgccuccaaggagaucaagagcuuccuguggacccagucccuccgccgggagcugagcggcuacugcuccaacaucaagcuccagguggucaaggacgcccaggcgcugcugcacgggcuggacuucagcgagguguccaacgugcagcgccucaugcggaaggagcgccgggacgacaacgaccugaagcgccugcgggaccucaaccaggccgucaacaaccugguggagcucaagagcacccagcagaaguccgugcugcgcgucggcacccugaccagcgacgaccugcucauccuggccgccgaccuggagaagcucaaguccaaggugacccggaccgagcgcccccugagcgccgggguguacaugggcaaccuguccagccagcagcucgaccagcggcgcgcgcugcugaacaugaucgggauguccggcggcaaccagggggcccgggccggccgcgacggggucgugcgggugugggacgucaagaacgccgagcuccugaacaaccaguucggcacgaugccgagccugacccucgcgugccugaccaagcagggccagguggaccugaacgacgccgugcaggcccucaccgaccuggggcugaucuacacggccaaguaccccaacaccuccgaccucgaccgccugacccagagccaccccauccugaacaugaucgacaccaagaaguccagccucaacaucagcggcuacaacuucucccugggggccgcggucaaggccggcgccugcaugcuggacgggggcaacaugcucgagacgaucaaggugagcccccagaccauggacuccauccucaagagcauccugaaggugaagaaggcccugggcauguucaucuccgacaccccgggggagcggaaccccuacgagaacauccuguacaagaucugccugagcggcgacggguggcccuacaucgccucccgcaccagcaucacgggccgggcgugggagaacaccgucguggaccucgaguccgacgggaagccccagaaggccggcagcaacaacuccaacaagagccugcaguccgccggcuucgccgccgggcugaccuacagccagcucaugacccugaaggacgcgaugcugcagcuggacccgaacgccaagacguggauggacaucgagggccgccccgaggaccccguggagaucgcccucuaccagcccuccagcgggugcuacauccacuucuuccgggagccgaccgaccugaagcaguucaagcaggacgccaaguacucccacggcaucgacgucaccgaccuguucgccgcgcagcccgggcucaccagcgccgugaucgacgcccugccccgcaacauggugaucacgugccagggcuccgacgacauccgcaagcugcucgagagccagggccggaaggacaucaagcugaucgacaucgcccugagcaagaccgacucccgcaaguacgagaacgcggucugggaccaguacaaggaccucugccacaugcacaccgggaucguggucgagaagaagaagcggggcgggaaggaggagaucacgccccacugcgcccugauggacugcaucauguucgacgccgccgugagcggcgggcugaacaccuccgugcuccgcgccguccugccgcgggacaugguguuccgcaccaccacgccccgggugguccuguga

SEQ ID NO: 8263 - RNA, 1710 nt, Artificial Sequence
  derived and/or modified CDS sequence (opt1) from LASV(G676-SLE-2009;Clade IV)__AIT17143__NP
augagcgccuccaaggagaucaagagcuuccuguggacccagucccuccgccgggagcugagcggcuacugcuccaacaucaagcuccagguggucaaggacgcccaggcgcugcugcacgggcuggacuucagcgagguguccaacgugcagcgccucaugcggaaggagcgccgggacgacaacgaccugaagcgccugcgggaccucaaccaggccgucaacaaccugguggagcucaagagcacccagcagaaguccauccugcgcgugggcacccugaccagcgacgaccugcucauccuggccgccgaccuggagaagcucaaguccaaggucacccggaccgagcgcccccugagcgccgggguguacaugggcaaccuguccagccagcagcucgaccagcggcgcgcgcugcugaacaugaucgggauguccggcagcaaccagggcgcccgggccgggcgcgacggcgugguccgggugugggacgugaagaacgccgagcuccugaacaaccaguucgggacgaugccgucccugacccucgcgugccugaccaagcagggccaggucgaccugaacgacgccgugcaggcccucaccgaccuggggcugaucuacacggccaaguaccccaacaccagcgaccucgaccgccugacccagucccaccccauccugaacaugaucgacaccaagaaguccagccucaacaucuccggcuacaacuucagccugggcgccgcggugaaggccggggccugcaugcuggacggcgggaacaugcucgagacgaucaaggucagcccccagaccauggacggcauccucaagagcauccugaaggugaagaaggcccugggcauguucaucuccgacaccccgggggagcggaaccccuacgagaacauccuguacaagaucugccugagcggcgacggguggcccuacaucgccucccgcaccagcaucacgggccgggcgugggagaacaccguggucgaccucgaguccgacgggaagccccagaaggccggcaacaacggcagcaacaagucccugcagagcgccggguucaccgccggccugaccuacucccagcucaugacgcugaaggacgccaugcugcagcuggacccgaacgcgaagaccuggauggacaucgaggggcgccccgaggaccccguggagaucgcccucuaccagcccagcuccggcugcuacauccacuucuuccgggagccgaccgaccugaagcaguucaagcaggacgccaaguacagccacgggaucgacgugaccgaccuguucgccgcccagcccggccucacguccgcggucaucgacgcccugccccgcaaccuggugaucacgugccagggcagcgacgacauccgcaagcuccuggagucccaggggcggaaggacaucaagcugaucgacaucgcccucagcaagaccgacagccgcaaguacgagaacgccgugugggaccaguacaaggaccugugccacaugcacaccggcaucgucguggagaagaagaagcgcgggggcaaggaggagaucaccccgcacugcgcgcugauggacugcaucauguucgacgccgccgucuccgggggccucaacaccagcgugcugcgggccgugcugccccgggacauggucuuccgcaccuccacgccccggguggugcucuga

SEQ ID NO: 8264 - RNA, 1710 nt, Artificial Sequence
  derived and/or modified CDS sequence (opt1) from LASV(G692-SLE-2009;Clade IV)__AIT17147__NP
augagcgccuccaaggagaucaagagcuuccuguggacccagucccuccgccgggagcugagcggcuacugcuccaacaucaagcuccagguggucaaggacgcccaggcgcugcugcacgggcuggacuucagcgagguguccaacgugcagcgccucaugcggaaggagcgccgggacgacaacgaccugaagcgccugcgggaccucaaccaggccgucaacaaccugguggagcucaagagcacccagcagaaguccgugcugcgcgucggcacccugaccagcgacgaccugcucauccuggccgccgaccuggagaagcucaaguccaaggugacccggaccgagcgcccccugagcgccgggguguacaugggcaaccuguccagccagcagcucgagcagcggcgcgcgcugcugaacaugaucgggauguccggcagcaaccagggcgcccaggccgggcgggacggcgucgugcgcgugugggacgucaagaacgccgagcuccugaacaaccaguucgggacgaugccgucccugacccucgcgugccugaccaagcagggccagguggaccugaacgacgccgugcaggcccucaccgaccuggggcugaucuacacggucaaguaccccaacaccagcgaccucgaccggcugacccagucccaccccauccugaacaugaucgacaccaagaaguccagccucaacaucuccggcuacaacuucagccugggcgccgccgugaaggcgggggccugcaugcuggacggcgggaacaugcucgagacgaucaaggugagcccccagaccauggacggcauccucaagagcauccugaaggucaagaaggcccugggcauguucaucuccgacaccccgggggagcgcaaccccuacgagaacauccuguacaagaucugccugagcggcgacggguggcccuacaucgccucccggaccagcaucacgggccgcgccugggagaacaccgugguggaccucgaguccgacgggaagccccagaaggcggacagcaacuccagcaacaagucccugcagagcgccggcuucaccgccggccugaccuacucccagcucaugacgcugaaggacgccaugcugcagcuggacccgaacgccaagaccuggauggacaucgaggggcggcccgaggaccccgucgagguggcgcucuaccagcccagcuccggcugcuacauccacuucuuccgcgagccgaccgaccugaagcaguucaagcaggacgccaaguacagccacgggaucgacgugaccgaccuguucgccgcccagcccggccucacguccgccgucaucgacgcgcugccccggaacauggugaucacgugccaggggagcgacgacauccgcaagcugcucgagagccagggccgcaaggacaucaagcugaucgacaucgcccuguccaagaccgacagccggaaguacgagaacgccgucugggaccaguacaaggaccucugccacaugcacaccggcgugguggucgagaagaagaagcgcgggggcaaggaggagaucaccccgcacugcgcccugauggacugcaucauguucgacgcggccguguccgggggccugaacaccagcgugcuccgggccguccugccccgcgacaugguguuccggaccuccacgccccgcgugguccuguga

SEQ ID NO: 8265 - RNA, 1710 nt, Artificial Sequence
  derived and/or modified CDS sequence (opt1) from LASV(G733-SLE-2010;Clade IV)__AIT17155__NP
augagcgccuccaaggagaucaagagcuuccuguggacccagucccuccgccgggagcugagcggcuacugcuccaacaucaagcuccagguggucaaggacgcccaggcgcugcugcacgggcuggacuucagcgagguguccaacgugcagcgccucaugcggaaggagcgccgggacgacaacgaccugaagcgccugcgggaccucaaccaggccgucaacaaccugguggagcucaagagcacccagcagaaguccgugcugcgcgucggcacccugaccagcgacgagcugcucgugcuggccgccgaccuggagaagcucaaguccaaggugauccggaccgagcgcccccugagcgccggggucuacaugggcaaccuguccagccagcagcucgaccagcggcgcgcgcugcuguccaugaucgggaugagcggcggcaaccagggggcccggaccggccgcgacgggguggugcgggucugggacgugaagaacgccgagcuccugaacaaccaguucggcaccaugccgucccugacccucgccugccugaccaagcagggccagguggaccugaacgacgcgguccaggcccucaccgaccuggggcugaucuacacggccaaguaccccaacaccagcgaccucgaccgccugacccagucccaccccauccugaacaugaucgacaccaagaaguccagccucaacaucuccggcuacaacuucagccugggggccgccgugaaggcgggcgccugcaugcuggacgggggcaacaugcucgagacgaucaaggugagcccccagaccauggacggcauccucaagagcauccugaaggucaagaaggcccuggggauguucaucuccgacaccccgggcgagcggaaccccuacgagaacauccuguacaagaucugccugagcggggacggcuggcccuacaucgccucccgcaccagcaucacggggcgggccugggagaacaccgugguggaccucgaguccgacggcaagccccagaaggcgggcagcaacaacuccaacaagagccugcaguccgccggguucaccgccggccugaccuacagccagcucaugacgcugaaggacgccaugcugcagcuggacccgaacgccaagaccuggauggacaucgaggggcgccccgaggaccccgucgagaucgcgcucuaccagcccuccagcggcugcuacauccacuucuuccgggagccgaccgaccugaagcaguucaagcaggacgccaaguacucccacgggaucgacgugaccgaccuguucgccgcccagcccggccucacgagcgccgugaucgacgcgcugccccgcaacauggucaucacgugccagggcuccgacgacauccgcaagcugcucgagagccaggggcggaaggacaucaagcugaucgacaucgcccugagcaagaucgacucccgcaaguacgagaacgccgugugggaccaguacaaggaccucugccacaugcacaccggcgucgugguggagaagaagaagcgcgggggcaaggaggagaucacgccccacugcgcccugauggacugcaucauguucgacgcggccgucagcgggggccugaacucccucgugcugcgggccgugcugccgcgggacauggucuuccgcaccagcacgccccggguggugcucuga

SEQ ID NO: 8266 - RNA, 1710 nt, Artificial Sequence
  derived and/or modified CDS sequence (opt1) from LASV(G806-SLE-2010;Clade IV)__AIT17161__NP
augagcgccuccaaggagaucaagagcuuccuguggacccagucccuccgccgggagcugagcggcuacugcuccaacaucaagcuccagguggucaaggacgcccaggcgcugcugcacgggcuggacuucagcgagguguccaacgugcagcgccucaugcggaaggagcgccgggacgacaacgaccugaagcgccugcgggaccucaaccaggccgucaacaaccugguggagcucaagagcacccagcagaaguccauccugcgcgugggcacccugaccagcgacgaccugcucauccuggccgccgaccuggagaagcucaaguccaaggucacccggaccgagcgcccccugagcgccgggguguacaugggcaaccuguccagccagcagcucgaccagcggcgcgcgcugcugaacaugaucgggauguccggcagcaaccagggcgcccggaccgggcgcgacggcgugguccgggugugggacgugaagaacgccgagcuccugaacaaccaguucgggaccaugccgucccugacccucgccugccugaccaagcagggccaggucgaccugaacgacgcggugcaggcccucacggaccuggggcugaucuacaccgccaaguaccccaacaccagcgaccucgaccgccugacccagucccaccccauccugaacaugaucgacacgaagaaguccagccucaacaucuccggcuacaacuucagccugggcgccgccgugaaggcgggggccugcaugcuggacggcgggaacaugcucgagaccaucaaggucagcccccagaccauggacggcauccucaagagcauccugaaggugaagaaggcccugggcauguucaucuccgacaccccgggggagcggaaccccuacgagaacauccuguacaagaucugccugagcggcgacggguggcccuacaucgccucccgcacgagcaucaccggccgggccugggagaacaccguggucgaccucgaguccgacgggaagccccagaaggcgggcagcaacuccagcaacaagucccugcagagcgccggccugaccgccgggcucacguacucccagcugaugacccugaaggacgccaugcugcagcucgacccgaacgccaagaccuggauggacaucgagggccgccccgaggaccccguggagaucgcgcuguaccagcccagcuccgggugcuacauccacuucuuccgggagccgaccgaccugaagcaguucaagcaggacgccaaguacagccacggcaucgacgugacggaccucuucgccgcccagcccgggcugaccuccgccgucaucgacgcgcugccccgcaaccucgugaucacgugccagggcagcgacgacauccgcaagcugcuggagagccagggccggaaggacaucaagcucaucgacaucgcccuguccaagaccgacagccgcaaguacgagaacgccgugugggaccaguacaaggaccugugccacaugcacaccgggaucgucguggagaagaagaagcggggcgggaaggaggagaucacgccccacugcgcccucauggacugcaucauguucgacgcggccgucuccggcgggcugaacgccagcgugcugcgcgccgugcucccgcgggacauggucuuccgcaccuccacgccccggguggugcuguga

SEQ ID NO: 8267 - RNA, 1710 nt, Artificial Sequence
  derived and/or modified CDS sequence (opt1) from LASV(G808-SLE-2010;Clade IV)__AIT17165__NP
augagcgccuccaaggagaucaagagcuuccuguggacccagucccuccgccgggagcugagcggcuacugcuccaacaucaagcuccagguggucaaggacgcccaggcgcugcugcacgggcuggacuucagcgaggugaacaacgugcagcgccucaugcggaaggagcgccgggacgacaacgaccugaagcgccugcgggaccucaaccaggccgucaacaaccugguggagcugaaguccacccagcagaaguccauccuccgcgugggcacccugaccuccgacgaccugcucauccuggccgccgaccuggagaagcucaagagcaaggucacccggaccgagcgcccccuguccgccgggguguacaugggcaaccugagcucccagcagcucgaccagcggcgcgcgcugcugaacaugaucgggaugagcaacggcaaccagggcacgcgggccgggcgcgacggcgugguccgggugugggacgugaagaacgccgagcuccugaacaaccaguucgggaccaugccgucccugacccucgccugccugaccaagcagggccaggucgaccugaacgacguggugcaggcgcucacggaccuggggcugaucuacaccgccaaguaccccaacaccagcgaccucgaccgccugacccagucccaccccauccugaacaugaucgacacgaagaaguccagccucaacaucagcggcuacaacuucagccugggcgccgccgucaaggccggggcgugcaugcuggacggcgggaacaugcucgagaccaucaaggugagcccccagaccauggacggcauccucaagagcauccugaaggugaagaaggcccugggcauguucaucuccgacaccccgggggagcggaaccccuacgagaacauccuguacaagaucugccugagcggcgacggguggcccuacaucgccucccgcacgagcaucaccggccgggccugggagaacaccgucguggaccucgaguccgacgggaagccccagaaggccgacagcuccaacagcaacaagucccugcagagcgcgggcuucaccgccggccugacguacucccagcucaugacccugaaggacgccaugcugcagcuggacccgaacgccaagaccuggauggacaucgaggggcgccccgaggaccccguggaggucgcccucuaccagcccagcuccggcugcuacauccacuucuuccgggagccgaccgaccugaagcaguucaagcaggacgcgaaguacagccacgggaucgacgugacggaccuguucgccgcccagcccggccucaccuccgccgugaucgacgcccugccccgcaacauggucaucacgugccaggggagcgacgacauccgcaagcugcucgagucccagggccggaaggacaucaagcugaucgacaucgcgcugagcaaggccgacagccgcaaguacgagaacgccgugugggaccagcacaaggaccucugccacaugcacaccggcgucgugguggagaagaagaagcgcgggggcaaggaggagaucaccccgcacugcgcccugauggacugcaucauguacgacgcggccgucuccgggggccugaacaccagcgugcuccgggccgugcugccccgggacauggucuuccgcaccuccacgccccggguggugcuguga

SEQ ID NO: 8268 - RNA, 1710 nt, Artificial Sequence
  derived and/or modified CDS sequence (opt1) from LASV(Guinea Faranah;Clade IV)__AMZ00380__NP
augagcguguccaaggaggucaagagcuuccuguggacccagucccuccgccgggagcugagcggcuacugcuccaacaucaagcuccagguggugaaggacgcccaggcccugcugcacgggcuggacuucagcgaggucuccaacgugcagcgccucaugcggaagcagcgccgggacgacagcgaccugaagcgccugcgggaccucaaccaggcggugaacaaccuggucgagcugaaguccacccagcagaaguccgugcuccgcgugggcacccugaccagcgacgaccugcucauccuggccgccgaccuggagaagcucaagagcaaggucacccggaccgagcgcccccuguccgccgggguguacaugggcaaccugagcucccagcagcucgaccagcggcgcgcccugcugaacaugaucgggaugaacggcggcaaccagggggugcaggcgggccgggacggggucgugcgcgugugggacgucaagaacgccgagcuccugaacaaccaguucggcacgaugccgagccugacccucgccugccugaccaagcagggccagguggaccugaacgacgccgugcaggcgcucaccgaccuggggcugaucuacacggccaaguaccccaacaccuccgaccucgaccggcuggcccagagccaccccauccugaacaugaucgacaccaagaaguccagccucaacaucagcggcuacaacuucucccugggggccgccgucaaggcgggcgccugcaugcuggacgggggcaacaugcucgagaccaucaaggugagcccccagacgauggacggcauccugaaggccauccugaaggugaagcgcacccucgggauguucgucuccgacaccccgggcgagcggaaccccuacgagaacauccuguacaagaucugccugagcggggacggcuggcccuacaucgccucccgcaccagcaucacggggcgggccugggagaacaccgugguggaccucgaguccgacggcaagccccagaaggucggcaacaacgggagcaacaagucccugcagagcgcgggcuucuccgccgggcugaccuacagccagcucaugacccugaaggacgccaugcugcagcuggacccgaacacgaagaccuggauggacaucgagggccgccccgaggaccccguggaggucgcccucuaccagcccuccagcgggugcuacauccacuucuuccgggagccgaccgaccugaagcaguucaagcaggacgccaaguacucccacggcaucgacgugaccgaccuguucgcggcccagcccggccucacgagcgccgugaucgaggcccugccccgcaacauggucaucacgugccagggguccgaggacauccgcaagcugcucgagagccagggccggaaggacaucaagcugaucgacaucgcccuguccaaggcggacagccgcaaguacgagaacgccgugugggaccagugcaaggaccucugccacaugcacaccgggaucguggucgagaagaagaagcggggcgggaaggaggagaucacgccccacugcgcccugauggacugcaucauguucgacgccgcggugagcggcggccugaacacccaggugcuccgcgccguccugccgcgggacaugguguuccgcaccuccacccccaaggugguccuguga

SEQ ID NO: 8269 - RNA, 1710 nt, Artificial Sequence
  derived and/or modified CDS sequence (opt1) from LASV(GUINEA Z-185a;Clade IV)__AMZ00376__NP
augagcguguccaaggagaucaagagcuuccuguggacccagucccuccgccgggagcugagcggcuacugcuccaacaucaagcugcaggucgugaaggacgcccaggcccuccugcacgggcuggacuucagcgagguguccaacguccagcgccucaugcggaagcagcgccgggacgacaacgaccugaagcgccugcgggaccucaaccaggcggugaacaaccugguggagcucaagagcacccagcagaaguccguccugcgcgugggcacgcugaccagcgacgaccugcucauccuggccgccgaccuggagaagcucaaguccaaggugacccggaccgagcgcccccugagcgccggggucuacaugggcaaccuguccagccagcagcucgaccagcggcgcgcccugcugaacaugaucgggauguccggcggcaaccagggggcgcagacgggccgggacgggguggugcgcaucugggacgucaagaacgccgagcuccugaacaaccaguucggcaccaugccgagccugacccucgccugccugaccaagcagggccagguggaccugaacgacgugguccaggcccucacggaccuggggcugaucuacaccgcgaaguaccccaacaccuccgaccucgaccggcugacccagagccaccccauccugaacaugaucgacacgaagaaguccagccucaacaucagcggcuacaacuucucccugggggccgccgugaaggccggcgccugcaugcuggacgggggcaacaugcucgagaccaucaaggugagcccccagaccauggacggcauccugaaguccauccugaaggucaagaaggcgcucgggauguucaucagcgacaccccgggcgagcgcaaccccuacgagaacauccuguacaagaucugccuguccggggacggcuggcccuacaucgccagccggacguccaucaccgggcgcgccugggagaacaccgugguggaccucgagagcggcgagaagccccagaagaucggcuccaacaacagcaacaagugccugcaguccgccggguucaccgccggccugagcuacucccagcucaugacgcugaaggacgcgaugcugcagcuggacccgaacgccaagaccuggauggacaucgaggggcggcccgaggaccccgucgagaucgcccucuaccagcccagcuccggcugcuacauccacuucuuccgcgagccgaccgaccugaagcaguucaagcaggacgccaaguacagccacgggaucgacgugaccgaccuguucgccgcgcagcccggccucacguccgccgugaucgaggcccugccccggaacauggucaugaccugccagggcagcgacgacauccgcaagcugcucgagucccaggggcgcaaggacaucaagcugaucgacaucgcccugagcaagaccgacagccggaaguacgagaacgccgugugggaccaguacaaggaccucugccacaugcacaccggcgucgugguggagaagaagaagaagggcgggaaggaggagaucacgccccacugcgcgcugauggacugcaucauguucgacgccgccgucuccgggggccugaacaccagcgugcuccgcgccgugcugccgcgggacauggucuuccgcaccuccacccccaagguggugcuguga

SEQ ID NO: 8270 - RNA, 1710 nt, Artificial Sequence
  derived and/or modified CDS sequence (opt1) from MOPV/LASV reassortant(IGS-1;Clade IV)__AFY05578__NP
augagcgccuccaaggagaucaagagcuuccuguggacccagucccuccgccgggagcugagcggcuacugcuccaacaucaagcuccagguggucaaggacgcccaggcgcugcugcacgggcuggacuucagcgagguguccaacgugcagcgccucaugcggaaggagcgccgggacgacaacgaccugaagcgccugcgggaccucaaccaggccgucaacaaccugguggagcucaagagcacccagcagaaguccauccugcgcgugggcacccugaccagcgacgaccugcucauccuggccgccgaccuggagaagcuccgguccaaggucauccgcaccgagcggccccugagcgccgggguguacaugggcaaccuguccagccagcagcucgaccagcgccgggcgcugcugaacaugaucgggauguccggcggcaaccagggggcccgcgccggccgggacggggugguccgcgugugggacgugaagaacgccgagcuccugagcaaccaguucggcaccaugccgucccugacgcucgcgugccugaccaagcaggggcaggucgaccugaacgacgccgugcaggcccucaccgaccugggccugaucuacaccgccaaguaccccaacacgagcgaccucgaccggcugacccagucccaccccauccugaacaugaucgacaccaagaaguccagccucaacaucuccggcuacaacuucagccugggggccgcggugaaggccggcgccugcaugcuggacgggggcaacaugcucgagaccaucaaggucagcccccagacgauggacggcauccucaagagcauccugaaggugaagaaggcccuggggauguucaucuccgacaccccgggcgagcgcaaccccuacgagaacauccuguacaagaucugccugagcggggacggcuggcccuacaucgccucccggaccagcaucaccgggcgcgcgugggagaacacgguggucgaccucgaguccgacggcaagccccagaaggccgacagcaacaacuccagcaagucccugcagagcgccggcuucaccgccgggcugaccuacucccagcucaugacccugaaggacgccaugcugcagcuggacccgaacgcgaagacguggauggacaucgagggccggcccgaggaccccguggagaucgcccucuaccagcccagcuccgggugcuacauccacuucuuccgcgagccgaccgaccugaagcaguucaagcaggacgccaaguacagccacggcaucgacgugaccgaccuguucgccacccagcccgggcucacguccgccgucaucgacgcgcugccccgcaacauggugaucacgugccagggcagcgacgacauccggaagcugcucgagagccagggccgcaaggacaucaagcugaucgacaucgaccuguccaagaccgacagccggaaguacgagaacgccgugugggaccaguacaaggaccucugccacaugcacaccggggucguggucgagaagaagaagcgcggcgggaaggaggagaucaccccgcacugcgcccugauggacugcaucauguucgacgccgcgguguccggcgggcugaacaccagcgugcuccgggccguccugccccgcgacaugguguuccggaccuccacgccccgcgugguccuguga

SEQ ID NO: 8271 - RNA, 1710 nt, Artificial Sequence
  derived and/or modified CDS sequence (opt1) from MOPV/LASV reassortant(IGS-11;Clade IV)__AFY05589__NP
augagcgccuccaaggagaucaagagcuuccuguggacccagucccuccgccgggagcugagcggcuacugcuccaacaucaagcuccagguggucaaggacgcccaggcgcugcugcacgggcuggacuucagcgagguguccaacgugcagcgccucaugcggaaggagcgccgggacgacaacgaccugaagcgccugcgggaccucaaccaggccgucaacaaccugguggagcucaagagcacccagcagaaguccauccugcgcgugggcacccugaccagcgacgaccugcucauccuggccgccgaccuggagaagcucaaguccaaggucauccggaccgagcgcccccugagcgccgggguguacaugggcaaccuguccagccagcagcucgaccagcggcgcgcgcugcugaacaugaucgggauguccggcggcaaccagggggcccgggccggccgcgacggggugguccgggugugggacgugaagaacgccgagcuccugagcaaccaguucggcaccaugccgucccugacgcucgcgugccugaccaagcaggggcaggucgaccugaacgacgccgugcaggcccucaccgaccugggccugaucuacaccgccaaguaccccaacacgagcgaccucgaccgccugacccagucccaccccauccugaacaugaucgacaccaagaaguccagccucaacaucuccggcuacaacuucagccugggggccgcggugaaggccggcgccugcaugcuggacgggggcaacaugcucgagaccaucaaggucagcccccagacgauggacggcauccucaagagcauccugaaggugaagaaggcccuggggauguucaucuccgacaccccgggcgagcggaaccccuacgagaacauccuguacaagaucugccugagcggggacggcuggcccuacaucgccucccgcaccagcaucaccgggcgggcgugggagaacacgguggucgaccucgaguccgacggcaagccccagaaggccgacagcaacaacuccagcaagucccugcagagcgccggcuucaccgccgggcugaccuacucccagcucaugacccugaaggacgccaugcugcagcuggacccgaacgcgaagacguggauggacaucgagggccgccccgaggaccccguggagaucgcccucuaccagcccagcuccgggugcuacauccacuucuuccgggagccgaccgaccugaagcaguucaagcaggacgccaaguacagccacggcaucgacgugaccgaccuguucgccacccagcccgggcucacguccgccgucaucgacgcgcugccccgcaacauggugaucacgugccagggcagcgacgacauccgcaagcugcucgagagccagggccggaaggacaucaagcugaucgacaucgaccuguccaagaccgacagccgcaaguacgagaacgccgugugggaccaguacaaggaccucugccacaugcacaccggggucguggucgagaagaagaagcggggcgggaaggaggagaucaccccgcacugcgcccugauggacugcaucauguucgacgccgcgguguccggcgggcugaacaccagcgugcuccgcgccguccugccccgggacaugguguuccgcaccuccacgccccgggugguccuguga

SEQ ID NO: 8272 - RNA, 1710 nt, Artificial Sequence
  derived and/or modified CDS sequence (opt1) from MOPV/LASV reassortant(IGS-12;Clade IV)__AFY05591__NP
augagcgccuccaaggagaucaagagcuuccuguggacccagucccuccgccgggagcugagcggcuacugcuccaacaucaagcuccagguggucaaggacgcccaggcgcugcugcacgggcuggacuucagcgagguguccaacgugcagcgccucaugcggaaggagcgccgggacgacaacgaccugaagcgccugcgggaccucaaccaggccgucaacaaccugguggagcucaagagcacccagcagaaguccauccugcgcgugggcacccugaccagcgacgaccugcucauccuggccgccgaccuggagaagcucaaguccaaggucauccggaccgagcgcccccugagcgccgggguguacaugggcaaccuguccagccagcagcucgaccagcggcgcgcgcugcugaacaugaucgggauguccggcggcaaccagggggcccgggccggccgcgacggggugguccgggugugggacgugaagaacgucgagcuccugagcaaccaguucggcaccaugccgucccugacgcucgccugccugaccaagcagggccagguggaccugaacgacgcggugcaggcccucaccgaccuggggcugaucuacaccgccaaguaccccaacacgagcgaccucgaccgccuggcccagucccaccccauccugaacaugaucgacaccaagaaguccagccucaacaucuccggcuacaacuucagccugggggccgcggucaaggccggcgccugcaugcuggacgggggcaacaugcucgagaccaucaaggugagcccccagaccauggacggcauccucaagagcauccugaaggugaagaaggcccuggggauguucaucuccgacacgccgggcgagcggaaccccuacgagaacauccuguacaagaucugccugagcggggacggcuggcccuacaucgccucccgcaccagcaucaccgggcgggcgugggagaacaccgucguggaccucgaguccgacggcaagccccagaaggccgacagcaacaacuccagcaagucccugcagagcgccggcuucacggccgggcugaccuacucccagcucaugacccugaaggacgccaugcugcagcuggacccgaacgcgaagaccuggauggacaucgagggccgccccgaggaccccguggagaucgcccucuaccagcccagcuccgggugcuacauccacuucuuccgggagccgacggaccugaagcaguucaagcaggacgccaaguacagccacggcaucgacgucaccgaccuguucgccacccagcccgggcucaccuccgccgugaucgacgcgcugccccgcaacauggugaucacgugccagggcagcgacgacauccgcaagcugcucgagagccagggccggaaggacaucaagcugaucgacaucgaccuguccaagaccgacagccgcaaguacgagaacgccgucugggaccaguacaaggaccucugccacaugcacaccgggguggucguggagaagaagaagcggggcgggaaggaggagaucacgccccacugcgcccugauggacugcaucauguucgacgccgcgguguccggcgggcugaacaccagcguccuccgcgccgugcugccgcgggacaugguguuccgcaccuccacgccccgggucgugcuguga

SEQ ID NO: 8273 - RNA, 1710 nt, Artificial Sequence
  derived and/or modified CDS sequence (opt1) from MOPV/LASV reassortant(IGS-14;Clade IV)__AFY05595__NP
augagcgccuccaaggagaucaagagcuuccuguggacccagucccuccgccgggagcugagcggcuacugcuccaacaucaagcuccagguggucaaggacgcccaggcgcugcugcacgggcuggacuucagcgagguguccaacgugcagcgccucaugcggaaggagcgccgggacgacaacgaccugaagcgccugcgggaccucaaccaggccgucaacaaccugguggagcucaagagcacccagcagaaguccauccugcgcgugggcacccugaccagcgacgaccugcucauccuggccgccgaccuggagaagcucaaguccaaggucauccggaccgagcgcccccugagcgccgggguguacaugggcaaccuguccagccagcagcucgaccagcggcgcgcgcugcugaacaugaucgggauguccggcggcaaccagggggcccgggccggccgcgacggggugguccgggugugggacgugaagaacgccgagcuccugagcaaccaguucggcaccaugccgucccugacgcucgcgugccugaccaagcaggggcaggucgaccugaacgacgccgugcaggcccucaccgaccugggccugaucuacaccgccaaguaccccaacacgagcgaccucgaccgccuggcccagucccaccccauccugaacaugaucgacaccaagaaguccagccucaacaucuccggcuacaacuucagccugggggcggccgugaaggccggcgccugcaugcuggacgggggcaacaugcucgagaccaucaaggucagcccccagaccauggacggcauccucaagagcauccugaaggugaagaaggcccuggggauguucaucuccgacacgccgggcgagcggaaccccuacgagaacauccuguacaagaucugccugagcggggacggcuggcccuacaucgcgucccgcaccagcaucaccgggcgggccugggagaacaccguggucgaccucgaguccgacggcaagccccagaaggccgacagcaacaacuccagcaagucccugcagagcgccggcuucacggccgggcugaccuacucccagcucaugacccugaaggacgcgaugcugcagcuggacccgaacgccaagaccuggauggacaucgagggccgccccgaggaccccguggagaucgcccucuaccagcccagcuccgggugcuacauccacuucuuccgggagccgacggaccugaagcaguucaagcaggacgccaaguacagccacggcaucgacgugaccgaccuguucgccacccagcccgggcucaccuccgcggucaucgacgcccugccccgcaacauggugaucacgugccagggcagcgacgacauccgcaagcugcucgagagccagggccggaaggacaucaagcugaucgacaucgaccuguccaagaccgacagccgcaaguacgagaacgccgugugggaccaguacaaggaccucugccacaugcacaccggggucguggucgagaagaagaagcggggcgggaaggaggagaucacgccccacugcgcccugauggacugcaucauguucgacgcggccguguccggcgggcugaacaccagcgugcuccgcgccguccugccgcgggacaugguguuccgcaccuccacgccccgggugguccuguga

SEQ ID NO: 8274 - RNA, 1710 nt, Artificial Sequence
  derived and/or modified CDS sequence (opt1) from MOPV/LASV reassortant(IGS-23;Clade IV)__AFY05610__NP
augagcgccuccaaggagaucaagagcuuccuguggacccagucccuccgccgggagcugagcggcuacugcuccaacaucaagcuccagguggucaaggacgcccaggcgcugcugcacgggcuggacuucagcgagguguccaacgugcagcgccucaugcggaaggagcgccgggacgacaacgaccugaagcgccugcgggaccucaaccaggccgucaacaaccugguggagcucaagagcacccagcagaaguccauccugcgcgugggcacgcugaccagcgacgaccugcucauccuggccgccgaccuggagaagcucaaguccaaggucauccggaccgagcgcccccugagcgccgggguguacaugggcaaccuguccagccagcagcucgaccagcggcgcgcgcugcugaacaugaucgggauguccggcggcaaccagggggcccgggccggccgcgacggggugguccgggugugggacgugaagaacgccgagcuccugagcaaccaguucggcaccaugccgucccugacgcucgcgugccugaccaagcaggggcaggucgaccugaacgacgccgugcaggcccucaccgaccugggccugaucuacaccgccaaguaccccaacacgagcgaccucgaccgccugacccagucccaccccauccugaacaugaucgacaccaagaaguccagccucaacaucuccggcuacaacuucagccugggggccgcggugaaggccggcgccugcaugcuggacgggggcaacaugcucgagaccaucaaggucagcccccagacgauggacggcauccucaagagcauccugaaggugaagaaggcccuggggauguucaucuccgacaccccgggcgagcggaaccccuacgagaacauccuguacaagaucugccugagcggggacggcuggcccuacaucgccucccgcaccagcaucaccgggcgggcgugggagaacacgguggucgaccucgaguccgacggcaagccccagaaggccgacagcaacaacuccagcaagucccugcagagcgccggcuucaccgccgggcugaccuacucccagcucaugacccugaaggacgccaugcugcagcuggacccgaacacgaagaccuggauggacaucgagggccgccccgaggaccccguggagaucgcgcucuaccagcccagcuccgggugcuacauccacuucuuccgggagccgaccgaccugaagcaguucaagcaggacgccaaguacagccacggcaucgacgugaccgaccuguucgccacgcagcccgggcucaccuccgccgucaucgacgcccugccccgcaacauggugaucacgugccagggcagcgacgacauccgcaagcugcucgagagccagggccggaaggacaucaagcugaucgacaucgaccuguccaagaccgacagccgcaaguacgagaacgcggugugggaccaguacaaggaccucugccacaugcacaccggggucguggucgagaagaagaagcggggcgggaaggaggagaucaccccgcacugcgcccugauggacugcaucauguucgacgccgccguguccggcgggcugaacaccagcgugcuccgcgcgguccugccccgggacaugguguuccgcaccuccacgccccgggugguccuguga

SEQ ID NO: 8275 - RNA, 1716 nt, Artificial Sequence
  derived and/or modified CDS sequence (opt1) from MOPV/LASV reassortant(IGS-27;Clade IV)__AFY05618__NP
augagcgccuccaaggagaucaagagcuuccuguggacccagucccuccgccgggagcugagcggcuacugcuccaacaucaagcuccagguggucaaggacgcccaggcgcugcugcacgggcuggacuucagcgagguguccaacgugcagcgccucaugcggaaggagcgccgggacgacaacgaccugaagcgccugcgggaccucaaccaggccgucaacaaccugguggagcucaagagcacccagcagaaguccauccugcgcgugggcacccugaccagcgacgaccugcucauccuggccgccgaccuggagaagcuccgguccaaggucauccgcaccgagcggccccugagcgccgggguguacaugggcaaccuguccagccagcagcucgaccagcgccgggcgcugcugaacaugaucgggauguccggcggcaaccagggggcccgcgccggccgggacggggugguccgcgugugggacgugaagaacgccgagcuccugagcaaccaguucggcaccaugccgucccugacgcucgcgugccugaccaagcaggggcaggucgaccugaacgacgccgugcaggcccucaccgaccugggccugaucuacaccgccaaguaccccaacacgagcgaccucgaccggcugacccagucccaccccauccugaacaugaucgacaccaagaaguccagccucaacaucuccggcuacaacuucagccugggggccgcggugaaggccggcgccugcaugcuggacgggggcaacaugcucgagaccaucaaggucagcccccagacgauggacggcauccucaagagcauccugaaggugaagaaggcccuggggauguucaucuccgacaccccgggcgagcgcaaccccuacgagaacauccuguacaagaucugccugagcggggacggcuggcccuacaucgccucccggaccagcaucaccgggcgcgcgugggagaacacgguggucgaccucgaguccgacggcaagccccagaaggccgacagcaacaacuccagcaagucccugcagagcgccggcuucaccgccgggcugaccuacucccagcucaugacccugaaggacgccaugcugcagcuggacccgaacgcgaagacguggauggacaucgagggccggcccgaggaccccguggagaucgcccucuaccagcccagcuccgggugcuacauccacuucuuccgcgagccgaccgaccugaagcagaagcaguucaagcaggacgccaaguacagccacggcaucgacgugaccgaccuguucgccacccagcccgggcucacguccgccgucaucgacgcgcugccccgcaacauggugaucacgugccagggcagcgacgacauccggaagcugcucgagagccagggccgcaaggacaucaagcugaucgacaucgaccuguccaagaccgacagccggaaguacgagaacgccgugugggaccaguacaaggaccucugccacaugcacaccggggucguggucgagaagaagaagcgcggcgggaaggaggagaucaccccgcacugcgcccugauggacugcaucauguucgacgccgcgguguccggcgggcugaacaccagcgugcuccgggccguccugccccgcgacaugguguuccggaccuccacgccccgcgugguccuguga

SEQ ID NO: 8276 - RNA, 1710 nt, Artificial Sequence
  derived and/or modified CDS sequence (opt1) from MOPV/LASV reassortant(IGS-3;Clade IV)__AFY05580__NP
augagcgccuccaaggagaucaagagcuuccuguggacccagucccuccgccgggagcugagcggcuacugcuccaacaucaagcuccagguggucaaggacgcccaggcgcugcugcacgggcuggacuucagcgagguguccaacgugcagcgccucaugcggaaggagcgccgggacgacaacgaccugaagcgccugcgggaccucaaccaggccgucaacaaccugguggagcucaagagcacccagcagaaguccauccugcgcgugggcacccugaccagcgacgaccugcucauccuggccgccgaccuggagaagcuccgguccaaggucauccgcaccgagcggccccugagcgccgggguguacaugggcaaccuguccagccagcagcucgaccagcgccgggcgcugcugaacaugaucgggauguccggcggcaaccagggggcccgcgccggccgggacggggugguccgcgugugggacgugaagaacgccgagcuccugagcaaccaguucggcaccaucccgucccugacgcucgcgugccugaccaagcaggggcaggucgaccugaacgacgccgugcaggcccucaccgaccugggccugaucuacaccgccaaguaccccaacacgagcgaccucgaccggcugacccagucccaccccauccugaacaugaucgacaccaagaaguccagccucaacaucuccggcuacaacuucagccugggggccgcggugaaggccggcgccugcaugcuggacgggggcaacaugcucgagaccaucaaggucagcccccagacgauggacggcauccucaagagcauccugaaggugaagaaggcccuggggauguucaucuccgacaccccgggcgagcgcaaccccuacgagaacauccuguacaagaucugccugagcggggacggcuggcccuacaucgccucccggaccagcaucaccgggcgcgcgugggagaacacgguggucgaccucgaguccggcggcaagccccagaaggccgacagcaacaacuccagcaagucccugcagagcgccggguucaccgccggccugaccuacucccagcucaugacccugaaggacgccaugcugcagcuggacccgaacgcgaagacguggauggacaucgaggggcggcccgaggaccccguggagaucgcccucuaccagcccagcuccggcugcuacauccacuucuuccgcgagccgaccgaccugaagcaguucaagcaggacgccaaguacagccacgggaucgacgugaccgaccuguucgccacccagcccggccucacguccgccgucaucgacgcgcugccccgcaacauggugaucacgugccagggcagcgacgacauccggaagcugcucgagagccaggggcgcaaggacaucaagcugaucgacaucgaccuguccaagaccgacagccggaaguacgagaacgccgugugggaccaguacaaggaccucugccacaugcacaccggcgucguggucgagaagaagaagcgcgggggcaaggaggagaucaccccgcacugcgcccugauggacugcaucauguucgacgccgcgguguccgggggccugaacaccagcgugcuccgggccguccugccccgcgacaugguguuccggaccuccacgccccgcgugguccuguga

SEQ ID NO: 8277 - RNA, 1710 nt, Artificial Sequence
  derived and/or modified CDS sequence (opt1) from MOPV/LASV reassortant(IGS-4;Clade IV)__AFY05581__NP
augagcgccuccaaggagaucaagagcuuccuguggacccagucccuccgccgggagcugagcggcuacugcuccaacaucaagcuccagguggucaaggacgcccaggcgcugcugcacgggcuggacuucagcgagguguccaacgugcagcgccucaugcggaaggagcgccgggacgacaacgaccugaagcgccugcgggaccucaaccaggccgucaacaaccugguggagcucaagagcacccagcagaaguccauccugcgcgugggcacccugaccagcgacgaccugcucauccuggccgccgaccuggagaagcucaaguccaaggucauccggaccgagcgcccccugagcgccgggguguacaugggcaaccuguccagccagcagcucgaccagcggcgcgcgcugcugaacaugaucgggauguccggcggcaaccagggggcccgggccggccgcgacggggugguccgggugugggacgugaagaacgccgagcuccugagcaaccaguucggcaccaucccgucccugacgcucgcgugccugaccaagcaggggcaggucgaccugaacgacgccgugcaggcccucaccgaccugggccugaucuacaccgccaaguaccccaacacgagcgaccucgaccgccugacccagucccaccccauccugaacaugaucgacaccaagaaguccagccucaacaucuccggcuacaacuucagccugggggccgcggugaaggccggcgccugcaugcuggacgggggcaacaugcucgagaccaucaaggucagcccccagacgauggacggcauccucaagagcauccugaaggugaagaaggcccuggggauguucaucuccgacaccccgggcgagcggaaccccuacgagaacauccuguacaagaucugccugagcggggacggcuggcccuacaucgccucccgcaccagcaucaccgggcgggcgugggagaacacgguggucgaccucgaguccggcggcaagccccagaaggccgacagcaacaacuccagcaagucccugcagagcgccggguucaccgccggccugaccuacucccagcucaugacccugaaggacgccaugcugcagcuggacccgaacgcgaagacguggauggacaucgaggggcgccccgaggaccccguggagaucgcccucuaccagcccagcuccggcugcuacauccacuucuuccgggagccgaccgaccugaagcaguucaagcaggacgccaaguacagccacgggaucgacgugaccgaccuguucgccacccagcccggccucacguccgccgucaucgacgcgcugccccgcaacauggugaucacgugccagggcagcgacgacauccgcaagcugcucgagagccaggggcggaaggacaucaagcugaucgacaucgaccuguccaagaccgacagccgcaaguacgagaacgccgugugggaccaguacaaggaccucugccacaugcacaccggcgucguggucgagaagaagaagcgcgggggcaaggaggagaucaccccgcacugcgcccugauggacugcaucauguucgacgccgcgguguccgggggccugaacaccagcgugcucaaggccguccugccccgggacaugguguuccggaccuccacgccccgcgugguccuguga

SEQ ID NO: 8278 - RNA, 1710 nt, Artificial Sequence
  derived and/or modified CDS sequence (opt1) from MOPV/LASV reassortant(IGS-9;Clade IV)__AFY05585__NP
augagcgccuccaaggagaucaagagcuuccuguggacccagucccuccgccgggagcugagcggcuacugcuccaacaucaagcuccagguggucaaggacgcccaggcgcugcugcacgggcuggacuucagcgagguguccaacgugcagcgccucaugcggaaggagcgccgggacgacaacgaccugaagcgccugcgggaccucaaccaggccgucaacaaccugguggagcucaagagcacccagcagaaguccauccugcgcgugggcacccugaccagcgacgaccugcucauccuggccgccgaccuggagaagcuccgguccaaggucauccgcaccgagcggccccugagcgccgggguguacaugggcaaccuguccagccagcagcucgaccagcgccgggcgcugcugaacaugaucgggauguccggcggcaaccagggggcccgcgccggccgggacggggugguccgcgugugggacgugaagaacgccgagcuccugagcaaccaguucggcaccaucccgucccugacgcucgcgugccugaccaagcaggggcaggucgaccugaacgacgccgugcaggcccucaccgaccugggccugaucuacaccgccaaguaccccaacacgagcgaccucgaccggcugacccagucccaccccauccugaacaugaucgacaccaagaaguccagccucaacaucuccggcuacaacuucagccugggggccgcggugaaggccggcgccugcaugcuggacgggggcaacaugcucgagaccaucaaggucagcccccagacgauggacggcauccucaagagcauccugaaggugaagaaggcccuggggauguucaucuccgacaccccgggcgagcgcaaccccuacgagaacauccuguacaagaucugccugagcggggacggcuggcccuacaucgccucccggaccagcaucaccgggcgcgcgugggagaacacgguggucgaccucgaguccgacggcaagccccagaaggccgacagcaacaacuccagcaagucccugcagagcgccggcuucaccgccgggcugaccuacucccagcucaugacccugaaggacgccaugcugcagcuggacccgaacgcgaagacguggauggacaucgagggccggcccgaggaccccguggagaucgcccucuaccagcccagcuccgggugcuacauccacuucuuccgcgagccgaccgaccugaagcaguucaagcaggacgccaaguacagccacggcaucgacgugaccgaccuguucgccacccagcccgggcucacguccgccgucaucgacgcgcugccccgcaacauggugaucacgugccagggcagcgacgacauccggaagcugcucgagagccagggccgcaaggacaucaagcugaucgacaucgaccuguccaagaccgacagccggaaguacgagaacgccgugugggaccaguacaaggaccucugccacaugcacaccggggucguggucgagaagaagaagcgcggcgggaaggaggagaucaccccgcacugcgcccugauggacugcaucauguucgacgccgcgguguccggcgggcugaacaccagcgugcuccgggccguccugccccgcgacaugguguuccggaccuccacgccccgcgugguccuguga

SEQ ID NO: 8279 - RNA, 1710 nt, Artificial Sequence
  derived and/or modified CDS sequence (opt1) from LASV(LM032-SLE-2010;Clade IV)__AIT17803__NP
augagcgccuccaaggagaucaagagcuuccuguggacccagucccuccgccgggagcugagcggcuacugcuccaacaucaagcuccagguggucaaggacgcccaggcgcugcugcacgggcuggacuucagcgagguguccaacgugcagcgccucaugcggaaggagcgccgggacgacaacgaccugaagcgccugcgggaccucaaccaggccgucaacaaccugguggagcucaagagcacccagcagaaguccauccugcgcgugggcacccugaccagcgacgaccugcucauccuggccgccgaccuggagaagcucaaguccaaggucauccggaccgagcgcccccugagcgccgggguguacaugggcaaccuguccagccagcagcucgaccagcggcgcgcgcugcuguccaugaucgggaugagcggcggcucccaggaggcccgggccgggcgcgacggcgugguccgggugugggacgugaagaacgccgagcuccugaacaaccaguucgggaccaugccgagccugacgcucgcgugccugaccaagcagggccaggucgaccugaacgacgccgugcaggcccucaccgaccuggggcugaucuacaccgccaaguaccccaacacguccgaccucgaccgccugacccagagccaccccauccugaacaugaucgacaccaagaaguccagccucaacaucagcggcuacaacuucucccugggcgccgcggugaaggccggggccugcaugcuggacggcgggaacaugcucgagaccaucaaggucagcccccagacgguggacggcauccugaaguccauccugaaggugaagaaggcccucggcauguucaucagcgacaccccgggggagcggaaccccuacgagaacauccuguacaagaucugccuguccggcgacggguggcccuacaucgccagccgcaccuccaucaccggccgggcgugggagaacacggucguggaccucgagagcgacgggaagccccagaaggccggcuccaacaacagcaacaagucccugcagagcgccggcuucaccgccgggcugaccuacucccagcucaugacccugaaggacgccaugcugcagcuggacccgaacgcgaagacguggauggacaucgagggccgccccgaggaccccguggagaucgcccucuaccagcccagcuccgggugcuacauccacuucuuccgggagccgaccgaccugaagcaguucaagcaggacgccaaguacagccacggcaucgacgucaccgaccuguucgccgcccagcccgggcucaccuccgcggugaucgacgcccugccccgcaacauggugaucacgugccagggcagcgacgacauccgcaagcugcucgagagccagggccggaaggacaucaagcugaucgacaucgcccuguccaagaccgacagccgcaaguacgagaacgccgucugggaccaguacaaggaccucugccacaugcacaccgggguggucguggagaagaagaagaagggcgggaaggaggagaucacgccccacugcgcgcugauggacugcaucauguucgacgccgccguguccggcgggcugaacaccagcguccuccgggccgugcugccgcgcgacaugguguuccggaccuccacgccccgcgucgugcuguga

SEQ ID NO: 8280 - RNA, 1710 nt, Artificial Sequence
  derived and/or modified CDS sequence (opt1) from LASV(LM395-SLE-2009;Clade IV)__AIT17811__NP
augagcgccuccaaggagaucaagagcuuccuguggacccagucccuccgccgggagcugagcggcuacugcuccaacaucaagcuccagguggucaaggacgcccaggcgcugcugcacgggcuggacuucagcgagguguccaacgugcagcgccucaugcggaaggagcgccgggacgacaacgaccugaagcgccugcgggaccucaaccaggccgucaacaaccugguggagcucaagagcacccagcagaaguccauccugcgcgugggcacccugaccagcgacgaccugcucauccuggccgccgaccuggagaagcucaaguccaaggucacccggaccgagcgcccccugagcgccgggguguacaugggcaaccuguccagccagcagcucgaccagcggcgcgcgcugcugaacaugaucgggauguccggcagcaaccagggcgcccgggccgggcgcgacggcgugguccgggugugggacgugaagaacgccgagcuccugaacaaccaguucgggacgaugccgucccugacccucgcgugccugaccaagcagggccaggucgaccugaacgacgccgugcaggcccucaccgaccuggggcugaucuacacggccaaguaccccaacaccagcgaccucgaccgccugacccagucccaccccauccugaacaugaucgacaccaagaaguccagccucaacaucuccggcuacaacuucagccugggcgccgcggugaaggccggggccugcaugcuggacggcgggaacaugcucgagacgaucaaggucagcccccagaccauggacggcauccucaagagcauccugaaggugaagaaggcccugggcauguucaucuccgacaccccgggggagcggaaccccuacgagaacauccuguacaagaucugccugagcggcgacggguggcccuacaucgccucccgcaccagcaucacgggccgggcgugggagaacaccguggucgaccucgaguccgacgggaagccccagaaggccggcagcaacggcuccaacaagagccugcaguccgccggguucaccgccggccugaccuacagccagcucaugacgcugaaggacgccaugcugcagcuggacccgaacgcgaagaccuggauggacaucgaggggcgccccgaggaccccguggagaucgccuucuaccagcccuccagcggcugcuacauccacuucuuccgggagccgaccgaccucaagcaguucaagcaggacgccaaguacucccacgggaucgacgugaccgaccuguucgccgcccagcccggccugacgagcgcggucaucgacgcccucccccgcaaccuggugaucacgugccagggcuccgacgacauccgcaagcuguucgagagccaggggcggaaggacaucaagcucaucgacaucgcccugagcaagaccgacucccgcaaguacgagaacgccgugugggaccaguacaaggaccugugccacaugcacaccggcaucgucguggagaagaagaagcgcgggggcaaggaggagaucaccccgcacugcgcgcucauggacugcaucauguucgacgccgccgucagcgggggccugaacgccuccgugcugcgggccgugcucccccgggacauggucuuccgcaccagcacgccccggguggugcuguga

SEQ ID NO: 8281 - RNA, 1710 nt, Artificial Sequence
  derived and/or modified CDS sequence (opt1) from LASV(LM765-SLE-2012;Clade IV)__AIT17815__NP
augagcgccuccaaggagaucaagagcuuccuguggacccagucccuccgccgggagcugagcggcuacugcuccaacaucaagcuccagguggucaaggacgcccaggcgcugcugcacgggcuggacuucagcgagguguccaacgugcagcgccucaugcggaaggagcgccgggacgacaacgaccugaagcgccugcgggaccucaaccaggccgucaacaaccugguggagcucaagagcacccagcagaaguccauccugcgcgugggcacccugaccagcgacgaccugcucauccuggccgccgaccuggagaagcucaaguccaaggucacccggaccgagcgcccccugagcgccgggguguacaugggcaaccuguccagccagcagcucgaccagcggcgcgcgcugcuggacaugaucgggauguccggcagcaaccagggcgcccgggccgggcgcgacggcgugguccgggugugggacgugaagaacgccgagcuccugaacaaccaguucgggacgaugccgucccugacccucgcgugccugaccaagcagggccaggucgaccugaacgacgccgugcaggcccucaccgaccuggggcugaucuacacggccaaguaccccaacaccagcgaccucgaccgccugacccagucccaccccauccugaacaugaucgacaccaagaaguccagccucaacaucuccggcuacaacuucagccugggcgccgcggugaaggccggggccugcaugcuggacggcgggaacaugcucgagacgaucaaggucagcccccagaccauggacggcauccucaagagcauccugaaggugaagaaggcccugggcauguucaucuccgacgccccgggggagcggaaccccuacgagaacauccuguacaagaucugccugagcggcgacggguggcccuacaucgcgucccgcaccagcaucaccggccgggccugggagaacacgguggucgaccucgaguccgacgggaagccccagaaggccggcagcaacggcuccaacaagagccugcaguccgccggguucaccgccggccugaccuacagccagcucaugacccugaaggacgcgaugcugcagcuggacccgaacgccaagacguggauggacaucgaggggcgccccgaggaccccguggagaucgcccucuaccagcccuccagcggcugcuacauccacuucuuccgggagccgaccgaccugaagcaguucaagcaggacgccaaguacucccacgggaucgacgugaccgaccuguucgccgcgcagcccggccucaccagcgccgucaucgacgcccugccccgcaacauggugaucacgugccagggcuccgacgacauccgcaagcuguucgagagccaggggcggaaggacaucaagcucaucgacaucgcccugagcaagaccgacucccgcaaguacgagaacgcggugugggaccaguacaaggaccugugccacaugcacaccggcaucgucguggagaagaagaagcgcgggggcaaggaggagaucacgccccacugcgcccucauggacugcaucauguucgacgccgccgucagcgggggccugaacaccuccgugcugcgggccgugcucccgcgggacauggucuuccgcaccagcacgccccggguggugcuguga

SEQ ID NO: 8282 - RNA, 1710 nt, Artificial Sequence
  derived and/or modified CDS sequence (opt1) from LASV(LM774-SLE-2012;Clade IV)__AIT17821__NP
augagcgccuccaaggagaucaagagcuuccuguggacccagucccuccgccgggagcugagcggcuacugcuccaacaucaagcuccagguggucaaggacgcccaggcgcugcugcacgggcuggacuucagcgagguguccaacgugcagcgccucaugcggaaggagcgccgggacgacaacgaccugaagcgccugcgggaccucaaccaggccgucaacaaccugguggagcucaagagcacccagcagaaguccauccugcgcgugggcacccugaccagcgacgaccugcucauccuggccgccgaccuggagaagcucaaguccaaggucauccggaccgagcgcccccugagcgccgggguguacaugggcaaccuguccagccagcagcucgaccagcggcgcgcgcugcuguccaugaucgggaugagcggcggcaaccagggggcccgggccggccgcgacggggugguccgggugugggacgugaagaacgccgagcuccugaacaaccaguucggcaccaugccgucccugacgcucgcgugccugaccaagcaggggcaggucgaccugaacgacgccgugcaggcccucaccgaccugggccugaucuacaccgccaaguaccccaacacgagcgaccucgaccgccugacccagucccaccccauccugaacaugaucgacaccaagaaguccagccucaacaucuccggcuacaacuucagccugggggccgcggugaaggccggcgccugcaugcuggacgggggcaacaugcucgagaccaucaaggucagcccccagacgguggacggcauccucaagagcauccugaaggugaagaaggcccuggggauguucaucuccgacaccccgggcgagcggaaccccuacgagaacauccuguacaagaucugccugagcggggacggcuggcccuacaucgccucccgcaccagcaucaccgggcgggcgugggagaacacggucguggaccucgaguccgacggcaagccccagaagaccggcagcaacaacuccaacaagagccugcaguccgccggguucaccgccggccugaccuacagccagcucaugacgcugaaggacgccaugcugcagcuggacccgaacgccaagaccuggauggacaucgaggggcgccccgaggaccccguggaggucgcgcucuaccagcccuccagcggcugcuacauccacuucuuccgggagccgaccgaccugaagcaguucaagcaggacgccaaguacucccacgggaucgacgugaccgaccuguucgccgcccagcccggccucacgagcgccgugaucgacgcgcugccccgcaacauggucaucacgugccagggcuccgacgacauccgcaagcugcucgagagccaggggcggaaggacaucaagcugaucgacaucgcccugagcaagaccgacucccgcaaguacgagaacgccgugugggaccaguacaaggaccucugccacaugcacaccggcgucgugguggagaagaagaagcgcgggggcaaggaggagaucaccccgcacugcgcccugauggacugcaucauguucgacgcggccgucagcgggggccugaacaccuccgugcuccgggccgugcugccccgggacauggucuuccgcaccagcacgccccggguggugcuguga

SEQ ID NO: 8283 - RNA, 1710 nt, Artificial Sequence; identical to SEQ ID NO: 8231
  derived and/or modified CDS sequence (opt1) from LASV(LM776-SLE-2012;Clade IV)__AIT17825__NP

SEQ ID NO: 8284 - RNA, 1710 nt, Artificial Sequence
  derived and/or modified CDS sequence (opt1) from LASV(Mad39;Clade IV)__ANH09723__NP
augagcgccuccaaggagaucaagagcuuccuguggacccagucccuccgccgggagcugagcggcuacugcuccaacaucaagcuccagguggucaaggacgcccaggcgcugcugcacgggcuggacuucagcgagguguccaacgugcagcgccucaugcggaagcagcgccgggacgacaacgaccugaagcgccugcgggaccucaaccaggccgucaacaaccugguggagcugaaguccacccagcagaaguccgugcuccgcgucggcacgcugaccagcgacgaccugcucacccuggccgccgaccuggagaagcucaaguccaaggugacccggacggagcgcccccugaccgccgggguguacaugggcaaccugagcucccagcagcucgaccagcggcgcgcgcugcugaacaugaucgggaugagcggcggcaaccagggggcccggaccggccgcgacggggucgugcgggugugggacgucaagaacgccgagcuccugaacaaccaguucggcaccaugccgucccugacgcucgccugccugaccaagcagggccagguggaccugaacgacgugguccaggcgcucaccgaccuggggcugaucuacaccgccaaguaccccaacacgagcgaccucgaccgccugacccagucccaccccauccugaacaugaucgacaccaacaagagcucccucaacaucagcggcuacaacuucagccugggggccgccgugaaggccggcgcgugcaugcuggacgggggcaacaugcucgagaccaucaaggugagcccccagacgauggacggcauccucaagagcauccugaaggucaagaagucccuggggauguucaucagcgacaccccgggcgagcggaaccccuacgagaacauccuguacaagaucugccuguccggggacggcuggcccuacaucgccagccgcaccuccaucaccgggcgggccugggagaacacggugguggaccucgagagcggcggcaagccccagaaggccggguccaacaacagcaacaagucccugcagagcgccggcuucgcggccgggcugaccuacucccagcucaugacccugaaggacgccaugcugcagcuggacccgaacgccaagaccuggauggacaucgagggccgccccgaggaccccgucgagaucgcccucuaccagcccaucagcgggugcuacauccacuucuuccgggagccgacggaccugaagcaguucaagcaggacgcgaaguacucccacggcaucgacgugaccgaccuguucgccgcccagcccggccucaccagcgccgugaucgaggcccugccccgcaacauggucaucacgugccagggguccgacgacauccgcaagcuguucgagagccagggccggaaggacaucaagcucaucgacaucgcgcuguccaagaccgacagccgcaaguacgagaacgccgugugggaccaguacaaggaccugugccacaugcacaccggggucgugguggagaagaagaagaagggcgggaaggaggagaucacgccccacugcgcccucauggacugcaucauguucgacgccgcggucagcggcggccugaacacccuggugcuccgggccgugcugccgcgcgacauggucuuccggaccuccacccccaagguggugcuguga

SEQ ID NO: 8285 - RNA, 1710 nt, Artificial Sequence
  derived and/or modified CDS sequence (opt1) from LASV(Mad41;Clade IV)__ANH09725__NP
augagcgccuccaaggagaucaagagcuuccuguggacccagucccuccgccgggagcugagcggcuacugcuccaacaucaagcuccagguggucaaggacgcccaggcgcugcugcacgggcuggacuucagcgagguguccaacgugcagcgccucaugcggaagcagcgccgggacgacaacgaccugaagcgccugcgggaccucaaccaggccgucaacaaccugguggagcucaagagcacccagcagaaguccgugcugcgcgucggcacgcugaccagcgacgaccugcucauccuggccgccgaccuggagaagcucaaguccaaggugacccggaccgagcgcccccugagcgccgggguguacaugggcaaccuguccagccagcagcucgaccagcggcgcgcgcugcugaacaugaucgggauguccggcggcaaccagggggcccgggccggccgcgacggggucgugcgggugugggacgucaagaacgccgaccuccugaacaaccaguucggcacgaugccgagccugacccucgcgugccugaccaagcagggccagguggaccugaacgacgugguccaggcccucaccgaccuggggcugaucuacacggccaaguaccccaacaccuccgaccucgaccgccugacccagagccaccccauccugaacaugaucgacaccaacaaguccagccucaacaucagcggcuacaacuucucccugggggccgccgugaaggcgggcgccugcaugcuggacgggggcaacaugcucgagacgaucaaggugagcccccagaccauggacggcauccugaaguccauccugaaggucaagaagucccucgggauguucaucagcgacaccccgggcgagcggaaccccuacgagaacauccuguacaagaucugccugagcggggacggcuggcccuacaucgccucccgcaccagcaucacggggcgggccugggagaacaccgugguggaccucgaguccggcggcaagccccagaaggccgggagcaacaacuccaacaagagccugcaguccgcgggcuucgccgccgggcugaccuacagccagcucaugacccugaaggacgccaugcugcagcuggacccgaacgccaagacguggauggacaucgagggccgccccgaggaccccgucgagaucgcgcucuaccagcccaucuccgggugcuacauccacuucuuccgggagccgaccgaccugaagcaguucaagcaggacgccaaguacagccacggcaucgacgugaccgaccuguucgccgcccagcccggccucaccuccgccgugaucgaggcgcugccccgcaacauggucaucacgugccaggggagcgacgacauccgcaagcugcucgagucccagggccggaaggacaucaagcugaucgacaucgcccugagcaagaccgacagccgcaaguacgagaacgccgugugggaccaguacaaggaccucugccacaugcacaccggggucgugguggagaagaagaagcggggcgggaaggaggagaucacgccccacugcgcccugauggacugcaucauguucgacgcggccgucuccggcggccugaacacccucgugcugcgcgccgugcugccgcgggacauggucuuccgcaccagcacccccaagguggugcucuga

SEQ ID NO: 8286 - RNA, 1710 nt, Artificial Sequence
  derived and/or modified CDS sequence (opt1) from LASV(Mad63;Clade IV)__ANH09729__NP
augagcgccuccaaggagaucaagagcuuccuguggacccagucccuccgccgggagcugagcggcuacugcuccaacaucaagcuccagguggucaaggacgcccaggcgcugcugcacgggcuggacuucagcgagguguccaacgugcagcgccucaugcggaagcagcgccgggacgacagcgaccugaagcgccugcgggaccucaaccaggccgucaacaaccugguggagcugaaguccacccagcagaaguccgugcuccgcgucggcacgcugaccuccgacgaccugcucacccuggccgccgaccuggagaagcucaagagcaaggugacccggacggagcgcccccuguccgccgggguguacaugggcaaccugagcucccagcagcucgaccagcggcgcgcgcugcugaacaugaucgggaugagcggcggcaaccagggggcccggaccggccgcgacggggucgugcgggugugggacgucaagaacgccgaccuccugaacaaccaguucggcaccaugccgucccugacccucgccugccugacgaagcagggccagguggaccugaacgacgugguccaggcgcucaccgaccuggggcugaucuacaccgccaaguaccccaacaccagcgaccucgaccgccugacgcagucccaccccauccugaacaugaucgacaccaacaagagcagccucaacaucuccggcuacaacuucagccugggggccgccgugaaggccggcgcgugcaugcuggacgggggcaacaugcucgagaccaucaaggugagcccccagaccauggacggcauccucaagagcauccugaaggucaagaagucccuggggauguucaucagcgacacgccgggcgagcggaaccccuacgagaacauccuguacaagaucugccuguccggggacggcuggcccuacaucgccagccgcaccuccaucaccgggcgggccugggagaacaccgugguggaccucgagagcggcggcaagccccagcgcgccggguccaacaacagcaacaagucccugcagagcgccggcuucgcggccgggcugacguacucccagcucaugacccugaaggacgccaugcugcagcuggacccgaacgccaagaccuggauggacaucgagggccggcccgaggaccccgucgagaucgcccucuaccagcccaccagcgggugcuacauccacuucuuccgcgagccgacggaccugaagcaguucaagcaggacgcgaaguacucccacggcaucgacgugaccgaccuguucgccgcccagcccggccucaccagcgccgugaucgaggcccugccccgcaacauggucaucacgugccagggguccgacgacauccggaagcugcucgagagccagggccgcaaggacaucaagcugaucgacaucgcgcugagcaagaccgacucccggaaguacgagaacgccgugugggaccaguacaaggaccucugccacaugcacaccggggucgugguggagaagaagaagaagggcgggaaggaggagaucacgccccacugcgcccugauggacugcaucauguucgacgccgcggucagcggcggccugaacacccucgugcugcgcgccgugcugccgcgggacauggucuuccgcaccuccacccccaagguggugcucuga

SEQ ID NO: 8287 - RNA, 1710 nt, Artificial Sequence
  derived and/or modified CDS sequence (opt1) from LASV(Mad69;Clade IV)__ANH09731__NP
augagcgccuccaaggagaucaagagcuuccuguggacccagucccuccgccgggagcugagcggcuacugcuccaacaucaagcuccagguggucaaggacgcccaggcgcugcugcacgggcuggacuucagcgagguguccaacgugcagcgccucaugcggaagcagcgccgggacgacaacgaccugaagcgccugcgggaccucaaccaggccgucaacaaccugguggagcugaaguccacccagcagaaguccgugcuccgcgucggcacgcugaccagcgacgaccugcucacccuggccgccgaccuggagaagcucaaguccaaggugacccggacggagcgcccccugagcgccgggguguacaugggcaaccuguccagccagcagcucgaccagcggcgcgcgcugcugaacaugaucgggaugaccggcggcaaccagggggcccggaccggccgcgacggggucgugcgggugugggacgucaagaacgccgaccuccugaacaaccaguucggcaccaugccgucccugacgcucgccugccugaccaagcagggccagguggaccugaacgacgugguccaggcgcucaccgaccuggggcugaucuacaccgccaaguaccccaacacgagcgaccucgaccgccugacccagucccaccccauccugaacaugaucgacaccaacaagagcucccucaacaucagcggcuacaacuucagccugggggccgccgugaaggccggcgcgugcaugcuggacgggggcaacaugcucgagaccaucaaggugagcccccagacgauggacggcauccucaagagcauccugaaggucaagaagucccuggggauguucaucagcgacaccccgggcgagcggaaccccuacgagaacauccuguacaagaucugccuguccggggacggcuggcccuacaucgccagccgcaccuccaucaccgggcgggccugggagaacacggugguggaccucgagagcggcggcaagccccagcgcgccggguccaacaacagcaacaagucccugcagagcgccggccuggcggccgggcucaccuacucccagcugaugacccugaaggacgccaugcugcagcucgacccgaacgccaagaccuggauggacaucgagggccggcccgaggaccccgucgagaucgcccuguaccagcccacgagcgggugcuacauccacuucuuccgcgagccgaccgaccugaagcaguucaagcaggacgcgaaguacucccacggcaucgacgugaccgaccucuucgccgcccagcccggccugaccagcgccgugaucgaggcccugccccgcaacauggucaucacgugccagggguccgacgacauccggaagcuccuggagagccagggccgcaaggacaucaagcugaucgacaucgcgcucuccaagaccgacagccggaaguacgagaacgccgugugggaccaguacaaggaccugugccacaugcacaccggggucgugguggagaagaagaagaagggcgggaaggaggagaucacgccccacugcgcccugauggacugcaucauguucgacgccgcggucagcggcggccucaacacccuggugcugcgcgccgugcucccgcgggacauggucuuccgcaccuccacccccaagguggugcuguga

SEQ ID NO: 8288 - RNA, 1710 nt, Artificial Sequence
  derived and/or modified CDS sequence (opt1) from LASV(Mad83;Clade IV)__ANH09733__NP
augagcgccuccaaggagaucaagagcuuccuguggacccagucccuccgccgggagcugagcggcuacugcuccaacaucaagcuccagguggucaaggacgcccaggcgcugcugcacgggcuggacuucagcgagguguccaacgugcagcgccucaugcggaagcagcgccgggacgacaacgaccugaagcgccugcgggaccucaaccaggccgucaacaaccugguggagcucaagagcacccagcagaaguccgugcugcgcgucggcacgcugaccagcgacgaccugcucacccuggccgccgaccuggagaagcucaaguccaaggugacccggacggagcgcccccugagcgccgggguguacaugggcaaccuguccagccagcagcucgaccagcggcgcgcgcugcugaacaugaucgggauguccggcggcaaccagggggcccggaccggccgcgacggggucgugcgggugugggacgucaagaacgccgaccuccugaacaaccaguucggcaccaugccgagccugacccucgccugccugacgaagcagggccagguggaccugaacgacgugguccaggcgcucaccgaccuggggcugaucuacaccgccaaguaccccaacaccuccgaccucgaccgccugacgcagagccaccccauccugaacaugaucgacaccaacaaguccagccucaacaucagcggcuacaacuucucccugggggccgccgugaaggccggcgcgugcaugcuggacgggggcaacaugcucgagaccaucaaggugagcccccagaccauggacggcauccugaaguccauccugaaggucaagaagucccucgggauguucaucagcgacacgccgggcgagcggaaccccuacgagaacauccuguacaagaucugccugagcggggacggcuggcccuacaucgccucccgcaccagcaucaccgggcgggccugggagaacaccgugguggaccucgaguccggcggcaagccccagcgcgccgggagcaacaacuccaacaagagccugcaguccgccggcuucgcggccgggcugacguacagccagcucaugacccugaaggacgccaugcugcagcuggacccgaacgccaagaccuggauggacaucgagggccggcccgaggaccccgucgagaucgccuucuaccagcccaucuccgggugcuacauccacuucuuccgcgagccgaccgaccucaagcaguucaagcaggacgcgaaguacagccacggcaucgacgugacggaccuguucgccgcccagcccggccugaccuccgccgugaucgaggcccucccccgcaacauggucaucacgugccaggggagcgacgacauccggaagcugcuggagucccagggccgcaaggacaucaagcucaucgacaucgcgcugagcaagaccgacagccggaaguacgagaacgccgugugggaccaguacaaggaccugugccacaugcacaccggggucgugguggagaagaagaagaagggcgggaaggaggagaucacgccccacugcgcccucauggacugcaucauguucgacgccgcggucuccggcggccugaacacccuggugcuccgcgccgugcugccgcgggacauggucuuccgcaccagcacccccaagguggugcuguga

SEQ ID NO: 8289 - RNA, 1710 nt, Artificial Sequence
  derived and/or modified CDS sequence (opt1) from LASV(NL;Clade IV)__AAO59513__NP
augagcgccuccaaggaggugaaguccuuccuguggacccagagccuccgccgggagcugagcggcuacugcuccaacaucaagcugcaggucgugaaggacgcccaggcgcuccugcacgggcuggacuucagcgagguguccaacguccagcgccucaugcggaaggagcgccgggacgacagcgaccugaagcgccugcgggaccucaaccaggccgugaacaaccugguggagcugaaguccacccagcagaaguccguccuccgcgugggcacccugaccagcgacgaccugcucgugcuggccgccgaccuggagaagcuccggagcaaggucacccgcaccgagcggccccuguccgccgggguguacaugggcaaccugagcucccagcagcucgaccagcgccgggcgcugcugagcaugaucgggaugaacggcuccaaccagggcgcccgcgccgggcgggacggcgugguccgcgugugggacgugaagaacgccgagcuccugaacaaccaguucgggaccaugccgagccugacccucgcgugccugaccaagcagggccaggucgaccugaacgacgccgugcaggcccucaccgaccuggggcugaucuacacggccaaguaccccaacaccuccgaccucgaccggcugacccagagccaccccauccugaacaugaucgacaccaagaaguccagccucaacgugagcggcuacaacuucucccugggcgccgcggucaaggccggggccugcaugcuggacggcgggaacaugcucgagacgaucaaggugagcccccagaccauggacggcauccugaaguccauccugaaggugaagaaggcccucggcauguucaucagcgacaccccgggggagcgcaaccccuacgagaacauccuguacaagaucugccuguccggcgacggguggcccuacaucgccagccggaccuccaucacgggccgcgcgugggagaacaccgucguggaccucgagagcgacgagaagccccagaaggccggguccaacaacagcaacaagucccugcagagcgccggcuucaccgccggccugaccuacucccagcucaugacgcugaaggacgccaugcugcagcuggacccgaacgcgaagaccuggauggacaucgaggggcggcccgaggaccccguggagaucgcccucuaccagcccagcuccggcugcuacauccacuucuuccgcgagccgaccgaccugaagcaguucaagcaggacgccaaguacagccacgggaucgacaucaccgaccuguucgccgcccagcccggccucacguccgcggucaucgacgcccugccccgcaacauggugaucacgugccaggggagcgacgacauccggaagcugcucgagagccagggccgcaaggacaucaagcugaucgacaucgcccugaacaaggccgacucccggaaguacgagaacgcggucugggaccaguacaaggaccucugccacaugcacaccggcgugguggucgagaagaagaagcgcgggggcaaggaggagaucacgccccacugcgcccugauggacugcaucauguucgacgccgccgugagcgggggccugaagacccucgugcugcgggccguccugccgcgcgacaugguguuccggaccuccacgccccgcgugguccucuga

SEQ ID NO: 8290 - RNA, 1710 nt, Artificial Sequence
  derived and/or modified CDS sequence (opt1) from LASV(Z0947-SLE-2011;Clade IV)__AIT17841__NP
augagcgccuccaaggagaucaagagcuuccuguggacccagucccuccgccgggagcugagcggcuacugcuccaacaucaagcuccagguggucaaggacgcccaggcgcugcugcacgggcuggacuucagcgagguguccaacgugcagcgccucaugcggaaggagcgccgggacgacaacgaccugaagcgccugcgggaccucaaccaggccgucaacaaccugguggagcucaagagcacccagcagaaguccauccugcgcgugggcacccugaccagcgacgaccugcucauccuggccgccgaccuggagaagcucaaguccaaggucacccggaccgagcgcccccugagcgccgggguguacaugggcaaccuguccagccagcagcucgaccagcggcgcgcgcugcugaacaugaucgggauguccggcagcaaccagggcgcccggacggggcgcgacggcgugguccgggugugggacgugaagaacgccgagcuccugaacaaccaguucgggaccaugccgucccugacccucgccugccugaccaagcagggccaggucgaccugaacgacgcggugcaggcccucacggaccuggggcugaucuacaccgccaaguaccccaacaccagcgaccucgaccgccugacccagucccaccccauccugaacaugaucgacacgaagaaguccagccucaacaucuccggcuacaacuucagccugggcgccgccgugaaggcgggggccugcaugcuggacggcgggaacaugcucgagaccaucaaggucagcccccagaccauggacggcauccucaagagcauccugaaggugaagaaggcccugggcauguucaucuccgacgccccgggggagcggaaccccuacgagaacauccuguacaagaucugccugagcggcgacggguggcccuacaucgccucccgcaccagcaucacgggccgggcgugggagaacaccguggucgaccucgaguccgacgggaagccccagaaggccggcagcaacggcuccaacaagagccugcaguccgccggguucaccgccggccugaccuacagccagcucaugacgcugaaggacgccaugcugcagcuggacccgaacgcgaagaccuggauggacaucgaggggcgccccgaggaccccguggagaucgcccucuaccagcccuccagcggcugcuacauccacuucuuccgggagccgaccgaccugaagcaguucaagcaggacgccaaguacucccacgggaucgacgugaccgaccuguucgccgcccagcccggccucacgagcgcggucaucgacgcccugccccgcaacauggugaucacgugccagggcuccgacgacauccgcaagcuguucgagagccaggggcggaaggacaucaagcucaucgacaucgcccugagcaagaccgacucccgcaaguacgagaacgccgugugggaccaguacaaggaccugugccacaugcacaccggcaucgucguggagaagaagaagcgcgggggcaaggaggagaucaccccgcacugcgcgcucauggacugcaucauguucgacgccgccgucagcgggggccugaacaccuccgugcugcgggccgugcucccccgggacauggucuuccgcaccagcacgccccggguggugcuguga

SEQ ID NO: 8291 - RNA, 1710 nt, Artificial Sequence
  derived and/or modified CDS sequence (opt1) from LASV(Z0948-SLE-2011;Clade IV)__AIT17845__NP
augagcgccuccaaggagaucaagagcuuccuguggacccagucccuccgccgggagcugagcggcuacugcuccaacaucaagcuccagguggucaaggacgcccaggcgcugcugcacgggcuggacuucagcgagguguccaacgugcagcgccucaugcggaaggagcgccgggacgacaacgaccugaagcgccugcgggaccucaaccaggccgucaacaaccugguggagcucaagagcacccagcagaaguccauccugcgcgugggcacccugaccagcgacgaccugcucauccuggccgccgaccuggagaagcucaaguccaaggucacccggaccgagcgcccccugagcgccgggguguacaugggcaaccuguccagccagcagcucgaccagcggcgcgcgcugcugaacaugaucgggauguccggcagcaaccagggcgcccagacggggcgggacggcgugguccgcgugugggacgugaagaacgccgagcuccugaacaaccaguucgggaccaugccgucccugacccucgccugccugaccaagcagggccaggucgaccugaacgacgcggugcaggcccucacggaccuggggcugaucuacaccgccaaguaccccaacaccagcgaccucgaccggcugacccagucccaccccauccugaacaugaucgacacgaagaaguccagccucaacaucuccggcuacaacuucagccugggcgccgccgugaaggcgggggccugcaugcuggacggcgggaacaugcucgagaccaucaaggucagcccccagaccauggacggcauccucaagagcauccugaaggugaagaaggcccugggcauguucaucuccgacgccccgggggagcgcaaccccuacgagaacauccuguacaagaucugccugagcggcgacggguggcccuacaucgccucccggaccagcaucacgggccgcgcgugggagaacaccguggucgaccucgaguccgacgggaagccccagaaggccggcagcaacggcuccaacaagagccugcaguccgccggguucaccgccggccugaccuacagccagcucaugacgcugaaggacgccaugcugcagcuggacccgaacgcgaagaccuggauggacaucgaggggcggcccgaggaccccguggagaucgcccucuaccagcccuccagcggcugcuacauccacuucuuccgcgagccgaccgaccugaagcaguucaagcaggacgccaaguacucccacgggaucgacgugaccgaccuguucgccgcccagcccggccucacgagcgcggucaucgacgcccugccccggaacauggugaucacgugccagggcuccgacgacauccgcaagcuguucgagagccaggggcgcaaggacaucaagcucaucgacaucgcccugagcaagaccgacucccggaaguacgagaacgccgugugggaccaguacaaggaccugugccacaugcacaccggcaucgucguggagaagaagaagcgcgggggcaaggaggagaucaccccgcacugcgcgcucauggacugcaucauguucgacgccgccgucagcgggggccugaacaccuccgugcugcgggccgugcucccccgcgacauggucuuccggaccagcacgccccgcguggugcuguga

SEQ ID NO: 8292 - RNA, 1710 nt, Artificial Sequence
  derived and/or modified CDS sequence (opt1) from LASV(Z148;Clade IV)__AAT49007__NP
augagcguguccaaggagaucaagagcuuccuguggacccagucccuccgccgggagcugagcggcuacugcuccaacaucaagcugcaggucgugaaggacgcccaggcccuccugcacgggcuggacuucagcgagguguccaacguccagcgccucaugcggaagcagcgccgggacgacaacgaccugaagcgccugcgggaccucaaccaggcggugaacaaccugguggagcucaagagcacccagcagaaguccguccugcgcgugggcacgcugaccagcgacgaccugcucauccuggccgccgaccuggagaagcucaaguccaaggugacccggaccgagcgcccccugagcgccgggaucuacaugggcaaccuguccagccagcagcucgaccagcggcgcgcccugcugaacaugaucgggauguccggcggcaaccagggggcgcagacgggccgggacggggucgugcgcaucugggacgugaagaacgccgagcuccugaacaaccaguucggcaccaugccgagccugacccucgccugccugaccaagcaggggcaggucgaccugaacgacguggugcaggcccucacggaccugggccugaucuacaccgcgaaguaccccaacaccuccgaccucgaccggcugacccagagccaccccauccugaacaugaucgacacgaagaaguccagccucaacaucagcggcuacaacuucucccugggggccgccgucaaggccggcgccugcaugcuggacgggggcaacaugcucgagaccaucaaggugagcccccagaccauggacggcauccugaaguccauccugaaggugaagaaggcgcucgggauguucaucagcgacaccccgggcgagcgcaaccccuacgagaacauccuguacaagaucugccuguccggggacggcuggcccuacaucgccagccggacguccaucaccgggcgcgccugggagaacaccgucguggaccucgagagcggcgagaagccccagaagaucggcuccaacaacagcaacaagucccugcagagcgccggguucaccgccggccugacguacucccagcucaugacccugaaggacgcgaugcugcagcuggacccgaacgccaagaccuggauggacaucgaggggcggcccgaggaccccguggagaucgcccucuaccagcccagcuccggcugcuacauccacuucuuccgcgagccgaccgaccugaagcaguucaagcaggacgccaaguacagccacgggaucgacgucacggaccuguucgccgcgcagcccggccucaccuccgccgugaucgaggcccugccccggaacauggugaugaccugccagggcagcgacgacauccgcaagcugcucgagucccaggggcgcaaggacaucaagcugaucgacaucgcccugagcaagaccgacagccggaaguacgagaacgccgucugggaccaguacaaggaccucugccacaugcacacgggcguggucguggagaagaagaagaagggcgggaaggaggagaucacgccccacugcgcgcugauggacugcaucauguucgacgccgccgccuccgggggccugaacacccucgugcugcgcgcgguccugccgcgggacaugguguuccgcaccagcacccccaaggugguccucuga

SEQ ID NO: 8293 - RNA, 1710 nt, Artificial Sequence
  derived and/or modified CDS sequence (opt1) from LASV(Bamba-R114;Clade V)__AHC95554__NP
augagcgccuccaaggaggugcgcagcuuccuguggacccagucccuccggcgcgagcugagcggcuacugcuccaacaucaagcugcaggucgugaaggacgcccaggcgcuccugcacgggcuggacuucagcgagguguccaacguccagcggcucaugcgcaagcagcggcgcgacgacggcgaccugaagcggcugcgcgaccucaaccaggccgugaacaaccugguggagcucaagagcacccagcagaaguccguccugcggguggggacccugaacagcgacgaccugcucacccuggccgccgaccuggagaagcucaaguccaaggugacccgcaccgagcggccccugagcuccggcgucuacauggggaaccugagcucccagcagcucgaccagcgccgggcccugcugaacaugaucggcaugacgggcgggaaccagggcgcgcaggccgggcgcgacggcguggugcgggucugggacgugaagaacgccgagcuccugaacaaccaguucgggaccaugccgagccugacccucgccugccugaccaagcagggccagguggaccugaacgacgucgugcaggcgcucacggaccugggccugaucuacaccgccaaguaccccaacaccuccgaccucgaccgccugacccagagccaccccauccugaacaugaucgacacgaagaaguccagccucaacaucagcggguacaacuucucccugggcgccgccgugaaggccggggcgugcaugcuggacggcggcaacaugcucgagaccaucaagaucagcccccaguccgucgacgggauccucaagagcauccugaaggugaagcggucccugggcauguucgugagcgacaccccgggggagcgcaaccccuacgagaacauccuguacaagaucugccuguccggcgacggguggcccuacaucgccagccggaccuccaucgucggccgcgccugggagaacacggugguggaccucgaggccgacggcaagccccagaagccgaacagcggguccagcaacaagucccugcagagcgccggcuuccccgcggggcugaccuacucccagcucaugacccugaaggacgccaugcugcagcuggaccccaacgccaagaccuggauggacaucgagggccggcccgaggacccggucgagguggcccucuaccagcccagcuccgggugcuacauccacuucuuccgcgagcccacggaccugaagcaguucaagcaggacgccaaguacagccacggcaucgacgucaccgaccuguucgcggcccagcccggccucaccuccgccgugaucgaggcccugccgcgcaacauggugaucacgugccaggggagcgaggacaucaagaagcugcucgagagccagggccggaaggacaucaagcugaucgacaucgcccuguccaagaucgacagccgcaaguucgagaacgcggucugggaccaguacaaggaccucugccacaugcacaccggggugguggucgagaagaagaagcggggcgggaaggaggagaucacgccccacugcgcccugauggacugcaucauguucgacgccgccguguccggcggccugaacgcgagcgugcuccgcgccguccugccccgggacaugguguuccgcaccuccacccccaaggugguccuguga

SEQ ID NO: 8294 - RNA, 1710 nt, Artificial Sequence
  derived and/or modified CDS sequence (opt1) from LASV(Komina-R16;Clade V)__AHC95556__NP
augagcgccuccaaggaggugaaguccuuccuguggacccagucccuccgccgggagcugagcggcuacugcuccaacaucaagcugcaggucgugaaggacgcccaggcgcuccugcacgggcuggacuucagcgagguguccaacguccagcgccucaugcggaagcagcgccgggacgacggcgaccugaagcgccugcgggaccucaaccaggccgugaacaaccugguggagcucaagagcacccagcagaagaacguccugcgcguggggacgcugaacuccgacgaccugcucacccuggccgccgaccuggagaagcucaagagcaaggugacccggaccgagcgcccccuguccagcggcgucuacauggggaaccuguccagccagcagcucgaccagcggcgcgcccugcugaacaugaucggcaugacgggcgggaaccagggcacccagaccgggcgggacggcguggugcgcgucugggacgugaagaacgcggagcuccugaacaaccaguucgggaccaugccgucccugacgcucgccugccugaccaagcagggccaggccgaccugaacgacgugguccaggcccucaccgaccugggccugaucuacaccgcgaaguaccccaacgccagcgaccucgaccggcugacgcagucccaccccauccugaacaugaucgacaccaagaaguccagccucaacaucagcggguacaacuucagccugggcgccgccgugaaggccggggcgugcaugcuggacggcggcaacaugcucgagaccaucaaggugagcccccagagcauggacgggauccugaaguccauccugaaggucaagcgcgcccucggcauguucgugagcgacaccccgggggagcggaaccccuacgagaacauccuguacaagaucugccuguccggcgacggguggcccuacaucgccagccgcacguccaucgugggccgggccugggagaacaccgucguggaccucgaggccgacggcaaccccaagaagcugaacagcaacggguccaacaagagccugcaguccgcgggcuucccggccgggcucaccuacagccagcugaugacccugaaggacgccaugcugcagcucgaccccaacgccaagacguggauggacaucgagggccgccccgaggaccccguggaggucgcccuguaccagccgaacuccgggugcuacauccacuucuuccgggagcccaccgaccugaagcaguucaagcaggacgcgaaguacagccacggcaucgacgugaccgaccucuucgccgcccagcccggccugaccuccgccgucaucgaggcccugccccgcaacauggugaucacgugccaggggagcgaggacauccgcaagcuccuggagucccagggccggaaggacaucaagcugaucgacaucgcgcucagcaagaccgacucccgcaaguucgagaacgccgugugggaccagcacaaggaccugugccacaugcacaccggggucgugguggagaagaagaagcggggcgggaaggaggagaucaccccgcacugcgcccugauggacugcaucauguucgacgccgcggucagcggcggccucaacacgcuggugcugcgcgccgugcucccccgggacauggucuuccgcaccagcacccccaagguggugcuguga

SEQ ID NO: 8295 - RNA, 1710 nt, Artificial Sequence
  derived and/or modified CDS sequence (opt1) from LASV(Ouoma-R123;Clade V)__AHC95558__NP
augagcgccuccaaggaggugcgcagcuuccuguggacccagucccuccggcgcgagcugagcggcuacugcuccaacaucaagcugcaggucgugaaggacgcccaggcgcuccugcacgggcuggacuucagcgagguguccaacguccagcggcucaugcgcaagcagcggcgcgacgacagcgaccugaagcggcugcgcgaccucaaccaggccgugaacaaccugguggagcugaaguccacccagcagaaguccguccuccgggugggcacgcuguccagcgacgaccugcucacccuggccgccgaccuggagaagcucaaguccaaggugauccgcaccgagcggccccugagcuccggggucuacaugggcaaccugagcucccagcagcucgaccagcgccgggcccugcugaacaugaucgggaugaccggcggcaaccagggggcgcaggccggccgcgacgggguggugcgggucugggacgugcgcaacgccgagcuccugaacaaccaguucggcacgaugccgagccugacccucgccugccugaccaagcagggccagguggaccugaacgacgucgugcaggcgcucaccgaccuggggcugaucuacacggccaaguaccccaacaccuccgaccucgaccggcugacccagaaccaccccauccugaacaugaucgacaccaagaaguccagccucaacaucagcggcuacaacuucagccugggggccgccgugaaggccggcgcgugcaugcuggacgggggcaacaugcucgagacgaucaaggucagcccccagagcaucgacggcauccugaaguccauccugaaggugaagcgcacccucgggauguucgugagcgacaccccgggcgagcggaaccccuacgagaacauccuguacaagaucugccuguccggggacggcuggcccuacaucgccagccgcaccuccaucgucgggcgggccugggagaacacggugguggaccucgagaccgaccgcaagagccagggccccaacuccggcaacagcaacaagucccugcagagcgccggguucuccgccggccugaccuacagccagcucaugacccugaaggacgcgaugcugcagcuggacccgaacgccaagacguggauggacaucgaggggcgccccgaggaccccgucgagguggcccucuaccagcccaucuccggcugcuacauccacuucuuccgggagccgaccgaccugaagcaguucaagcaggacgccaaguacagccacgggaucgacaucaccgaccuguucgccgcgcagcccggccucaccuccgccgucaucgaggcccugccccgcaacauggugaucacgugccagggcagcgaggacaucaagaagcugcucgagagccaggggcggaaggacaucaagcugaucgacaucgcccuguccaagaucgacagccgcaaguucgagaacgccgugugggaccaguacaaggaccucugccacaugcacaccggcgucgugguggagaagaagaagcgcgggggcaaggaggagaucacgccccacugcgcgcugauggacugcaucauguucgacgccgccgucuccgggggccugaacgccagcgugcuccgggcggugcugccgcgggacauggucuuccgcaccuccacccccaagguggugcuguga

SEQ ID NO: 8296 - RNA, 1710 nt, Artificial Sequence
  derived and/or modified CDS sequence (opt1) from LASV(Soromba-R;Clade V)__AHC95552__NP
augagcgccuccaaggaggugaaguccuuccuguggacccagucccuccgccgggagcugagcggcuacugcuccaacaucaagcugcaggucgugaaggacgcccaggcgcuccugcacgggcuggacuucagcgagguguccaacguccagcgccucaugcggaagcagcgccgggacgacggcgaccugaagcgccugcgggaccucaaccaggccgugaacaaccugguggagcucaagagcacccagcagaagaacguccugcgcguggggacccugaacuccgacgaccugcucacccuggccgccgaccuggagaagcucaagagcaaggugacccggaccgagcgcccccuguccagcggcgucuacauggggaaccuguccagccagcagcucgaccagcggcgcgcccugcugaacaugaucggcaugacgggcgggaaccagggcacccaggcggggcgggacggcguggugcgcgucugggacgugaagaacgccgagcuccugaacaaccaguucgggaccaugccgucccugacccucgccugccugacgaagcagggccaggccgaccugaacgacgugguccaggcgcucaccgaccugggccugaucuacaccgccaaguaccccaacgccagcgaccucgaccggcugacccagucccaccccauccugaacaugaucgacacgaagaaguccagccucaacaucagcggguacaacuucagccugggcgccgccgugaaggcgggggccugcaugcuggacggcggcaacaugcucgagaccaucaaggugagcccccagagcauggacgggauccugaaguccauccugaaggucaagcgcgcccucggcauguucgugagcgacaccccgggggagcggaaccccuacgagaacauccuguacaagaucugccuguccggcgacggguggcccuacaucgccagccgcaccuccaucgugggccgggccugggagaacacggucguggaccucgaggcggacggcaaccccaagaagcugaacagcaacggguccaacaagagccugcaguccgccggcuucccggccgggcucaccuacagccagcugaugacccugaaggacgccaugcugcagcucgaccccaacgccaagaccuggauggacaucgagggccgccccgaggaccccguggaggucgcgcuguaccagccgaacuccgggugcuacauccacuucuuccgggagcccacggaccugaagcaguucaagcaggacgccaaguacagccacggcaucgacgugaccgaccucuucgccgcccagcccggccugaccuccgccgucaucgaggcgcugccccgcaacauggugaucacgugccaggggagcgaggacauccgcaagcuccuggagucccagggccggaaggacaucaagcugaucgacaucgcccucagcaagaccgacucccgcaaguucgagaacgccgugugggaccaguacaaggaccugugccacaugcacaccggggucgugguggagaagaagaagcggggcgggaaggaggagaucaccccgcacugcgcccugauggacugcaucauguucgacgcggccgucagcggcggccucaacacccuggugcugcgcgccgugcucccccgggacauggucuuccgcacgagcacgccccggguggugcuguga

SEQ ID NO: 8297 - RNA, 1710 nt, Artificial Sequence
  derived and/or modified CDS sequence (opt1) from LASV(Soromba-R30;Clade V)__AHC95560__NP
augagcgccuccaaggaggugaaguccuuccuguggacccagagccuccgccgggagcugagcggcuacugcuccaacaucaagcugcaggucgugaaggacgcccaggcgcuccugcacgggcuggacuucagcgagguguccaacguccagcgccucaugcggaagcagcgccgggacgacggcgaccugaagcgccugcgggaccucaaccaggccgugaacaaccugguggagcucaagagcacccagcagaagaacguccugcgcguggggacgcugaacuccgacgaccugcucacccuggccgccgaccuggagaagcucaagagcaaggugacccggaccgagcgcccccuguccagcggcgucuacauggggaaccuguccagccagcagcucgaccagcggcgcgcccugcugaacaugaucggcauguccggcgggaaccagggcacccagguggggcgggacggcgugguccgcgugugggacgugaagaacgcggagcuccugaacaaccaguucgggaccaugccgagccugacccucgccugccugaccaagcagggccaggccgaccugaacgacgucgugcaggcccucacggaccugggccugaucuacaccgcgaaguaccccaacgccuccgaccucgaccggcugacccagagccaccccauccugaacaugaucgacaccaagaaguccagccucaacaucagcggguacaacuucucccugggcgccgccgugaaggccggggcgugcaugcuggacggcggcaacaugcucgagacgaucaaggucagcccccaguccauggacgggauccucaagagcauccugaaggugaagcgcgcccugggcauguucguguccgacaccccgggggagcggaaccccuacgagaacauccuguacaagaucugccugagcggcgacggguggcccuacaucgccucccgcaccagcaucgucggccgggccugggagaacaccgugguggaccucgaggccgacggcaaccccaagaagcugaacuccaacgggagcaacaagucccugcagagcgcgggcuucccggccgggcucacguacucccagcugaugacccugaaggacgccaugcugcagcucgaccccaacgccaagaccuggauggacaucgagggccgccccgaggaccccgucgagguggcccuguaccagccgaacagcgggugcuacauccacuucuuccgggagcccaccgaccugaagcaguucaagcaggacgcgaaguacucccacggcaucgacgucacggaccucuucgccgcccagcccggccugaccagcgccgugaucgaggcccugccccgcaacauggugaucacgugccagggguccgaggacauccgcaagcuccuggagagccagggccggaaggacaucaagcugaucgacaucgcgcucuccaagaccgacagccgcaaguucgagaacgccgucugggaccagcacaaggaccugugccacaugcacacgggggugguggucgagaagaagaagcggggcgggaaggaggagaucaccccgcacugcgcccugauggacugcaucauguucgacgccgcggugagcggcggccucaacacccuggugcugcgcgccguccucccccgggacaugguguuccgcaccuccacgcccaaggugguccuguga

SEQ ID NO: 8298 - RNA, 1710 nt, Artificial Sequence; identical to SEQ ID NO: 8054
  derived and/or modified CDS sequence (opt1) from LASV(Alzey;Clade VI)__SCA79106__NP

SEQ ID NO: 8299 - RNA, 1710 nt, Artificial Sequence
  derived and/or modified CDS sequence (opt1) from LASV(NIGERIA IKEJI;Clade II)__AMZ00372__NP
augagcguguccaaggaggucaagagcuuccuguggacccagucccuccgccgggagcugagcggcuacugcuccaacaucaagcuccagguggugaaggacgcccaggcccugcugcacgggcuggacuucagcgaggucuccaacgugcagcgccucaugcggaagcagaagcgcgacgacaacgaccugaagcggcugcgcgaccucaaccaggcggugaacaaccuggucgagcucaagagcgugcagcagaaguccauccugcgggugggcacccugaccagcgacgaccugcucacccuggccgccgaccuggagaagcucaaguccaaggucauccgcaccgagcggccccugagcuccgggguguacaugggcaaccugagcucccagcagcucgagcagcgcaaggcccugcugaccaugaucgggaugacgggcggcagccaguccgcccagccggggcgggacggcgugguccgcgugugggacgugaagaacagcgaccuccugaacaaccaguucgggaccaugcccucccugacccucgcgugccugaccaagcagggccaggucgaccugaacgacgccgugcucgcccugacggaccuggggcucaucuacaccgccaaguaccccaacaccagcgaccuggaccggcugagccagucccaccccauccucaacaugguggacaccaagaaguccagccugaacaucagcggcuacaacuucucccugggcgcggccgucaaggccggggccugcaugcucgacggcgggaacaugcuggagacgaucaaggugaccccgcagaccauggacggcauccucaagagcauccugaaggugaagcgcgcccugggcauguucgucuccgacacccccggggagcggaaccccuacgagaacauccuguacaagaucugccucagcggcgacggguggcccuacaucgcgucccgcacgagcaucgugggccgggccugggagaacaccaucguggaccuggaguccgacagcaagccgcagaaggucggggccaucggcuccaacaagagccugcaguccgccggcuuccccgccgggcucaccuacagccagcugaugacccugaaggacuccaugaugcagcuggaccccagcgcgaagacguggaucgacaucgagggccgccccgaggacccgguggagaucgcccucuaccagcccaucuccgggugcuacauccacuucuuccgggagcccaccgaccugaagcaguucaagcaggacgccaaguacagccacggcaucgacgucgccgaccuguucagcgcccagcccgggcucaccuccgcggugaucgaggcccugccgcgcaacauggugcugaccugccagggcagcgacgacaucaagaagcuccuggacucccagggccggcgcgacaucaagcugaucgacaucagccucaacaaggccgacucccgccgguucgagaacgccgucugggaccagugcaaggaccugugccacaugcacacgggggugguggucgagaagaagaagcgcggcgggaaggaggagaucacgccccacugcgcccugauggacugcaucauguucgacgcggccgugagcggcgggcucaacauccccacccugcgggccgugcugccccgcgacauggucuuccggaccuccagcccgaagguggugcucuga

SEQ ID NO: 8300 - RNA, 1710 nt, Artificial Sequence
  derived and/or modified CDS sequence (opt2) from LASV(Josiah;Clade IV)__NP_694869__NP
auguccgccuccaaggagaucaaguccuuccucuggacccagucccuccgccgcgagcucuccggcuacugcuccaacaucaagcuccaggucgucaaggacgcccaggcccuccuccacggccucgacuucuccgaggucuccaacguccagcgccucaugcgcaaggagcgccgcgacgacaacgaccucaagcgccuccgcgaccucaaccaggccgucaacaaccucgucgagcucaaguccacccagcagaaguccauccuccgcgucggcacccucaccuccgacgaccuccucauccucgccgccgaccucgagaagcucaaguccaaggucauccgcaccgagcgcccccucuccgccggcgucuacaugggcaaccucuccucccagcagcucgaccagcgccgcgcccuccucaacaugaucggcauguccggcggcaaccagggcgcccgcgccggccgcgacggcgucguccgcgucugggacgucaagaacgccgagcuccucaacaaccaguucggcaccaugcccucccucacccucgccugccucaccaagcagggccaggucgaccucaacgacgccguccaggcccucaccgaccucggccucaucuacaccgccaaguaccccaacaccuccgaccucgaccgccucacccagucccaccccauccucaacaugaucgacaccaagaaguccucccucaacaucuccggcuacaacuucucccucggcgccgccgucaaggccggcgccugcaugcucgacggcggcaacaugcucgagaccaucaaggucuccccccagaccauggacggcauccucaaguccauccucaaggucaagaaggcccucggcauguucaucuccgacacccccggcgagcgcaaccccuacgagaacauccucuacaagaucugccucuccggcgacggcuggcccuacaucgccucccgcaccuccaucaccggccgcgccugggagaacaccgucgucgaccucgaguccgacggcaagccccagaaggccgacuccaacaacuccuccaagucccuccaguccgccggcuucaccgccggccucaccuacucccagcucaugacccucaaggacgccaugcuccagcucgaccccaacgccaagaccuggauggacaucgagggccgccccgaggaccccgucgagaucgcccucuaccagcccuccuccggcugcuacauccacuucuuccgcgagcccaccgaccucaagcaguucaagcaggacgccaaguacucccacggcaucgacgucaccgaccucuucgccacccagcccggccucaccuccgccgucaucgacgcccucccccgcaacauggucaucaccugccagggcuccgacgacauccgcaagcuccucgagucccagggccgcaaggacaucaagcucaucgacaucgcccucuccaagaccgacucccgcaaguacgagaacgccgucugggaccaguacaaggaccucugccacaugcacaccggcgucgucgucgagaagaagaagcgcggcggcaaggaggagaucaccccccacugcgcccucauggacugcaucauguucgacgccgccgucuccggcggccucaacaccuccguccuccgcgccguccucccccgcgacauggucuuccgcaccuccaccccccgcgucguccucuga

SEQ ID NO: 8301 - RNA, 1710 nt, Artificial Sequence
  derived and/or modified CDS sequence (opt2) from LASV(LP;Clade I)__AAF86702__NP
auguccaacuccaaggagaucaaguccuuccucuggacccagucccuccgccgcgagcucuccggcuacugcuccaacaucaagcuccaggucgucaaggacgcccaggcccuccuccacggccucgacuucuccgaggucuccaacguccagcgccucaugcgcaagcagaagcgcgacgacgccgaccucaagcgccuccgcgaccucaaccaggccgucaacaaccucgucgagcucaaguccacccagcagaagaacguccuccgcgucggcacccucuccuccgacgaccucaucacccucgccgccgaccucgagaagcucaaguccaaggucauccgcaccgagcgcccccucuccuccggcgucuacaugggcaaccucuccucccagcagcucgaccagcgccgcgcccuccucuccaugaucggcauguccggcggcccccagggcaaccgcaccggcggcgacggcgucguccgcgucugggacgucaagaacgccgagcuccucaacaaccaguucggcaccaugcccucccucacccucgccugccucaccaagcagggccaggucgaccucaacgacgccguccaggcccucaccgaccucggccucaucuacaccgccaaguaccccaacuccuccgaccucgacaugcucacccagucccaccccauccucggcauggucgacaccaagaaguccucccucaacaucuccggcuacaacuucucccucggcgccgccgucaaggccggcgccugcaugcucgacggcggcaacaugcucgagaccaucaaggucuccccccagaccauggacggcauccucaaguccauccucaaggucaagcgcucccucggcauguucaucuccgacacccccggcgagcgcaaccccuacgagaacauccucuacaagaucugccucuccggcgagggcuggcccuacaucgccucccgcaccuccaucaccggccgcgccugggagaacacccucgucgaccucgaguccgacaacaagccccccaagcucaacuccgccggcuccaacaagucccuccaggccgccggccucaacgccggccucaccuacucccagcucaugacccucaaggacugcaugcuccagcucgaccccuccuccaagaccuggaucgacaucgagggccgccccgaggaccccgucgagaucgcccucuuccagcccuccuccggcugcuacauccacuucuuccgcgagcccaccgaccucaagcaguucaagcaggacgccaaguacucccacggcaucgacgucaccgaccucuucuccacccagcccggccucaccuccgccgucaucgaggcccucccccgcaacaugguccucaccugccagggcuccgacgacaucaagaagcuccucgagucccagggccgccgcgacaucaagcucaucgacaucucccucuccaaggccgacucccgcaaguucgagaacgccgucugggaccaguacaaggaccucugccacaugcacaccggcgucgucgucgagaagaagaagcgcggcggcaaggaggagaucaccccccacugcgcccuccucgacugcaucauguucgacgccgccaccaccggcucccucaacaucaccacccuccgcgccguccucccccgcgacauggucuuccgcaccuccacccccaaggucguccucuga

SEQ ID NO: 8302 - RNA, 1710 nt, Artificial Sequence
  derived and/or modified CDS sequence (opt2) from LASV(803213;Clade II)__AAF86704__NP
auguccgccuccaaggaggucaaguccuuccucuggacccagucccuccgccgcgagcucuccggcuacugcuccaacaucaagcuccaggucgucaaggacgcccaggcccuccuccacggccucgacuucuccgaggucaacaacguccagcgccucaugcgcaagcagaagcgcgacgacggcgaccucaagcgccuccgcgaccucaaccaggccgucaacaaccucgucgagcucaaguccacccagcagaaguccauccuccgcgucggcacccucaccuccgacgaccuccucacccucgccgccgaccucgagaagcucaaguccaaggucauccgcaccgagcgcccccucuccuccggcgucuacaugggcaaccucuccacccagcagcucgagcagcgccgcgcccuccucaacaugaucggcauggucggcggcgcccagggcacccagcccggccgcgacggcgucguccgcgucugggacgucaagaaccccgaccuccucaacaaccaguucggcaccaugcccucccucacccucgccugccucaccaagcagggccaggucgaccucaacgacgccguccucgcccucaccgaccucggccucaucuacaccgccaaguaccccaacuccuccgaccucgaccgccucucccagucccaccccauccucaacauggucgacaccaagaaguccucccucaacaucuccggcuacaacuucucccucggcgccgccgucaaggccggcgccugcaugcucgacggcggcaacaugcucgagaccaucaaggucaccccccagaccauggacggcauccucaaguccauccucaaggucaagcgcucccucggcauguucgucuccgacacccccggcgagcgcaaccccuacgagaacauccucuacaagaucugccucuccggcgacggcuggcccuacaucgccucccgcaccuccaucgucggccgcgccugggagaacaccaccgucgaccucgaguccgacggcaagccccagaaggucggcaccgccggcuccaacaagucccuccaguccgccggcuuccccaccggccucaccuacucccagcucaugacccucaaggacuccaugaugcagcucgaccccuccgccaagaccuggaucgacaucgagggccgccccgaggaccccgucgagaucgcccucuaccagcccauguccggcugcuacauccacuucuuccgcgagcccaccgaccucaagcaguucaagcaggacgccaaguacucccacggcaucgacgucgccgaccucuuccccgcccagcccggccucaccuccgccgucaucgaggcccucccccgcaacaugguccucaccugccagggcuccgacgacaucaagaagcuccucgacucccagggccgccgcgacaucaagcucaucgacaucucccucuccaaggucgacucccgcaaguucgagaacgccgucugggaccagugcaaggaccucugccacaugcacaccggcgucgucgucgagaagaagaagcgcggcggcaaggaggagaucaccccccacugcgcccucauggacugcaucauguucgacgccgccgucuccggcggccucaacauccccguccuccgcgccguccucccccgcgacauggucuuccgcaccuccucccccaaggucguccucuga

SEQ ID NO: 8303 - RNA, 1713 nt, Artificial Sequence
  derived and/or modified CDS sequence (opt2) from LASV(GA391;Clade III)__CAA36646__NP
auguccgccuccaaggagguccgcuccuuccucuggacccagucccuccgccgcgagcucuccggcuacugcuccaacaucaagcuccaggucgucaaggacgcccaggcccuccuccacggccucgacuucuccgaggucuccaacguccagcgccucaugcgcaagcagaagcgcgacgacggcgaccucaagcgccuccgcgaccucaaccaggccgucaacaaccucgucgagcucaaguccacccagcagaaguccguccuccgcgucggcacccucuccuccgacgaccuccucauccucgccgccgaccucgagaagcucaaguccaaggucacccgcaccgagcgcccccucuccuccggcgucuacaugggcaaccucuccucccagcagcucgaccagcgccgcgcccuccucaacaugaucggcaugaccggcgucuccggcggcggcaagggcgccuccgacggcaucguccgcgucugggacgucaagaacgccgagcuccucaacaaccaguucggcaccaugcccucccucacccucgccugccucaccaagcagggccaggucgaccucaacgacgccguccaggcccucaccgaccucggccucaucuacaccgccaaguaccccaacuccuccgaccucgaccgccucucccagucccaccccauccucaacaugaucgacaccaagaaguccucccucaacaucuccggcuacaacuucucccucggcgccgccgucaaggccggcgccugcaugcucgacggcggcaacaugcucgagaccaucaaggucuccccccagaccauggacggcauccucaaguccauccucaaggucaagaagucccucggcauguucgucuccgacacccccggcgagcgcaaccccuacgagaacauccucuacaagaucugccucuccggcgacggcuggcccuacaucgccucccgcaccuccaucgucggccgcgccugggagaacaccgucgucgaccucgagcaggacaacaagccccagaagaucggcaacggcggcuccaacaagucccuccaguccgccggcuucgccgccggccucaccuacucccagcucaugacccucaaggacuucaagugcuucaaccucauccccaacgccaagaccuggauggacaucgagggccgccccgaggaccccgucgagaucgcccucuaccagcccuccuccggcugcuacguccacuucuuccgcgagcccaccgaccucaagcaguucaagcaggacgccaaguacucccacggcaucgacgucaccgaccucuucgccgcccagcccggccucaccuccgccgucaucgaggcccucccccgcaacauggucaucaccugccagggcuccgaggacauccgcaagcuccucgagucccagggccgccgcgacaucaagcucaucgacaucacccucuccaaggccgacucccgcaaguucgagaacgccgucugggaccaguucaaggaccucugccacaugcacaccggcgucgucgucgagaagaagaagcgcggcggcaaggaggagaucaccccccacugcgcccucauggacugcaucauguucgacgccgccgucuccggcggccucgacgccaagguccuccgcgucguccucccccgcgacauggucuuccgcaccuccacccccaaggucguccucuga

SEQ ID NO: 8304 - RNA, 1710 nt, Artificial Sequence
  derived and/or modified CDS sequence (opt2) from LASV(AV;Clade V)__CCA30315__NP
auguccgccuccaaggaggucaaguccuuccucuggacccagucccuccgccgcgagcucuccggcuacugcuccaacaucaagcuccaggucgucaaggacgcccaggcccuccuccacggccucgacuucuccgaggucuccaacguccagcgccucaugcgcaagcagcgccgcgacgacuccgaccucaagcgccuccgcgaccucaaccaggccgucaacaaccucgucgagcucaaguccacccagcagaaguccguccuccgcgucggcacccucuccuccgacgaccuccucacccucgccgccgaccucgagaagcucaaguccaaggucacccgcaccgagcgcccccucuccuccggcgucuacaugggcaaccucuccucccagcagcucgaccagcgccgcgcccuccucaaccucaucggcaugaccaacggcucccagggcucccaggccggccgcgacggcgucguccgcgucugggacgucaagaacgccgagcuccucaacaaccaguucggcaccaugcccucccucacccucgccugccucaccaagcagggccaggucgaccucaacgacgucguccaggcccucaccgaccucggccucaucuacaccgccaaguaccccaacaccuccgaccucgaccgccucacccagucccaccccauccucaacaugaucgacaccaagaaguccucccucaacaucuccggcuacaacuucucccucggcgccgccgucaaggccggcgccugcaugcucgacggcggcaacaugcucgagaccaucaaggucuccccccaguccauggacggcauccucaaguccauccucaaggucaagcgcgcccucggcauguucgucuccgacacccccggcgagcgcaaccccuacgagaacauccucuacaagaucugccucuccggcgacggcuggcccuacaucgccucccgcaccuccaucgucggccgcgccugggagaacaccgucgucgaccucgagaccgacggcaagccccagaagaucggcuccggcaacuccaacaagucccuccaguccgccggcuucuccgccggccucaccuacucccagcucaugacccucaaggacgccaugcuccagcucgaccccaacgccaagaccuggauggacaucgagggccgccccgaggaccccgucgaggucgcccucuaccagcccaucuccggcugcuacauccacuucuuccgcgagcccaccgaccucaagcaguucaagcaggacgccaaguacucccacggcaucgacaucgccgaccucuucgccgcccagcccggccucaccuccgccgucaucgaggcccucccccgcaacauggucaucaccugccagggcuccgaggacaucaagaagcuccucgagucccagggccgcaaggacaucaagcucaucgacaucgcccucuccaagaucgacucccgcaaguucgagaacgccgucugggaccaguacaaggaccucugccacaugcacaccggcgucgucgucgagaagaagaagcgcggcggcaaggaggagaucaccccccacugcgcccucauggacugcaucauguucgacgccgccgucuccggcggccucaacacccucguccuccgcgccguccucccccgcgacauggucuuccgcaccuccaccccccgcgucguccucuga

SEQ ID NO: 8305 - RNA, 1710 nt, Artificial Sequence
  derived and/or modified CDS sequence (opt2) from LASV(Togo/2016/7082;Clade VI)__AMR44578__NP
auguccaacuccaaggaggucaaguccuuccucuggacccagucccuccgccgcgagcucuccggcuacugcuccaacaucaagcuccaggucgucaaggacgcccaggcccuccuccacggccucgacuucuccgaggucuccaacguccagcgccucaugcgcaagcagaagcgcgacgacggcgaccucaagcgccuccgcgaccucaaccaggccgucaacaaccucgucgagcucaaguccguccagcagaaguccauccuccgcgucggcacccucaccuccgacgaccuccucacccucgccgccgaccucgagaagcucaaguccaaggucacccgcaccgagcgcccccucuccuccggcgucuacaugggcaaccucuccucccagcagcucgaccagcgccgcgcccuccucuccaugaucggcauguccggcggcaaccagaacucccagcccaagggcgacggcgucguccgcgucugggacgucaagaacgccgaccuccucaacaaccaguucggcaccaugcccucccucacccucgccugccucaccaagcagggccaggucgaccucaacgacgccguccaggcccucaccgaccucggccucaucuacaccgccaaguaccccaacuccuccgaccucgaccgccucucccagucccaccccauccucaacaugaucgacaccaagaaguccucccucaacaucuccggcuacaacuucucccucggcgccgccaucaagaccggcgccugcaugcucgacggcggcaacaugcucgagaccaucaaggucaccccccagaccauggacggcauccucaaguccauccucaaggucaagcgcucccucggcauguucaucuccgacacccccggcgagcgcaaccccuacgagaacauccucuacaagaucugccucuccggcgacggcuggcccuacaucgccucccgcaccgccaucaucggccgcgccugggagaacaccgucgucgaccucgaguccgacuccaagccccagaagaucggcuccaacggcuccaacaagucccuccaguccgccggcuucgcccccggccucaccuacucccagcucaugacccucaaggacuccaugcuccagcucgaccccaacgccaagaccuggaucgacaucgagggccgccccgaggaccccgucgaggucgcccucuuccagcccaucuccggcugcuacauccacuucuuccgcgagcccaccgaccucaagcaguucaagcaggacgccaaguacucccacggcaucgacgucaccgaccucuucgccgcccagcccggccucaccuccgccgucaucgaggcccucccccgcaacaugguccucaccugccagggcuccgacgacaucaagaagcuccucgacucccagggccgccgcgacaucaagcucaucgacgucucccucaacaagaucgacucccgcaaguucgagaacgccgucugggaccaguacaaggaccucugccacaugcacaccggcgucgucgucgagaagaagaagaagggcggcaaggaggagaucaccccccacugcgcccuccucgacugcaucauguucgacgccgccgucuccggcggccucaacgccaccguccuccgcgccguccucccccgcgacauggucuuccgcaccuccucccccaaggucguccucuga

SEQ ID NO: 8306 - RNA, 1710 nt, Artificial Sequence
  derived and/or modified CDS sequence (opt2) from LASV(KAK-428;Clade n.d. (VII))__ANH09741__NP
auguccaacuccaaggaggucaaguccuuccucuggacccagucccuccgccgcgagcucuccggcuacugcaccaacaucaagcuccaggucgucaaggacgcccaggcccuccuccacggccucgacuucuccgaggucuccaacguccagcgccucaugcgcaagcagaagcgcgacgacaacgaccucaagcgccuccgcgaccucaaccaggccgucaacaaccucgucgagcucaaguccguccagcagaaguccguccucaaggucggcacccucaacuccgacgaccuccucacccucgccgccgaccucgagaagcucaaguccaaggucguccgcaccgagcgcccccucuccuccggcgucuacaugggcaaccucuccucccagcagcucgaccagcgccgcgcccuccucaacaugaucggcauggccggcggcucccagggcaaccagcccucccgcgacggcgucguccgcgucugggacgucaagaacgccgaccuccucaacaaccaguucggcaccaugcccucccucacccucgccugccucaccaagcagggccaggucgaccucaacgacgucguccucgcccucaccgaccucggccucaucuacaccgccaaguaccccaacuccuccgaccucgaccgccucucccagaaccaccccguccucaacaugaucgacgucaacaaguccucccucaacaucuccggcuacaacuucucccucggcgccgccgucaaggccggcgccugcaugcucgacggcggcaacaugcucgagaccaucaagaucuccccccagaccgucgacggcauccucaaguccauccucaaggucaagcgcgcccucggcauguucgucuccgacacccccggcgagcgcaaccccuacgagaacauccucuacaaggucugccucuccggcaacggcuggcccuacaucgccucccgcaccuccaucgucggccgcgccugggagaacaccgucgucgaccucgaguccaacaagaaccagcccaaggucggcaacaacggcuccaacaagaugcuccaguccuccggcuucgccaccggccucaccuacucccagcucaugacccuccgcgacuccaugcuccagcucgaccccaccgccaagaccuggaucgacaucgagggccgccccgaggaccccgucgagcucgcccucuuccagcccuccuccggcugcuacauccacuucuuccgcgagcccaccgaccucaagcaguucaagcaggacgccaaguacucccacggcaucgacgucaacgaccucuucuccgcccagcccggccucaccuccgccguccucgaggcccucccccgcaacaugguccucaccugccagggcuccgacgacauccgcaagcuccucgacucccaggaccgcaaggacaucaagcucaucgacaucucccucuccaaggccgacgcccgcaaguucgagaacgacgucugggaccaguucaaggaccucugccacaugcacaccggcaucgucgucgagaagaagaagaagggcggcaagcaggagaugaccccccacugcgcccuccucgacugcaucauguucgacgccgccgucuccggcggccucaacguccccacccuccgcgccguccuccccaccgacauggucuuccgcaccaucaccaccaaggucguccucuga

SEQ ID NO: 8307 - RNA, 1710 nt, Artificial Sequence; identical to SEQ ID NO: 8301
  derived and/or modified CDS sequence (opt2) from LASV(Pinneo-NIG-1969;Clade I)__AIT17837__NP

SEQ ID NO: 8308 - RNA, 1710 nt, Artificial Sequence
  derived and/or modified CDS sequence (opt2) from LASV(ISTH0009-NIG-2011;Clade II)__AIT17405__NP
auguccgucuccaaggaggucaaguccuuccucuggacccagucccuccgccgcgagcucuccggcuacugcuccaacaucaagcuccaggucgucaaggacgcccaggcccuccuccacggccucgacuucuccgaggucuccaacguccagcgccucaugcgcaagcagaagcgcgacgacuccgaccucaagcgccuccgcgaccucaaccaggccgucaacaaccucgucgagcucaaguccacccagcagaaguccauccuccgcgucggcacccucaccuccgacgaccuccucacccucgccgccgaccucgagaagcucaaguccaaggucauccgcaccgagcgcccccucuccuccggcgucuacaugggcaaccucuccacccagcagcucgagcagcgccgcgcccuccucaacaugaucggcauggucggcggcgcccagggcacccagcccggccgcgacggcgucguccgcgucugggacgucaagaaccccgaccuccucaacaaccaguucggcaccaugcccucccucacccucgccugccucaccaagcagggccaggucgaccucaacgacgccguccucgcccucaccgaccucggccucaucuacaccgccaaguaccccaacuccuccgaccucgaccgccucucccagucccaccccauccucaacauggucgacaucaagaaguccucccucaacaucuccggcuacaacuucucccucggcgccgccgucaaggccggcgccugcaugcucgacggcggcaacaugcucgagaccaucaaggucaccccccagaccauggacggcauccucaaguccauccucaaggucaagcgcucccucggcauguucgucuccgacacccccggcgagcgcaaccccuacgagaacauccucuacaagaucugccucuccggcgacggcuggcccuacaucgccucccgcaccuccaucgucggccgcgccugggagaacaccaccgucgaccucgaguccgacggcaagccccagaaggucggcuccgccggcuccaacaagucccuccaguccgccggcuuccccaccggccucaccuacucccagcucaugacccucaaggacuccaugaugcagcucgaccccuccgccaagaccuggaucgacaucgagggccgccccgaggaccccgucgagaucgcccucuaccagcccauguccggcugcuacauccacuucuuccgcgagcccaccgaccucaagcaguucaagcaggacgccaaguacucccacggcaucgacgucgccgaccucuuccccgcccagcccggccucaccuccgccgucaucgaggcccucccccgcaacaugguccucaccugccagggcuccgacgacaucaagcgccuccucgacucccagggccgccgcgacaucaagcucaucgacaucgcccucuccaaggccgacucccgccgcuucgagaacgccgucugggaccagugcaaggaccucugccacaugcacaccggcgucgucgucgagaagaagaagcgcggcggcaaggaggagaucaccccccacugcgcccucauggacugcaucauguacgacgccgccgucuccggcggccucaacauccccguccuccgcgccguccucccccgcgacauggucuuccgcaccuccucccccaaggucguccucuga

SEQ ID NO: 8309 - RNA, 1710 nt, Artificial Sequence
  derived and/or modified CDS sequence (opt2) from LASV(ISTH0012-NIG-2011;Clade II)__AIT17409__NP
auguccgccuccaaggaggucaaguccuuccucuggacccagucccuccgccgcgagcucuccggcuacugcuccaacaucaagcuccaggucgucaaggacgcccaggcccuccuccacggccucgacuucuccgaggucuccaacguccagcgccucaugcgcaagcagaagcgcgacgacggcgaccucaagcgccuccgcgaccucaaccaggccgucaacaaccucgucgagcucaaguccacccagcagaaguccauccuccgcgucggcacccucaccuccgacgaccuccucacccucgccgccgaccucgagaagcucaaguccaaggucauccgcaccgagcgcccccucuccuccggcgucuacaugggcaaccucuccacccagcagcucgagcagcgccgcgcccuccucaacaugaucggcauggucggcggcgcccagggcacccagcccggccgcgacggcgucguccgcgucugggacgucaagaaccccgaccuccucaacaaccaguucggcaccaugcccucccucacccucgccugccucaccaagcagggccaggucgaccucaacgacgccguccucgcccucaccgaccucggccucaucuacaccgccaaguaccccaacuccuccgaccucgaccgccucucccagucccaccccauccucaacauggucgacaccaagaaguccucccucaacaucuccggcuacaacuucucccucggcgccgccgucaaggccggcgccugcaugcucgacggcggcaacaugcucgagaccaucaaggucaccccccagaccauggacggcauccucaaguccauccucaaggucaagaagucccucggcauguucgucuccgacacccccggcgagcgcaaccccuacgagaacauccucuacaagaucugccucuccggcgacggcuggcccuacaucgccucccgcaccuccaucgucggccgcgccugggagaacaccaccgucgaccucgaguccgacggcaagccccagaaggucggcaccgccggcuccaacaagucccuccaguccgccggcuuccccaccggccucaccuacucccagcucaugacccucaaggacuccaugaugcagcucgaccccuccgccaagaccuggaucgacaucgagggccgccccgaggaccccgucgagaucgcccucuaccagcccauguccggcugcuacauccacuucuuccgcgagcccaccgaccucaagcaguucaagcaggacgccaaguacucccacggcaucgacgucaccgaccucuucuccgcccagcccggccucaccuccgccgucaucgaggcccucccccgcaacaugguccucaccugccagggcuccgacgacaucaagcgccuccucgacucccagggccgccgcgacaucaagcucaucgacaucgcccucaacaaggccgacucccgccgcuucgagaacgccgucugggaccagugcaaggaccucugccacaugcacaccggcgucgucgucgagaagaagaagcgcggcggcaaggaggagaucaccccccacugcgcccucauggacugcaucauguacgacgccgccgucuccggcggccucaacauccccguccuccgcgccguccucccccgcgacauggucuuccgcaccuccucccccaaggucguccucuga

SEQ ID NO: 8310 - RNA, 1710 nt, Artificial Sequence
  derived and/or modified CDS sequence (opt2) from LASV(ISTH0047-NIG-2011;Clade II)__AIT17413__NP
auguccgccuccaaggaggucaaguccuuccucuggacccagucccuccgccgcgagcucuccggcuacugcuccuccaucaagcuccaggucgucaaggacgcccaggcccuccuccacggccucgacuucuccgaggucuccaacguccagcgccucaugcgcaagcagaagcgcgacgacuccgaccucaagcgccuccgcgaccucaaccaggccgucaacaaccucgucgagcucaaguccacccagcagaaguccauccuccgcgucggcacccucaccuccgacgaccuccucacccucgccgccgaccucgagaagcucaaguccaaggucauccgcaccgagcgcccccucuccuccggcgucuacaugggcaaccucuccacccagcagcucgagcagcgccgcgcccuccucaacaugaucggcauggucggcggcgcccagggcacccagcccggccgcgacggcgucguccgcgucugggacgucaagaaccccgaccuccucaacaaccaguucggcaccaugcccucccucacccucgccugccucaccaagcagggccaggucgaccucaacgacgccguccucgcccucaccgaccucggccucaucuacaccgccaaguaccccaacuccuccgaccucgaccgccucucccagucccaccccauccucaacauggucgacaccaagaaguccucccucaacaucuccggcuacaacuucucccucggcgccgccgucaaggccggcgccugcaugcucgacggcggcaacaugcucgagaccaucaaggucaccccccagaccauggacggcauccucaaguccauccucaaggucaagcgcucccucggcauguucgucuccgacgcccccggcgagcgcaaccccuacgagaacauccucuacaagaucugccucuccggcgacggcuggcccuacaucgccucccgcaccuccaucgucggccgcgccugggagaacaccaccgucgaccucgaguccgacggcaagccccagaagaugggcaccgccggcuccaacaagucccuccaguccgccggcuuccccaccggccucaccuacucccagcucaugacccucaaggacuccaugaugcagcucgaccccuccgccaagaccuggaucgacaucgagggccgccccgaggaccccgucgagaucgcccucuaccagcccauguccggcugcuacauccacuucuuccgcgagcccaccgaccucaagcaguucaagcaggacgccaaguacucccacggcaucgacgucgccgaccucuuccccgcccagcccggccucaccuccgccgucaucgaggcccucccccgcaacaugguccucaccugccagggcuccgacgacaucaagaagcuccucgacucccagggccgccgcgacaucaagcucaucgacaucgcccucuccaaggccgacucccgccgcuucgagaacgccgucugggaccagugcaaggaccucugccacaugcacaccggcgucgucgucgagaagaagaagcgcggcggcaaggaggagaucaccccccacugcgcccucauggacugcaucauguacgacgccgccgucuccggcggccucaacauccccguccuccgcgccguccucccccgcgacauggucuuccgcaccuccucccccaaggucguccucuga

SEQ ID NO: 8311 - RNA, 1710 nt, Artificial Sequence
  derived and/or modified CDS sequence (opt2) from LASV(ISTH0230-NIG-2011;Clade II)__AIT17421__NP
auguccgccuccaaggaggucaaguccuuccucuggacccagucccuccgccgcgagcucuccggcuacugcuccaacaucaagcuccaggucgucaaggacgcccaggcccuccuccacggccucgacuucuccgaggucuccaacguccagcgccucaugcgcaagcagaagcgcgacgacuccgaccucaagcgccuccgcgaccucaaccaggccgucaacaaccucgucgagcucaaguccacccagcagaaguccauccuccgcgucggcacccucaccuccgacgaccuccucacccucgccgccgaccucgagaagcucaaguccaaggucauccgcaccgagcgcccccucuccuccggcgucuacaugggcaaccucuccacccagcagcucgagcagcgccgcgcccuccucaacaugaucggcauggucuccggcgcccagggcacccagcccggccgcgacggcgucguccgcgucugggacgucaagaaccccgaccuccucaacaaccaguucggcaccaugcccucccucacccucgccugccucaccaagcagggccaggucgaccucaacgacgccguccucgcccucaccgaccucggccucaucuacaccgccaaguaccccaacuccuccgaccucgaccgccucucccagucccaccccauccucaacauggucgacaucaagaaguccucccucaacaucuccggcuacaacuucucccucggcgccgccgucaaggccggcgccugcaugcucgacggcggcaacaugcucgagaccaucaaggucaccccccagaccauggacggcauccucaaguccauccucaaggucaagcgcucccucggcauguucgucuccgacacccccggcgagcgcaaccccuacgagaacauccucuacaagaucugccucuccggcgacggcuggcccuacaucgccucccgcaccuccaucgucggccgcgccugggagaacaccaccgucgaccucgaguccgacggcaagccccagaagaugggcuccgccggcuccaacaagucccuccaguccgccggcuuccccaccggccucaccuacucccagcucaugacccucaaggacuccaugaugcagcucgaccccuccgccaagaccuggaucgacaucgagggccgccccgaggaccccgucgagaucgcccucuaccagcccauguccggcugcuacauccacuucuuccgcgagcccaccgaccucaagcaguucaagcaggacgccaaguacucccacggcaucgacgucgccgaccucuuccccgcccagcccggccucaccuccgccgucaucgaggcccucccccgcaacaugguccucaccugccagggcuccgacgacaucaagcgccuccucgacucccagggccgccgcgacaucaagcucaucgacaucgcccucuccaaggccgacucccgccgcuucgagaacgccgucugggaccagugcaaggaccucugccacaugcacaccggcgucgucgucgagaagaagaagcgcggcggcaaggaggagaucaccccccacugcgcccucauggacugcaucauguacgacgccgccgucuccggcggccucaacauccccguccuccgcgccguccucccccgcgacauggucuuccgcaccuccucccccaaggucguccucuga

SEQ ID NO: 8312 - RNA, 1710 nt, Artificial Sequence
  derived and/or modified CDS sequence (opt2) from LASV(ISTH0531-NIG-2011;Clade II)__AIT17425__NP
auguccgccuccaaggaggucaaguccuuccucuggacccagucccuccgccgcgagcucuccggcuacugcuccuccaucaagcuccaggucgucaaggacgcccaggcccuccuccacggccucgacuucuccgaggucuccaacguccagcgccucaugcgcaagcagaagcgcgacgacuccgaccucaagcgccuccgcgaccucaaccaggccgucaacaaccucgucgagcucaaguccacccagcagaaguccauccuccgcgucggcacccucaccuccgacgaccuccucacccucgccgccgaccucgagaagcucaaguccaaggucauccgcaccgagcgcccccucuccuccggcgucuacaugggcaaccucuccacccagcagcucgagcagcgccgcgcccuccucaacaugaucggcauggucggcggcgcccagggcacccagcccggccgcgacggcgucguccgcgucugggacgucaagaaccccgaccuccucaacaaccaguucggcaccaugcccucccucacccucgccugccucaccaagcagggccaggucgaccucaacgacgccguccucgcccucaccgaccucggccucaucuacaccgccaaguaccccaacuccuccgaccucgaccgccucucccagucccaccccauccucaacauggucgacaccaagaaguccucccucaacaucuccggcuacaacuucucccucggcgccgccgucaaggccggcgccugcaugcucgacggcggcaacaugcucgagaccaucaaggucaccccccagaccauggacggcauccucaaguccauccucaaggucaagaagucccucggcauguucgucuccgacacccccggcgagcgcaaccccuacgagaacauccucuacaagaucugccucuccggcgacggcuggcccuacaucgccucccgcaccuccaucgucggccgcgccugggagaacaccaucgucgaccucgaguccgacggcaagccccagaaggucggcaccgccggcuccaacaagucccuccaguccgccggcuuccccaccggccucaccuacucccagcucaugacccucaaggacuccaugaugcagcucgaccccuccgccaagaccuggaucgacaucgagggccgccccgaggaccccgucgagaucgcccucuaccagcccauguccggcugcuacauccacuucuuccgcgagcccaccgaccucaagcaguucaagcaggacgccaaguacucccacggcaucgacgucgccgaccucuuccccgcccagcccggccucaccuccgccgucaucgaggcccucccccgcaacaugguccucaccugccagggcuccgacgacaucaagcgccuccucgacucccagggccgccgcgacaucaagcucaucgacaucgcccucuccaaggccgacucccgccgcuucgagaacgccgucugggaccagugcaaggaccucugccacaugcacaccggcgucgucgucgagaagaagaagcgcggcggcaaggaggagaucaccccccacugcgcccucauggacugcaucauguacgacgccgccgucuccggcggccucaacauccccguccuccgcgccguccucccccgcgacauggucuuccgcaccuccucccccaaggucguccucuga

SEQ ID NO: 8313 - RNA, 1710 nt, Artificial Sequence
  derived and/or modified CDS sequence (opt2) from LASV(ISTH0595-NIG-2011;Clade II)__AIT17429__NP
auguccgccuccaaggaggucaaguccuuccucuggacccagucccuccgccgcgagcucuccggcuacugcuccaacaucaagcuccaggucgucaaggacgcccaggcccuccuccacggccucgacuucuccgaggucuccaacguccagcgccucaugcgcaagcagaagcgcgacgacuccgaccucaagcgccuccgcgaccucaaccaggccgucaacaaccucgucgagcucaaguccacccagcagaaguccauccuccgcgucggcacccucaccuccgacgaccuccucacccucgccgccgaccucgagaagcucaaguccaaggucauccgcaccgagcgcccccucuccuccggcgucuacaugggcaaccucuccgcccagcagcucgagcagcgccgcgcccuccucaacaugaucggcauggucggcggcgcccagggcacccagcccggccgcgacggcgucguccgcgucugggacgucaagaaccccgaccuccucaacaaccaguucggcaccaugcccucccucacccucgccugccucaccaagcagggccaggucgaccucaacgacgccguccucgcccucaccgaccucggccucaucuacaccgccaaguaccccaacuccuccgaccucgaccgccucucccagucccaccccauccucaacauggucgacaccaagaaguccucccucaacaucuccggcuacaacuucucccucggcgccgccgucaaggccggcgccugcaugcucgacggcggcaacaugcucgagaccaucaaggucaccccccagaccauggacggcauccucaaguccauccucaaggucaagcgcucccucggcauguucgucuccgacgcccccggcgagcgcaaccccuacgagaacauccucuacaagaucugccucuccggcgacggcuggcccuacaucgccucccgcaccuccaucgucggccgcgccugggagaacaccaccgucgaccucgaguccgacggcaagccccagaaggucggcaccgccggcuccaacaagucccuccaguccgccggcuuccccaccggccucaccuacucccagcucaugacccucaaggacuccaugaugcagcucgaccccuccgccaagaccuggaucgacaucgagggccgccccgaggaccccgucgagaucgcccucuaccagcccauguccggcugcuacauccacuucuuccgcgagcccaccgaccucaagcaguucaagcaggacgccaaguacucccacggcaucgacgucgccgaccucuuccccgcccagcccggccucaccuccgccgucaucgaggcccucccccgcaacaugguccucaccugccagggcuccgacgacaucaagcgccuccucgacucccagggccgccgcgacaucaagcucaucgacaucgcccucuccaaggccgacucccgccgcuucgagaacgccgucugggaccagugcaaggaccucugccacaugcacaccggcgucgucgucgagaagaagaagcgcggcggcaaggaggagaucaccccccacugcgcccucauggacugcaucauguacgacgccgccgucuccggcggccucaacauccccguccuccgcgccguccucccccgcgacauggucuuccgcaccuccucccccaaggucguccucuga

SEQ ID NO: 8314 - RNA, 1710 nt, Artificial Sequence
  derived and/or modified CDS sequence (opt2) from LASV(ISTH0964-NIG-2011;Clade II)__AIT17431__NP
auguccgccuccaaggaggucaaguccuuccucuggacccagucccuccgccgcgagcucuccggcuacugcuccaacaucaagcuccaggucgucaaggacgcccaggcccuccuccacggccucgacuucuccgaggucuccaacguccagcgccucaugcgcaagcagaagcgcgacgacuccgaccucaagcgccuccgcgaccucaaccaggccgucaacaaccucgucgagcucaaguccacccagcagaaguccauccuccgcgucggcacccucaccuccgacgaccuccucacccucgccgccgaccucgagaagcucaaguccaaggucauccgcaccgagcgcccccucuccuccggcgucuacaugggcaaccucuccacccagcagcucgagcagcgccgcgcccuccucaacaugaucggcauggucggcggcgcccagggcacccagcccggccgcgacggcgucguccgcgucugggacgucaagaaccccgaccuccucaacaaccaguucggcaccaugcccucccucacccucgccugccucaccaagcagggccaggucgaccucaacgacgccguccucgcccucaccgaccucggccucaucuacaccgccaaguaccccaacuccuccgaccucgaccgccucucccagucccaccccauccucaacauggucgacaccaagaaguccucccucaacaucuccggcuucaacuucucccucggcgccgccgucaaggccggcgccugcaugcucgacggcggcaacaugcucgagaccaucaaggucaccccccagaccauggacggcauccucaaguccauccucaaggucaagaagucccucggcauguucgucuccgacacccccggcgagcgcaaccccuacgagaacauccucuacaagaucugccucuccggcgacggcuggcccuacaucgccucccgcaccuccaucgucggccgcgccugggagaacaccaccgucgaccucgaguccgacggcaagccccagaaggucggcaccgccggcuccaacaagucccuccaguccgccggcuuccccaccggccucaccuacucccagcucaugacccucaaggacuccaugaugcagcucgaccccuccgccaagaccuggaucgacaucgagggccgccccgaggaccccgucgagaucgcccucuaccagcccauguccggcugcuacauccacuucuuccgcgagcccaccgaccucaagcaguucaagcaggacgccaaguacucccacggcaucgacgucgccgaccucuuccccgcccagcccggccucaccuccgccgucaucgaggcccucccccgcaacaugguccucaccugccagggcuccgacgacaucaagcgccuccucgacucccagggccgccgcgacaucaagcucaucgacaucgcccucuccaaggccgacucccgccgcuucgagaacgccgucugggaccagugcaaggaccucugccacaugcacaccggcgucgucgucgagaagaagaagcgcggcggcaaggaggagaucaccccccacugcgcccucauggacugcaucauguacgacgccgccgucuccggcggccucaacauccccguccuccgcgccguccucccccgcgacauggucuuccgcaccgccucccccaaggucguccucuga

SEQ ID NO: 8315 - RNA, 1710 nt, Artificial Sequence
  derived and/or modified CDS sequence (opt2) from LASV(ISTH1038-NIG-2011;Clade II)__AIT17439__NP
auguccgccuccaaggaggucaaguccuuccucuggacccagucccuccgccgcgagcucuccggcuacugcuccuccaucaagcuccaggucgucaaggacgcccaggcccuccuccacggccucgacuucuccgaggucuccaacguccagcgccucaugcgcaagcagaagcgcgacgacuccgaccucaagcgccuccgcgaccucaaccaggccgucaacaaccucgucgagcucaaguccacccagcagaaguccauccuccgcgucggcacccucaccuccgacgaccuccucacccucgccgccgaccucgagaagcucaaguccaaggucauccgcaccgagcgcccccucuccuccggcgucuacaugggcaaccucuccacccagcagcucgagcagcgccgcgcccuccucaacaugaucggcauggucggcggcgcccagggcacccagcccggccgcgacggcgucguccgcgucugggacgucaagaaccccgaccuccucaacaaccaguucggcaccaugcccucccucacccucgccugccucaccaagcagggccaggucgaccucaacgacgccguccucgcccucaccgaccucggccucaucuacaccgccaaguaccccaacuccuccgaccucgaccgccucucccagucccaccccauccucaacauggucgacaccaagaaguccucccucaacaucuccggcuucaacuucucccucggcgccgccgucaaggccggcgccugcaugcucgacggcggcaacaugcucgagaccaucaaggucaccccccagaccauggacggcauccucaaguccauccucaaggucaagcgcucccucggcauguucgucuccgacacccccggcgagcgcaaccccuacgagaacauccucuacaagaucugccucuccggcgacggcuggcccuacaucgccucccgcaccuccaucgucggccgcgccugggagaacaccaccgucgaccucgaguccgacggcaagccccagaagaugggcaccgccggcuccaacaagucccuccaguccgccggcuuccccaccggccucaccuacucccagcucaugacccucaaggacuccaugaugcagcucgaccccuccgccaagaccuggaucgacaucgagggccgccccgaggaccccgucgagaucgcccucuaccagcccgucuccggcugcuacauccacuucuuccgcgagcccaccgaccucaagcaguucaagcaggacgccaaguacucccacggcaucgacgucgccgaccucuucuccgcccagcccggccucaccuccgccgucaucgaggcccucccccgcaacaugguccucaccugccagggcuccgacgacaucaagcgccuccucgacucccagggccgccgcgacaucaagcucaucgacaucgcccucuccaaggccgacucccgccgcuucgagaacgccgucugggaccagugcaaggaccucugccacaugcacaccggcgucgucgucgagaagaagaagcgcggcggcaaggaggagaucaccccccacugcgcccucauggacugcaucauguacgacgccgccgucuccggcggccucaacauccccgucuuccgcgccguccucccccgcgacauggucuuccgcaccuccucccccaaggucguccucuga

SEQ ID NO: 8316 - RNA, 1710 nt, Artificial Sequence
  derived and/or modified CDS sequence (opt2) from LASV(ISTH1048-NIG-2011;Clade II)__AIT17443__NP
auguccgccuccaaggaggucaaguccuuccucuggacccagucccuccgccgcgagcucuccggcuacugcuccuccaucaagcuccaggucgucaaggacgcccaggcccuccuccacggccucgacuucuccgaggucuccaacguccagcgccucaugcgcaagcagaagcgcgacgacuccgaccucaagcgccuccgcgaccucaaccaggccgucaacaaccucgucgagcucaaguccacccagcagaaguccauccuccgcgucggcacccucaccuccgacgaccuccucacccucgccgccgaccucgagaagcucaaguccaaggucauccgcaccgagcgcccccucuccuccggcgucuacaugggcaaccucuccacccagcagcucgagcagcgccgcgcccuccucaacaugaucggcauggucggcggcgcccagggcacccagcccggccgcgacggcgucguccgcgucugggacgucaagaaccccgaccuccucaacaaccaguucggcaccaugcccucccucacccucgccugccucaccaagcagggccaggucgaccucaacgacgccguccucgcccucaccgaccucggccucaucuacaccgccaaguaccccaacuccuccgaccucgaccgccucucccagucccaccccauccucaacauggucgacaccaagaaguccucccucaacaucuccggcuacaacuucucccucggcgccgccgucaaggccggcgccugcaugcucgacggcggcaacaugcucgagaccaucaaggucaccccccagaccauggacggcauccucaaguccauccucaaggucaagcgcucccucggcauguucgucuccgacgcccccggcgagcgcaaccccuacgagaacauccucuacaagaucugccucuccggcgacggcuggcccuacaucgccucccgcaccuccaucgucggccgcgccugggagaacaccaccgucgaccucgaguccgacggcaagccccagaaggucggcaccgccggcuccaacaagucccuccaguccgccggcuuccccaccggccucaccuacucccagcucaugacccucaaggacuccaugaugcagcucgaccccuccgccaagaccuggaucgacaucgagggccgccccgaggaccccgucgagaucgcccucuaccagcccauguccggcugcuacauccacuucuuccgcgagcccaccgaccucaagcaguucaagcaggacgccaaguacucccacggcaucgacgucgccgaccucuuccccgcccagcccggccucaccuccgccgucaucgaggcccucccccgcaacaugguccucaccugccagggcuccgacgacaucaagaagcuccucgacucccagggccgccgcgacaucaagcucaucgacaucgcccucuccaaggccgacucccgccgcuucgagaacgccgucugggaccagugcaaggaccucugccacaugcacaccggcgucgucgucgagaagaagaagcgcggcggcaaggaggagaucaccccccacugcgcccucauggacugcaucauguacgacgccgccgucuccggcggccucaacauccccguccuccgcgccguccucccccgcgacauggucuuccgcaccuccucccccaaggucguccucuga

SEQ ID NO: 8317 - RNA, 1710 nt, Artificial Sequence
  derived and/or modified CDS sequence (opt2) from LASV(ISTH1058-NIG-2011;Clade II)__AIT17447__NP
auguccgccuccaaggaggucaaguccuuccucuggacccagucccuccgccgcgagcucuccggcuacugcuccaacaucaagcuccaggucgucaaggacgcccaggcccuccuccacggccucgacuucuccgaggucuccaacguccagcgccucaugcgcaagcagaagcgcgacgacuccgaccucaagcgccuccgcgaccucaaccaggccgucaacaaccucgucgagcucaaguccacccagcagaaguccauccuccgcgucggcacccucaccuccgacgaccuccucacccucgccgccgaccucgagaagcucaaguccaaggucauccgcaccgagcgcccccucuccuccggcgucuacaugggcaaccucuccacccagcagcucgagcagcgccgcgcccuccucaacaugaucggcauggucggcggcgcccagggcacccagcccggccgcgacggcgucguccgcgucugggacgucaagaaccccgaccuccucaacaaccaguucggcaccaugcccucccucacccucgccugccucaccaagcagggccaggucgaccucaacgacgccguccucgcccucaccgaccucggccucaucuacaccgccaaguaccccaacuccuccgaccucgaccgccucucccagucccaccccauccucaacauggucgacaccaagaaguccucccucaacaucuccggcuacaacuucucccucggcgccgccgucaaggccggcgccugcaugcucgacggcggcaacaugcucgagaccaucaaggucaccccccagaccauggacggcauccucaaguccauccucaaggucaagaagucccucggcauguucgucuccgacacccccggcgagcgcaaccccuacgagaacauccucuacaagaucugccucuccggcgacggcuggcccuacaucgccucccgcaccuccaucgucggccgcgccugggagaacaccaccgucgaccucgaguccgacggcaagccccagaaggucggcaccaccggcuccaacaagucccuccaguccgccggcuuccccaccggccucaccuacucccagcucaugacccucaaggacuccaugaugcagcucgaccccuccgccaagaccuggaucgacaucgagggccgccccgaggaccccgucgagaucgcccucuaccagcccauguccggcugcuacauccacuucuuccgcgagcccaccgaccucaagcaguucaagcaggacgccaaguacucccacggcaucgacgucaccgaccucuuccccgcccagcccggccucaccuccgccgucaucgaggcccucccccgcaacaugguccucaccugccagggcuccgacgacaucaagcgccuccucgacucccagggccgccgcgacaucaagcucaucgacaucgcccucuccaaggccgacucccgccgcuucgagaacgccgucugggaccagugcaaggaccucugccacaugcacaccggcgucgucgucgagaagaagaagcgcggcggcaaggaggagaucaccccccacugcgcccucauggacugcaucauguacgacgccgccgucuccggcggccucaacauccccguccuccgcgccguccucccccgcgacauggucuuccgcaccuccucccccaaggucguccucuga

SEQ ID NO: 8318 - RNA, 1710 nt, Artificial Sequence
  derived and/or modified CDS sequence (opt2) from LASV(ISTH1064-NIG-2011;Clade II)__AIT17451__NP
auguccgccuccaaggaggucaaguccuuccucuggacccagucccuccgccgcgagcucuccggcuacugcuccaacaucaagcuccaggucgucaaggacgcccaggcccuccuccacggccucgacuucuccgaggucuccaacguccagcgccucaugcgcaagcagaagcgcgacgacuccgaccucaagcgccuccgcgaccucaaccaggccgucaacaaccucgucgagcucaaguccacccagcagaaguccauccuccgcgucggcacccucaccuccgacgaccuccucacccucgccgccgaccucgagaagcucaaguccaaggucauccgcaccgagcgcccccucuccuccggcgucuacaugggcaaccucuccacccagcagcucgagcagcgccgcgcccuccucaacaugaucggcauggucggcggcgcccagggcacccagcccggccgcgacggcgucguccgcgucugggacgucaagaaccccgaccuccucaacaaccaguucggcaccaugcccucccucacccucgccugccucaccaagcagggccaggucgaccucaacgacgccguccucgcccucaccgaccucggccucaucuacaccgccaaguuccccaacuccuccgaccucgaccgccucucccagucccaccccauccucaacauggucgacaccaagaaguccucccucaacaucuccggcuacaacuucucccucggcgccgccgucaaggccggcgccugcaugcucgacggcggcaacaugcucgagaccaucaaggucaccccccagaccauggacggcauccucaaguccauccucaaggucaagaagucccucggcauguucgucuccgacacccccggcgagcgcaaccccuacgagaacauccucuacaagaucugccucuccggcgacggcuggcccuacaucgccucccgcaccuccaucgucggccgcgccugggagaacaccaccgucgaccucgaguccgacggcaagccccagaaggucggcaccaccggcuccaacaagucccuccaguccgccggcuuccccaccggccucaccuacucccagcucaugacccucaaggacuccaugaugcagcucgaccccuccgccaagaccuggaucgacaucgagggccgccccgaggaccccgucgagaucgcccucuaccagcccauguccggcugcuacauccacuucuuccgcgagcccaccgaccucaagcaguucaagcaggacgccaaguacucccacggcaucgacgucgccgaccucuuccccgcccagcccggccucaccuccgccgucaucgaggcccucccccgcaacaugguccucaccugccagggcuccgacgacaucaagcgccuccucgacucccagggccgccgcgacaucaagcucaucgacaucgcccucuccaaggccgacucccgccgcuucgagaacgccgucugggaccagugcaaggaccucugccacaugcacaccggcgucgucgucgagaagaagaagcgcggcggcaaggaggagaucaccccccacugcgcccucauggacugcaucauguacgacgccgccgucuccggcggccucaacauccccguccuccgcgccguccucccccgcgacauggucuuccgcaccuccucccccaaggucguccucuga

SEQ ID NO: 8319 - RNA, 1710 nt, Artificial Sequence
  derived and/or modified CDS sequence (opt2) from LASV(ISTH1069-NIG-2011;Clade II)__AIT17455__NP
auguccgccuccaaggaggucaaguccuuccucuggacccagucccuccgccgcgagcucuccggcuacugcuccuccaucaagcuccaggucgucaaggacgcccaggcccuccuccacggccucgacuucuccgaggucuccaacguccagcgccucaugcgcaagcagaagcgcgacgacuccgaccucaagcgccuccgcgaccucaaccaggccgucaacaaccucgucgagcucaaguccacccagcagaaguccguccuccgcgucggcacccucaccuccgacgaccuccucacccucgccgccgaccucgagaagcucaaguccaaggucauccgcaccgagcgcccccucuccuccggcgucuacaugggcaaccucuccacccagcagcucgagcagcgccgcgcccuccucuccaugaucggcauggucggcggcgcccagggcacccagcccggccgcgacggcgucguccgcgucugggacgucaagaaccccgaccuccucaacaaccaguucggcaccaugcccucccucacccucgccugccucaccaagcagggccaggucgaccucaacgacgccguccucgcccucaccgaccucggccucaucuacaccgccaaguaccccaacuccuccgaccucgaccgccucucccagucccaccccauccucaacauggucgacaccaagaaguccucccucaacaucuccggcuacaacuucucccucggcgccgccgucaaggccggcgccugcaugcucgacggcggcaacaugcucgagaccaucaaggucaccccccagaccauggacggcauccucaaguccauccucaaggucaagcgcucccucggcauguucgucuccgacacccccggcgagcgcaaccccuacgagaacauccucuacaagaucugccucuccggcgacggcuggcccuacaucgccucccgcaccuccaucgucggccgcgccugggagaacaccaccgucgaccucgaguccgacggcaagccccagaaggucggcaccgccggcuccaacaagucccuccaguccgccggcuuccccaccggccucaccuacucccagcucaugacccucaaggacuccaugaugcagcucgaccccuccgccaagaccuggaucgacaucgagggccgccccgaggaccccgucgagaucgcccucuaccagcccauguccggcugcuacauccacuucuuccgcgagcccaccgaccucaagcaguucaagcaggacgccaaguacucccacggcaucgacgucgccgaccucuuccccgcccagcccggccucaccuccgccgucaucgaggcccucccccgcaacaugguccucaccugccagggcuccgacgacaucaagcgccuccucgacucccagggccgccgcgacaucaagcucaucgacaucgcccucuccaaggccgacucccgccgcuucgagaacgccgucugggaccagugcaaggaccucugccacaugcacaccggcgucgucgucgagaagaagaagcgcggcggcaaggaggagaucaccccccacugcgcccucauggacugcaucauguacgacgccgccgucuccggcggccucaacauccccguccuccgcgccguccucccccgcgacauggucuuccgcaccuccucccccaaggucguccucuga

SEQ ID NO: 8320 - RNA, 1710 nt, Artificial Sequence
  derived and/or modified CDS sequence (opt2) from LASV(ISTH1096-NIG-2012;Clade II)__AIT17459__NP
auguccgccuccaaggaggucaaguccuuccucuggacccagucccuccgccgcgagcucuccggcuacugcuccuccaucaagcuccaggucgucaaggacgcccaggcccuccuccacggccucgacuucuccgaggucuccaacguccagcgccucaugcgcaagcagaagcgcgacgacuccgaccucaagcgccuccgcgaccucaaccaggccgucaacaaccucgucgagcucaaguccacccagcagaaguccauccuccgcgucggcacccucaccuccgacgaccuccucacccucgccgccgaccucgagaagcucaaguccaaggucauccgcaccgagcgcccccucuccuccggcgucuacaugggcaaccucuccacccagcagcucgagcagcgccgcgcccuccucaacaugaucggcauggucggcggcgcccagggcacccagcccggccgcgacggcgucguccgcgucugggacgucaagaaccccgaccuccucaacaaccaguucggcaccaugcccucccucacccucgccugccucaccaagcagggccaggucgaccucaacgacgccguccucgcccucaccgaccucggccucaucuacaccgccaaguaccccaacuccuccgaccucgaccgccucucccagucccaccccauccucaacauggucgacaccaagaaguccucccucaacaucuccggcuacaacuucucccucggcgccgccgucaaggccggcgccugcaugcucgacggcggcaacaugcucgagaccaucaaggucaccccccagaccauggacggcauccucaaguccauccucaaggucaagcgcucccucggcauguucgucuccgacacccccggcgagcgcaaccccuacgagaacauccucuacaagaucugccucuccggcgacggcuggcccuacaucgccucccgcaccuccaucgucggccgcgccugggagaacaccaccgucgaccucgaguccgacggcaagccccagaagaugggcaccgccggcuccaacaagucccuccaguccgccggcuuccccaccggccucaccuacucccagcucaugacccucaaggacuccaugaugcagcucgaccccuccgccaagaccuggaucgacaucgagggccgccccgaggaccccgucgagaucgcccucuaccagcccgucuccggcugcuacauccacuucuuccgcgagcccaccgaccucaagcaguucaagcaggacgccaaguacucccacggcaucgacgucgccgaccucuuccccgcccagcccggccucaccuccgccgucaucgaggcccucccccgcaacaugguccucaccugccagggcuccgacgacaucaagcgccuccucgacucccagggccgccgcgacaucaagcucaucgacaucgcccucuccaaggccgacucccgccgcuucgagaacgccgucugggaccagugcaaggaccucugccacaugcacaccggcgucgucgucgagaagaagaagcgcggcggcaaggaggagaucaccccccacugcgcccucauggacugcaucauguacgacgccgccgucuccggcggccucaacauccccguccuccgcgccguccucccccgcgacauggucuuccgcaccuccucccccaaggucguccucuga

SEQ ID NO: 8321 - RNA, 1710 nt, Artificial Sequence
  derived and/or modified CDS sequence (opt2) from LASV(ISTH1107-NIG-2012;Clade II)__AIT17463__NP
auguccgccuccaaggaggucaaguccuuccucuggacccagucccuccgccgcgagcucuccggcuacugcuccuccaucaagcuccaggucgucaaggacgcccaggcccuccuccacggccucgacuucuccgaggucuccaacguccagcgccucaugcgcaagcacaagcgcgacgacuccgaccucaagcgccuccgcgaccucaaccaggccgucaacaaccucgucgagcucaaguccacccagcagaaguccauccuccgcgucggcacccucaccuccgacgaccuccucacccucgccgccgaccucgagaagcucaaguccaaggucauccgcaccgagcgcccccucuccuccggcgucuacaugggcaaccucuccacccagcagcucgagcagcgccgcgcccuccucaacaugaucggcauggucggcggcgcccaguccacccagcccggccgcgacggcgucguccgcgucugggacgucaagaaccccgaccuccucaacaaccaguucggcaccaugcccucccucacccucgccugccucaccaagcagggccaggucgaccucaacgacgccguccucgcccucaccgaccucggccucaucuacaccgccaaguaccccaacuccuccgaccucgaccgccucucccagucccaccccauccucaccauggucgacaccaagaaguccucccucaacaucuccggcuucaacuucucccucggcgccgccgucaaggccggcgccugcaugcucgacggcggcaacaugcucgagaccaucaaggucaccccccagaccauggacggcauccucaaguccauccucaaggucaagaagucccucggcauguucgucuccgacacccccggcgagcgcaaccccuacgagaacauccucuacaagaucugccucuccggcgacggcuggcccuacaucgccucccgcaccuccaucgucggccgcgccugggagaacaccaucgucgaccucgagaccgacggcaagccccagaaggucggcaccgccggcuccucccgcucccuccaguccgccggcuuccccaccggccucaccuacucccagcucaugacccucaaggacuccaugaugcagcucgaccccuccgccaagaccuggaucgacaucgagggccgccccgaggaccccgucgagaucgcccucuaccagcccauguccggcugcuacauccacuucuuccgcgagcccaccgaccucaagcaguucaagcaggacgccaaguacucccacggcaucgacgucgccgaccucuuccccgcccagcccggccucaccuccgccgucaucgaggcccucccccgcaacaugguccucaccugccagggcuccgacgacaucaagaagcuccucgacucccagggccgccgcgacaucaagcucaucgacaucgcccucuccaaggccgacucccgccgcuucgagaacgccgucugggaccagugcaaggaccucugccacaugcacaccggcgucgucgucgagaagaagaagcgcggcggcaaggaggagaucaccccccacugcgcccucauggacugcaucauguacgacgccgccgucuccggcggccucaacauccccguccuccgcgccguccucccccgcgacauggucuuccgcaccuccucccccaaggucguccucuga

SEQ ID NO: 8322 - RNA, 1710 nt, Artificial Sequence
  derived and/or modified CDS sequence (opt2) from LASV(ISTH1111-NIG-2011;Clade II)__AIT17467__NP
auguccgccuccaaggaggucaaguccuuccucuggacccagucccuccgccgcgagcucuccggcuacugcuccuccaucaagcuccaggucgucaaggacgcccaggcccuccuccacggccucgacuucuccgaggucuccaacguccagcgccucaugcgcaagcagaagcgcgacgacuccgaccucaagcgccuccgcgaccucaaccaggccgucaacaaccucgucgagcucaaguccacccagcagaaguccauccuccgcgucggcacccucaccuccgacgaccuccucacccucgccgccgaccucgagaagcucaaguccaaggucauccgcaccgagcgcccccucuccuccggcgucuacaugggcaaccucuccacccagcagcucgagcagcgccgcgcccuccucaacaugaucggcauggucggcggcacccagggcacccagcccggccgcgacggcgucguccgcgucugggacgucaagaaccccgaccuccucaacaaccaguucggcaccaugcccucccucacccucgccugccucaccaagcagggccaggucgaccucaacgacgccguccucgcccucaccgaccucggccucaucuacaccgccaaguaccccaacuccuccgaccucgaccgccucucccagucccaccccauccucaacauggucgacaccaagaaguccucccucaacaucuccggcuacaacuucucccucggcgccgccgucaaggccggcgccugcaugcucgacggcggcaacaugcucgagaccaucaaggucaccccccagaccauggacggcauccucaaguccauccucaaggucaagaagucccucggcauguucgucuccgacacccccggcgagcgcaaccccuacgagaacauccucuacaagaucugccucuccggcgacggcuggcccuacaucgccucccgcaccuccaucgucggccgcgccugggagaacaccaccgucgaccucgaguccgacggcaagccccagaaggucggcaccgccggcuccaacaagucccuccaguccgccggcuuccccaccggccucaccuacucccagcucaugacccucaaggacuccaugaugcagcucgaccccuccgccaagaccuggaucgacaucgagggccgccccgaggaccccgucgagaucgcccucuaccagcccauguccggcugcuacauccacuucuuccgcgagcccaccgaccucaagcaguucaagcaggacgccaaguacucccacggcaucgacgucgccgaccucuuccccgcccagcccggccucaccuccgccgucaucgaggcccucccccgcaacaugguccucaccugccagggcuccgacgacaucaagcgccuccucgacucccagggccgccgcgacaucaagcucaucgacaucucccucuccaaggccgacucccgccgcuucgagaacgccgucugggaccagugcaaggaccucugccacaugcacaccggcgucgucgucgagaagaagaagcgcggcggcaaggaggagaucaccccccacugcgcccucauggacugcaucauguacgacgccgccgucuccggcggccucaacauccccguccuccgcgccguccucccccgcgacauggucuuccgcaccuccucccccaaggucguccucuga

SEQ ID NO: 8323 - RNA, 1710 nt, Artificial Sequence
  derived and/or modified CDS sequence (opt2) from LASV(ISTH1121-NIG-2012;Clade II)__AIT17471__NP
auguccgccuccaaggaggucaaguccuuccucuggacccagucccuccgccgcgagcucuccggcuacugcuccuccaucaagcuccaggucgucaaggacgcccaggcccuccuccacggccucgacuucuccgaggucuccaacguccagcgccucaugcgcaagcagaagcgcgacgacuccgaccucaagcgccuccgcgaccucaaccaggccgucaacaaccucgucgagcucaaguccacccagcagaaguccauccuccgcgucggcacccucaccuccgacgaccuccucacccucgccgccgaccucgagaagcucaaguccaaggucauccgcaccgagcgcccccucuccuccggcgucuacaugggcaaccucuccacccagcagcucgagcagcgccgcgcccuccucaacaugaucggcauggucggcggcgcccagggcacccagcccggccgcgacggcgucguccgcgucugggacgucaagaaccccgaccuccucaacaaccaguucggcaccaugcccucccucacccucgccugccucaccaagcagggccaggucgaccucaacgacgccguccucgcccucaccgaccucggccucaucuacaccgccaaguaccccaacuccuccgaccucgaccgccucucccagucccaccccauccucaacauggucgacaccaagaaguccucccucaacaucuccggcuacaacuucucccucggcgccgccgucaaggccggcgccugcaugcucgacggcggcaacaugcucgagaccaucaaggucaccccccagaccauggacggcauccucaaguccauccucaaggucaagcgcucccucggcauguucgucuccgacacccccggcgagcgcaaccccuacgagaacauccucuacaagaucugccucuccggcgacggcuggcccuacaucgccucccgcaccuccaucgucggccgcgccugggagaacaccaccgucgaccucgaguccgacggcaagccccagaagaugggcaccaccggcuccaacaagucccuccaguccgccggcuuccccaccggccucaccuacucccagcucaugacccucaaggacuccaugaugcagcucgaccccuccgccaagaccuggaucgacaucgagggccgccccgaggaccccgucgagaucgcccucuaccagcccauguccggcugcuacauccacuucuuccgcgagcccaccgaccucaagcaguucaagcaggacgccaaguacucccacggcaucgacgucgccgaccucuuccccgcccagcccggccucaccuccgccgucaucgaggcccucccccgcaacaugguccucaccugccagggcuccgacgacaucaagaagcuccucgacucccagggccgccgcgacaucaagcucaucgacaucgcccucuccaaggccgacucccgcaaguucgagaacgucgucugggaccagugcaaggaccucugccacaugcacaccggcgucgucgucgagaagaagaagcgcggcggcaaggaggagaucaccccccacugcgcccucauggacugcaucauguacgacgccgccgucuccggcggccucaacauccccguccuccgcgccguccucccccgcgacauggucuuccgcaccuccucccccaaggucguccucuga

SEQ ID NO: 8324 - RNA, 1710 nt, Artificial Sequence
  derived and/or modified CDS sequence (opt2) from LASV(ISTH1129-NIG-2012;Clade II)__AIT17475__NP
auguccgccuccaaggaggucaaguccuuccucuggacccagucccuccgccgcgagcucuccggcuacugcuccuccaucaagcuccaggucgucaaggacgcccaggcccuccuccacggccucgacuucuccgaggucuccaacguccagcgccucaugcgcaagcagaagcgcgacgacuccgaccucaagcgccuccgcgaccucaaccaggccgucaacaaccucgucgagcucaaguccacccagcagaaguccguccuccgcgucggcacccucaccuccgacgaccuccucacccucgccgccgaccucgagaagcucaaguccaaggucauccgcaccgagcgcccccucuccuccggcgucuacaugggcaaccucuccgcccagcagcucgagcagcgccgcgcccuccucuccaugaucggcauggucggcggcgcccagggcacccagcccggccgcgacggcgucguccgcgucugggacgucaagaaccccgaccuccucaacaaccaguucggcaccaugcccucccucacccucgccugccucaccaagcagggccaggucgaccucaacgacaccguccucgcccucaccgaccucggccucaucuacaccgccaaguaccccaacuccuccgaccucgaccgccucucccagucccaccccauccucaacauggucgacaccaagaaguccucccucaacaucuccggcuacaacuucucccucggcgccgccgucaaggccggcgccugcaugcucgacggcggcaacaugcucgagaccaucaaggucaccccccagaccauggacggcauccucaaguccauccucaaggucaagcgcucccucggcauguucgucuccgacacccccggcgagcgcaaccccuacgagaacauccucuacaagaucugccucuccggcgacggcuggcccuacaucgccucccgcaccuccaucgucggccgcgccugggagaacaccaccgucgaccucgaguccgacggcaagccccagaaggucggcaccgccggcuccaacaagucccuccaguccgccggcuuccccaccggccucaccuacucccagcucaugacccucaaggacuccaugaugcagcucgaccccuccgccaagaccuggaucgacaucgagggccgccccgaggaccccgucgagaucgcccucuaccagcccaucuccggcugcuacauccacuucuuccgcgagcccaccgaccucaagcaguucaagcaggacgccaaguacucccacggcaucgacgucaccgaccucuuccccgcccagcccggccucaccuccgccgucaucgaggcccucccccgcaacaugguccucaccugccagggcuccgacgacaucaagcgccuccucgacucccagggccgccgcgacaucaagaucaucgacaucgcccucuccaaggccgacucccgccgcuucgagaacgccgucugggaccagugcaaggaccucugccacaugcacaccggcgucgucgucgagaagaagaagcgcggcggcaaggaggagaucaccccccacugcgcccucauggacugcaucauguacgacgccgccgucuccggcggccucaacauccccguccuccgcgccguccucccccgcgacauggucuuccgcaccuccucccccaaggucguccucuga

SEQ ID NO: 8325 - RNA, 1710 nt, Artificial Sequence
  derived and/or modified CDS sequence (opt2) from LASV(ISTH1137-NIG-2011;Clade II)__AIT17479__NP
auguccgccuccaaggaggucaaguccuuccucuggacccagucccuccgccgcgagcucuccggcuacugcuccaacaucaagcuccaggucgucaaggacgcccaggcccuccuccacggccucgacuucuccgaggucuccaacguccagcgccucaugcgcaagcagaagcgcgacgacuccgaccucaagcgccuccgcgaccucaaccaggccgucaacaaccucgucgagcucaaguccacccagcagaaguccguccuccgcgucggcacccucaccuccgacgaccuccucacccucgccgccgaccucgagaagcucaaguccaaggucauccgcaccgagcgcccccucuccuccggcgucuacaugggcaaccucuccacccagcagcucgagcagcgccgcgcccuccucaacaugaucggcauggucggcggcgcccagggcacccagcccggccgcgacggcgucguccgcgucugggacgucaagaaccccgaccuccucaacaaccaguucggcaccaugcccucccucacccucgccugccucaccaagcagggccaggucgaccucaacgacgccguccucgcccucaccgaccucggccucaucuacaccgccaaguaccccaacuccuccgaccucgaccgccucucccagucccaccccauccucaacauggucgacaccaagaaguccucccucaacaucuccggcuacaacuucucccucggcgccgccgucaaggccggcgccugcaugcucgacggcggcaacaugcucgagaccaucaaggucaccccccagaccauggacggcauccucaaguccauccucaaggucaagcgcucccucggcauguucgucuccgacacccccggcgagcgcaaccccuacgagaacauccucuacaagaucugccucuccggcgacggcuggcccuacaucgccucccgcaccuccaucgucggccgcgccugggagaacaccaccgucgaccucgaguccgacggcaagccccagaaggucggcaccgccggcuccaacaagucccuccaguccgccggcuuccccaccggccucaccuacucccagcucaugacccucaaggacuccaugaugcagcucgaccccuccgccaagaccuggaucgacaucgagggccgccccgaggaccccgucgagaucgcccucuaccagcccauguccggcugcuacauccacuucuuccgcgagcccaccgaccucaagcaguucaagcaggacgccaaguacucccacggcaucgacgucgccgaccucuuccccgcccagcccggccucaccuccgccgucaucgaggcccucccccgcaacaugguccucaccugccagggcuccgacgacaucaagaagcuccucgacucccagggccgcaaggacaucaagcucaucgacaucgcccucuccaaggucgacucccgccgcuucgagaacgccgucugggaccagugcaaggaccucugccacaugcacaccggcgucgucgucgagaagaagaagcgcggcggcaaggaggagaucaccccccacugcgcccucauggacugcaucauguacgacgccgccgucuccggcggccucaacauccccguccuccgcgccguccucccccgcgacauggucuuccgcaccuccucccccaaggucguccucuga

SEQ ID NO: 8326 - RNA, 1710 nt, Artificial Sequence
  derived and/or modified CDS sequence (opt2) from LASV(ISTH2010-NIG-2012;Clade II)__AIT17483__NP
auguccgccuccaaggaggucaaguccuuccucuggacccagucccuccgccgcgagcucuccggcuacugcuccaacaucaagcuccaggucgucaaggacgcccaggcccuccuccacggccucgacuucuccgaggucuccaacguccagcgccucaugcgcaagcagaagcgcgacgacuccgaccucaagcgccuccgcgaccucaaccaggccgucaacaaccucgucgagcucaaguccacccagcagaaguccauccuccgcgucggcacccucaccuccgacgaccuccucacccucgccgccgaccucgagaagcucaaguccaaggucauccgcaccgagcgcccccucuccuccggcgucuacaugggcaaccucuccacccagcagcucgagcagcgccgcgcccuccucaaccucaucggcauggucggcggcgcccagggcacccagcccggccgcgacggcgucguccgcgucugggacgucaagaaccccgaccuccucaacaaccaguucggcaccaugcccucccucacccucgccugccucaccaagcagggccaggucgaccucaacgacgccguccucgcccucaccgaccucggccucaucuacaccgccaaguaccccaacuccuccgaccucgaccgccucucccagucccaccccauccucaacauggucgacaccaagaaguccucccucaacaucuccggcuucaacuucucccucggcgccgccgucaaggccggcgccugcaugcucgacggcggcaacaugcucgagaccaucaaggucaccccccagaccauggacggcauccucaaguccauccucaaggucaagaagucccucggcauguucgucuccgacacccccggcgagcgcaaccccuacgagaacauccucuacaagaucugccucuccggcgacggcuggcccuacaucgccucccgcaccuccaucgucggccgcgccugggagaacaccaccgucgaccucgaguccgacggcaagccccacaaggucggcaccgccggcuccaacaagucccuccaguccgccggcuuccccaccggccucaccuacucccagcucaugacccucaaggacuccaugaugcagcucgaccccuccgccaagaccuggaucgacaucgagggccgccccgaggaccccgucgagaucgcccucuaccagcccauguccggcugcuacauccacuucuuccgcgagcccaccgaccucaagcaguucaagcaggacgccaaguacucccacggcaucgacgucgccgaccucuuccccgcccagcccggccucaccuccgccgucaucgaggcccucccccgcaacaugguccucaccugccagggcuccgacgacaucaagcgccuccucgacucccagggccgccgcgacaucaagcucaucgacaucgcccucuccaaggccgacucccgccgcuucgagaacgccgucugggaccagugcaaggaccucugccacaugcacaccggcgucgucgucgagaagaagaagcgcggcggcaaggaggagaucaccccccacugcgcccucauggacugcaucauguacgacgccgccgucuccggcggccucaacauccccguccuccgcgccguccucccccgcgacauggucuuccgcaccuccucccccaaggucguccucuga

SEQ ID NO: 8327 - RNA, 1710 nt, Artificial Sequence
  derived and/or modified CDS sequence (opt2) from LASV(ISTH2020-NIG-2012;Clade II)__AIT17491__NP
auguccgccuccaaggaggucaaguccuuccucuggacccagucccuccgccgcgagcucuccggcuacugcuccaacaucaagcuccaggucgucaaggacgcccaggcccuccuccacggccucgacuucuccgaggucuccaacguccagcgccucaugcgcaagcagaagcgcgacgacggcgaccucaagcgccuccgcgaccucaaccaggccgucaacaaccucgucgagcucaaguccacccagcagaaguccguccuccgcgucggcacccucaccuccgacgaccuccucacccucgccgccgaccucgagaagcucaaguccaaggucauccgcaccgagcgcccccucuccuccggcgucuacaugggcaaccucuccacccagcagcucgagcagcgccgcgcccuccucuccaugaucggcauggucggcggcgcccgcggcacccagcccggccgcgacggcgucguccgcgucugggacgucaagaaccccgaccuccucaacaaccaguucggcaccaugcccucccucacccucgccugccucaccaagcagggccaggucgaccucaacgacgucguccucgcccucaccgaccucggccucaucuacaccgccaaguaccccaacuccuccgaccucgaccgccucucccagucccaccccauccucaacauggucgacaccaagaaguccucccucaacaucuccggcuacaacuucucccucggcgccgccgucaaggccggcgccugcaugcucgacggcggcaacaugcucgagaccaucaaggucaccccccagaccauggacggcauccucaaguccauccucaaggucaagaagucccucggcauguucgucuccgacacccccggcgagcgcaaccccuacgagaacauccucuacaagaucugccucuccggcgacggcuggcccuacaucgccucccgcaccuccaucgucggccgcgccugggagaacaccaccgucgaccucgaguccgacggcaagccccagaaggucggcgccgccggcuccaacaagucccuccaguccgccggcuuccccaccggccucaccuacucccagcucaugacccucaaggacuccaugaugcagcucgaccccuccgccaagaccuggaucgacaucgagggccgccccgaggaccccgucgagaucgcccucuaccagcccauguccggcugcuacauccacuucuuccgcgagcccaccgaccucaagcaguucaagcaggacgccaaguacucccacggcaucgacgucaccgaccucuucuccgcccagcccggccucaccuccgccgucaucgaggcccucccccgcaacaugguccucaccugccagggcuccgacgacaucaagcgccuccucgacucccagggccgccgcgacaucaagcucaucgacaucgcccucuccaaggccgacucccgccgcuucgagaacgccgucugggaccagugcaaggaccucugccacaugcacaccggcgucgucgucgagaagaagaagcgcggcggcaaggaggagaucaccccccacugcgcccucauggacugcaucauguacgacgccgccgucuccggcggccucaacauccccguccuccgcgccguccucccccgcgacauggucuuccgcaccuccucccccaaggucguccucuga

SEQ ID NO: 8328 - RNA, 1710 nt, Artificial Sequence
  derived and/or modified CDS sequence (opt2) from LASV(ISTH2025-NIG-2012;Clade II)__AIT17495__NP
auguccgccuccaaggaggucaaguccuuccucuggacccagucccuccgccgcgagcucuccggcuacugcuccaacaucaagcuccaggucgucaaggacgcccaggcccuccuccacggccucgacuucuccgaggucuccaacguccagcgccucaugcgcaagcagaagcgcgacgacuccgaccucaagcgccuccgcgaccucaaccaggccgucaacaaccucgucgagcucaaguccacccagcagaaguccauccuccgcgucggcacccucaccuccgacgaccuccucacccucgccgccgaccucgagaagcucaaguccaaggucauccgcaccgagcgcccccucuccuccggcgucuacaugggcaaccucuccacccagcagcucgagcagcgccgcgcccuccucaacaugaucggcauggucggcggcgcccaguccgcccagcccggccgcgacggcgucguccgcgucugggacgucaagaaccccgaccuccucaacaaccaguucggcaccaugcccucccucacccucgccugccucaccaagcagggccaggucgaccucaacgacgccguccucgcccucaccgaccucggccucaucuacaccgccaaguaccccaacuccuccgaccucgaccgccucucccagucccaccccauccucaacauggucgacaccaagaaguccucccucaacaucuccggcuucaacuucucccucggcgccgccgucaaggccggcgccugcaugcucgacggcggcaacaugcucgagaccaucaaggucaccccccagaccauggacggcauccucaaguccauccucaaggucaagcgcucccucggcauguucgucuccgacgcccccggcgagcgcaaccccuacgagaacauccucuacaagaucugccucuccggcgacggcuggcccuacaucgccucccgcaccuccaucgucggccgcgccugggagaacaccaccgucgaccucgaguccgacggcaagccccagaaggucggcaccgccggcuccaacaagucccuccaguccgccggcuuccccaccggccucaccuacucccagcucaugacccucaaggacuccaugaugcagcucgaccccuccgccaagaccuggaucgacaucgagggccgccccgaggaccccgucgagaucgcccucuaccagcccauguccggcugcuacauccacuucuuccgcgagcccaccgaccucaagcaguucaagcaggacgccaaguacucccacggcaucgacgucgccgaccucuuccccgcccagcccggccucaccuccgccgucaucgaggcccucccccgcaacaugguccucaccugccagggcuccgacgacaucaagaagcuccucgacucccagggccgccgcgacaucaagcucaucgacaucgcccucuccaaggccgacucccgccgcuucgagaacgccgucugggaccagugcaaggaccucugccacaugcacaccggcgucgucgucgagaagaagaagcgcggcggcaaggaggagaucaccccccacugcgcccucauggacugcaucauguacgacgccgccgucuccggcggccucaacauccccguccuccgcgccguccucccccgcgacauggucuuccgcaccuccucccccaaggucguccucuga

SEQ ID NO: 8329 - RNA, 1710 nt, Artificial Sequence
  derived and/or modified CDS sequence (opt2) from LASV(ISTH2031-NIG-2012;Clade II)__AIT17499__NP
auguccgccuccaaggaggucaaguccuuccucuggacccagucccuccgccgcgagcucuccggcuacugcuccuccaucaagcuccaggucgucaaggacgcccaggcccuccuccacggccucgacuucuccgaggucuccaacguccagcgccucaugcgcaagcagaagcgcgacgacuccgaccucaagcgccuccgcgaccucaaccaggccgucaacaaccucgucgagcucaaguccacccagcagaaguccauccuccgcgucggcacccucaccuccgacgaccuccucacccucgccgccgaccucgagaagcucaaguccaaggucauccgcaccgagcgcccccucuccuccggcgucuacaugggcaaccucuccacccagcagcucgagcagcgccgcgcccuccucaacaucaucggcauggucggcggcgcccagggcacccagcccggccgcgacggcgucguccgcgucugggacgucaagaaccccgaccuccucaacaaccaguucggcaccaugcccucccucacccucgccugccucaccaagcagggccaggucgaccucaacgacgccguccucgcccucaccgaccucggccucaucuacaccgccaaguaccccaacuccuccgaccucgaccgccucucccagucccaccccauccucaacauggucgacaccaagaaguccucccucaacaucuccggcuacaacuucucccucggcgccgccgucaaggccggcgccugcaugcucgacggcggcaacaugcucgagaccaucaaggucaccccccagaccauggacggcauccucaaguccauccucaaggucaagcgcucccucggcauguucgucuccgacacccccggcgagcgcaaccccuacgagaacauccucuacaagaucugccucuccggcgacggcuggcccuacaucgccucccgcaccuccaucgucggccgcgccugggagaacaccaccgucgaccucgaguccgacggcaagccccagaaggucggcgccgccggcuccaacaagucccuccaguccgccggcuuccccaccggccucaccuacucccagcucaugacccucaaggacuccaugaugcagcucgaccccuccgccaagaccuggaucgacaucgagggccgccccgaggaccccgucgagaucgcccucuaccagcccauguccggcugcuacauccacuucuuccgcgagcccaccgaccucaagcaguucaagcaggacgccaaguacucccacggcaucgacgucgccgaccucuuccccgcccagcccggccucaccuccgccgucaucgaggcccucccccgcaacaugguccucaccugccagggcuccgacgacgucaagcgccuccucgacucccagggccgccgcgacaucaagcucaucgacaucgcccucuccaaggccgacucccgccgcuucgagaacgccgucugggaccagugcaaggaccucugccacaugcacaccggcgucgucgucgagaagaagaagcgcggcggcaaggaggagaucaccccccacugcgcccucauggacugcaucauguacgacgccgccgucuccggcggccucaacauccccguccuccgcgccguccucccccgcgacauggucuuccgcaccuccucccccaaggucguccucuga

SEQ ID NO: 8330 - RNA, 1710 nt, Artificial Sequence
  derived and/or modified CDS sequence (opt2) from LASV(ISTH2037-NIG-2012;Clade II)__AIT17503__NP
auguccuccuccaaggaggucaaguccuuccucuggacccagucccuccgccgcgagcucuccggcuacugcuccuccaucaagcuccaggucgucaaggacgcccaggcccuccuccacggccucgacuucuccgaggucuccaacguccagcgccucaugcgcaagcagaagcgcgacgacuccgaccucaagcgccuccgcgaccucaaccaggccgucaacaaccucgucgagcucaaguccacccagcagaaguccauccuccgcgucggcacccucaccuccgacgaccuccucacccucgccgccgaccucgagaagcucaaguccaaggucauccgcaccgagcgcccccucuccuccggcgucuacaugggcaaccucuccgcccagcagcucgagcagcgccgcgcccuccucaacaugaucggcauggucggcggcgcccagggcacccagcccggccgcgacggcgucguccgcgucugggacgucaagaaccccgaccuccucaacaaccaguucggcaccaugcccucccucacccucgccugccucaccaagcagggccaggucgaccucaacgacgccguccucgcccucaccgaccucggccucaucuacaccgccaaguaccccaacuccuccgaccucgaccgccucucccagucccaccccauccucaacauggucgacaccaagaaguccucccucaacaucuccggcuacaacuucucccucggcgccgccgucaaggccggcgccugcaugcucgacggcggcaacaugcucgagaccaucaaggucaccccccagaccauggacggcauccucaaguccauccucaaggucaagaagucccucggcauguucgucuccgacacccccggcgagcgcaaccccuacgagaacauccucuacaagaucugccucuccggcgacggcuggcccuacaucgccucccgcaccuccaucgucggccgcgccugggagaacaccaccgucgaccucgaguccgacggcaagccccagaaggucggcaccgccggcuccaacaagucccuccaguccgccggcuuccccaccggccucaccuacucccagcucaugacccucaaggacuccaugaugcagcucgaccccuccgccaagaccuggaucgacaucgagggccgccccgaggaccccgucgagaucgcccucuaccagcccauguccggcugcuacauccacuucuuccgcgagcccaccgaccucaagcaguucaagcaggacgccaaguacucccacggcaucgacgucgccgaccucuuccccgcccagcccggccucaccuccgccgucaucgaggcccucccccgcaacaugguccucaccugccagggcuccgacgacaucaagcgccuccucgacucccagggccgccgcgacaucaagcucaucgacaucgcccucuccaaggccgacucccgccgcuucgagaacgccgucugggaccagugcaaggaccucugccacaugcacaccggcgucgucgucgagaagaagaagcgcggcggcaaggaggagaucaccccccacugcgcccucauggacugcaucauguacgacgccgccgucuccggcggccucaacauccccguccuccgcgccguccucccccgcgacauggucuuccgcaccuccucccccaaggucguccucuga

SEQ ID NO: 8331 - RNA, 1710 nt, Artificial Sequence
  derived and/or modified CDS sequence (opt2) from LASV(ISTH2042-NIG-2012;Clade II)__AIT17507__NP
auguccgccuccaaggaggucaaguccuuccucuggacccagucccuccgccgcgagcucuccggcuacugcuccaacaucaagcuccaggucgucaaggacgcccaggcccuccuccacggccucgacuucuccgaggucuccaacguccagcgccucaugcgcaagcagaagcgcgacgacuccgaccucaagcgccuccgcgaccucaaccaggccgucaacaaccucgucgagcucaaguccacccagcagaaguccauccuccgcgucggcacccucaccuccgacgaccuccucacccucgccgccgaccucgagaagcucaaguccaaggucauccgcaccgagcgcccccucuccuccggcgucuacaugggcaaccucuccacccagcagcucgagcagcgccgcgcccuccucaaccucaucggcauggucggcggcgcccagggcacccagcccggccgcgacggcgucguccgcgucugggacgucaagaaccccgaccuccucaacaaccaguucggcaccaugcccucccucacccucgccugccucaccaagcagggccaggucgaccucaacgacgccguccucgcccucaccgaccucggccucaucuacaccgccaaguaccccaacuccuccgaccucgaccgccucucccagucccaccccauccucaacauggucgacaccaagaaguccucccucaacaucuccggcuucaacuucucccucggcgccgccgucaaggccggcgccugcaugcucgacggcggcaacaugcucgagaccaucaaggucaccccccagaccaucgacggcauccucaaguccauccucaaggucaagaagucccucggcauguucgucuccgacacccccggcgagcgcaaccccuacgagaacauccucuacaagaucugccucuccggcgacggcuggcccuacaucgccucccgcaccuccaucgucggccgcgccugggagaacaccaccgucgaccucgaguccgacggcaagccccacaaggucggcaccgccggcuccaacaagucccuccaguccgccggcuuccccaccggccucaccuacucccagcucaugacccucaaggacuccaugaugcagcucgaccccuccgccaagaccuggaucgacaucgagggccgccccgaggaccccgucgagaucgcccucuaccagcccauguccggcugcuacauccacuucuuccgcgagcccaccgaccucaagcaguucaagcaggacgccaaguacucccacggcaucgacgucgccgaccucuuccccgcccagcccggccucaccuccgccgucaucgaggcccucccccgcaacaugguccucaccugccagggcuccgacgacaucaagcgccuccucgacucccagggccgccgcgacaucaagcucaucgacaucgcccucuccaaggucgacucccgccgcuucgagaacgccgucugggaccagugcaaggaccucugccacaugcacaccggcgucgucgucgagaagaagaagcgcggcggcaaggaggagaucaccccccacugcgcccucauggacugcaucauguacgacgccgccgucuccggcggccucaacauccccguccuccgcgccguccucccccgcgacauggucuuccgcaccuccucccccaaggucguccucuga

SEQ ID NO: 8332 - RNA, 1710 nt, Artificial Sequence
  derived and/or modified CDS sequence (opt2) from LASV(ISTH2046-NIG-2012;Clade II)__AIT17511__NP
auguccgccuccaaggaggucaaguccuuccucuggacccagucccuccgccgcgagcucuccggcuacugcuccaacaucaagcuccaggucgucaaggacgcccaggcccuccuccacggccucgacuucuccgaggucuccaacguccagcgccucaugcgcaagcagaagcgcgacgacggcgaccucaagcgccuccgcgaccucaaccaggccgucaacaaccucgucgagcucaaguccacccagcagaaguccauccuccgcgucggcacccucaccuccgacgaccuccucacccucgccgccgaccucgagaagcucaaguccaaggucauccgcaccgagcgcccccucuccuccggcgucuacaugggcaaccucuccacccagcagcucgagcagcgccgcgcccuccucaacaugaucggcauggucggcggcgcccagggcacccagcccggccgcgacggcgucguccgcgucugggacgucaagaaccccgaccuccucaacaaccaguucggcaccaugcccucccucacccucgccugccucaccaagcagggccaggucgaccucaacgacgccguccucgcccucaccgaccucggccucaucuacaccgccaaguaccccaacuccuccgaccucgaccgccucucccagucccaccccauccucaacauggucgacaccaagaaguccucccucaacaucuccggcuacaacuucucccucggcgccgccgucaaggccggcgccugcaugcucgacggcggcaacaugcucgagaccaucaaggucaccccccagaccaucgacggcauccucaaguccauccucaaggucaagaagucccucggcauguucgucuccgacacccccggcgagcgcaaccccuacgagaacauccucuacaagaucugccucuccggcgacggcuggcccuacaucgccucccgcaccuccaucgucggccgcgccugggagaacaccaccgucgaccucgaguccgacggcaagccccagaaggucggcaccgccggcuccaacaagucccuccaguccgccggcuuccccaccggccucaccuacucccagcucaugacccucaaggacuccaugaugcagcucgaccccuccgccaagaccuggaucgacaucgagggccgccccgaggaccccgucgagaucgcccucuaccagcccauguccggcugcuacauccacuucuuccgcgagcccaccgaccucaagcaguucaagcaggacgccaaguacucccacggcaucgacgucaccgaccucuucuccgcccagcccggccucaccuccgccgucaucgaggcccucccccgcaacaugguccucaccugccagggcuccgacgacaucaagcgccuccucgacucccagggccgccgcgacaucaagcucaucgacaucgcccucuccaaggccgacucccgccgcuucgagaacgccgucugggaccagugcaaggaccucugccacaugcacaccggcgucgucgucgagaagaagaagcgcggcggcaaggaggagaucaccccccacugcgcccucauggacugcaucauguacgacgccgccgucuccggcggccucaacauccccguccuccgcgccguccucccccgcgacauggucuuccgcaccuccucccccaaggucguccucuga

SEQ ID NO: 8333 - RNA, 1710 nt, Artificial Sequence
  derived and/or modified CDS sequence (opt2) from LASV(ISTH2050-NIG-2012;Clade II)__AIT17515__NP
auguccgccuccaaggaggucaaguccuuccucuggacccagucccuccgccgcgagcucuccggcuacugcuccuccaucaagcuccaggucgucaaggacgcccaggcccuccuccacggccucgacuucuccgaggucuccaacguccagcgccucaugcgcaagcagaagcgcgacgacuccgaccucaagcgccuccgcgaccucaaccaggccgucaacaaccucgucgagcucaaguccacccagcagaaguccauccuccgcgucggcacccucaccuccgacgaccuccucacccucgccgccgaccucgagaagcucaaguccaaggucauccgcaccgagcgcccccucuccuccggcgucuacaugggcaaccucuccacccagcagcucgagcagcgccgcgcccuccucaacaugaucggcauggucggcggcgcccagggcacccagcccggccgcgacggcgucguccgcgucugggacgucaagaaccccgaccuccucaacaaccaguucggcaccaugcccucccucacccucgccugccucaccaagcagggccaggucgaccucaacgacgccguccucgcccucaccgaccucggccucaucuacaccgccaaguaccccaacuccuccgaccucgaccgccucucccagucccaccccauccucaacauggucgacaccaagaaguccucccucaacaucuccggcuacaacuucucccucggcgccgccgucaaggccggcgccugcaugcucgacggcggcaacaugcucgagaccaucaaggucaccccccagaccauggacggcauccucaaguccauccucaaggucaagcgcucccucggcauguucgucuccgacacccccggcgagcgcaaccccuacgagaacauccucuacaagaucugccucuccggcgacggcuggcccuacaucgccucccgcaccuccaucgucggccgcgccugggagaacaccaccgucgaccucgaguccgacggcaagccccagaaggucggcgccgccggcuccuccaagucccuccaguccgccggcuuccccaccggccucaccuacucccagcucaugacccucaaggacuccaugaugcagcucgaccccuccgccaagaccuggaucgacaucgagggccgccccgaggaccccgucgagaucgcccucuaccagcccgucuccggcugcuacauccacuucuuccgcgagcccaccgaccucaagcaguucaagcaggacgccaaguacucccacggcaucgacgucgccgaccucuuccccgcccagcccggccucaccuccgccgucaucgaggcccucccccgcaacaugguccucaccugccagggcuccgacgacaucaagcgccuccucgacucccagggccgccgcgacaucaagcucaucgacaucgcccucuccaaggccgacucccgccgcuucgagaacgccgucugggaccagugcaaggaccucugccacaugcacaccggcgucgucgucgagaagaagaagcgcggcggcaaggaggagaucaccccccacugcgcccucauggacugcaucauguacgacgccgccgucuccggcggccucaacauccccguccuccgcgccguccucccccgcgacauggucuuccgcaccuccucccccaaggucguccucuga

SEQ ID NO: 8334 - RNA, 1710 nt, Artificial Sequence
  derived and/or modified CDS sequence (opt2) from LASV(ISTH2057-NIG-2012;Clade II)__AIT17519__NP
auguccgccuccaaggaggucaaguccuuccucuggacccagucccuccgccgcgagcucuccggcuacugcuccaacaucaagcuccaggucgucaaggacgcccaggcccuccuccacggccucgacuucuccgaggucuccaacguccagcgccucaugcgcaagcagaagcgcgacgacuccgaccucaagcgccuccgcgaccucaaccaggccgucaacaaccucgucgagcucaaguccacccagcagaaguccauccuccgcgucggcacccucaccuccgacgaccuccucacccucgccgccgaccucgagaagcucaaguccaaggucauccgcaccgagcgcccccucuccuccggcgucuacaugggcaaccucuccgcccagcagcucgagcagcgccgcgcccuccucaacaugaucggcauggucggcggcgcccagggcacccagcccggccgcgacggcgucguccgcgucugggacgucaagaaccccgaccuccucaacaaccaguucggcaccaugcccucccucacccucgccugccucaccaagcagggccaggucgaccucaacgacgccguccucgcccucaccgaccucggccucaucuacaccgccaaguaccccaacuccuccgaccucgaccgccucucccagucccaccccauccucaacauggucgacaccaagaaguccucccucaacaucuccggcuucaacuucucccucggcgccgccgucaaggccggcgccugcaugcucgacggcggcaacaugcucgagaccaucaaggucaccccccagaccauggacggcauccucaaguccauccucaaggucaagcgcucccucggcauguucgucuccgacacccccggcgagcgcaaccccuacgagaacauccucuacaagaucugccucuccggcgacggcuggcccuacaucgccucccgcaccuccaucgucggccgcgccugggagaacaccaccgucgaccucgaguccgacggcaagccccagaaggucggcaccgccggcuccaacaagucccuccaguccgccggcuuccccaccggccucaccuacucccagcucaugacccucaaggacuccaugaugcagcucgaccccuccgccaagaccuggaucgacaucgagggccgccccgaggaccccgucgagaucgcccucuaccagcccauguccggcugcuacauccacuucuuccgcgagcccaccgaccucaagcaguucaagcaggacgccaaguacucccacggcaucgacgucgccgaccucuuccccgcccagcccggccucaccuccgccgucaucgaggcccucccccgcaacaugguccucaccugccagggcuccgacgacaucaagcgccuccucgacucccagggccgccgcgacaucaagcucaucgacaucgcccucuccaaggccgacucccgccgcuucgagaacgccgucugggaccagugcaaggaccucugccacaugcacaccggcgucgucgucgagaagaagaagcgcggcggcaaggaggagaucaccccccacugcgcccucauggacugcaucauguacgacgccgccgucuccggcggccucaacauccccguccuccgcgccguccucccccgcgacauggucuuccgcaccuccucccccaaggucguccucuga

SEQ ID NO: 8335 - RNA, 1710 nt, Artificial Sequence
  derived and/or modified CDS sequence (opt2) from LASV(ISTH2064-NIG-2012;Clade II)__AIT17525__NP
auguccgccuccaaggaggucaaguccuuccucuggacccagucccuccgccgcgagcucuccggcuacugcuccuccaucaagcuccaggucgucaaggacgcccaggcccuccuccacggccucgacuucuccgaggucuccaacguccagcgccucaugcgcaagcagcgccgcgacgacuccgaccucaagcgccuccgcgaccucaaccaggccgucaacaaccucgucgagcucaaguccacccagcagaaguccauccuccgcgucggcacccucaccuccgacgaccuccucacccucgccgccgaccucgagaagcucaaguccaaggucauccgcaccgagcgcccccucuccuccggcgucuacaugggcaaccucuccacccagcagcucgagcagcgccgcgcccuccucaacaugaucggcauggucggcggcgcccagggcacccagcccggccgcgacggcgucguccgcgucugggacgucaagaaccccgaccuccucaacaaccaguucggcaccaugcccucccucacccucgccugccucaccaagcagggccaggucgaccucaacgacgccguccucgcccucaccgaccucggccucaucuacaccgccaaguaccccaacuccuccgaccucgaccgccucucccagucccaccccauccucaacauggucgacaccaagaaguccucccucaacaucuccggcuacaacuucucccucggcgccgccgucaaggccggcgccugcaugcucgacggcggcaacaugcucgagaccaucaaggucaccccccagaccgucgacggcauccucaaguccauccucaaggucaagcgcucccucggcauguucgucuccgacacccccggcgagcgcaaccccuacgagaacauccucuacaagaucugccucuccggcgacggcuggcccuacaucgccucccgcaccuccaucgucggccgcgccugggagaacaccaccgucgaccucgaguccgacggcaagccccagaaggucggcaccgccggcuccaacaagucccuccaguccgccggcuuccccaccggccucaccuacucccagcucaugacccucaaggacuccaugaugcagcucgaccccuccgccaagaccuggaucgacaucgagggccgccccgaggaccccgucgagaucgcccucuaccagcccauguccggcugcuacauccacuucuuccgcgagcccaccgaccucaagcaguucaagcaggacgccaaguacucccacggcaucgacgucgccgaccucuuccccacccagcccggccucaccuccgccgucaucgaggcccucccccgcaacaugguccucaccugccagggcuccgacgacaucaagcgccuccucgacucccagggccgccgcgacaucaagcucaucgacaucgcccucuccaaggccgacucccgcaaguucgagaacgccgucugggaccagugcaaggaccucugccacaugcacaccggcgucgucgucgagaagaagaagcgcggcggcaaggaggagaucaccccccacugcgcccucauggacugcaucauguacgacgccgccgucuccggcggccucaacauccccguccuccgcgccguccucccccgcgacauggucuuccgcaccuccucccccaaggucguccucuga

SEQ ID NO: 8336 - RNA, 1710 nt, Artificial Sequence
  derived and/or modified CDS sequence (opt2) from LASV(ISTH2065-NIG-2012;Clade II)__AIT17529__NP
auguccgccuccaaggaggucaaguccuuccucuggacccagucccuccgccgcgagcucuccggcuacugcuccaacaucaagcuccaggucgucaaggacgcccaggcccuccuccacggccucgacuucuccgaggucaacaacguccagcgccucaugcgcaagcagaagcgcgacgacuccgaccucaagcgccuccgcgaccucaaccaggccgucaacaaccucgucgagcucaaguccacccagcagaaguccauccuccgcgucggcacccucaccuccgacgaccuccucacccucgccgccgaccucgagaagcucaaguccaaggucauccgcaccgagcgcccccucuccuccggcgucuacaugggcaaccucuccacccagcagcucgagcagcgccgcgcccuccucaacaugaucggcauggccggcggcacccagggcacccagcccggccgcgacggcgucguccgcgucugggacgucaagaaccccgaccuccucaacaaccaguucggcaccaugcccucccucacccucgccugccucaccaagcagggccaggucgaccucaacgacgccguccucgcccucaccgaccucggccucaucuacaccgccaaguaccccaacuccuccgaccucgaccgccucucccagucccaccccauccucaacauggucgacaccaagaaguccucccucaacaucuccggcuacaacuucucccucggcgccgccgucaaggccggcgccugcaugcucgacggcggcaacaugcucgagaccaucaaggucaccccccagaccauggacggcauccucaaguccauccucaaggucaagcgcucccucggcauguucgucuccgacacccccggcgagcgcaaccccuacgagaacauccucuacaagaucugccucuccggcgacggcuggcccuacaucgccucccgcaccuccaucgucggccgcgccugggagaacaccaccgucgaccucgaguccgacggcaagccccagaaggucggcaccgccggcuccaacaagucccuccaguccgccggcuuccccaccggccucaccuacucccagcucaugacccucaaggacuccaugaugcagcucgaccccuccgccaagaccuggaucgacaucgagggccgccccgaggaccccgucgagaucgcccucuaccagcccauguccggcugcuacauccacuucuuccgcgagcccaccgaccucaagcaguucaagcaggacgccaaguacucccacggcaucgacgucgccgaccucuuccccgcccagcccggccucaccuccgccgucaucgaggcccucccccgcaacaugguccucaccugccagggcuccgacgacaucaagaagcuccucgacucccagggccgccgcgacaucaagcucaucgacaucucccucuccaagaucgacucccgcaaguucgagaacgccgucugggaccagugcaaggaccucugccacaugcacaccggcgucgucgucgagaagaagaagcgcggcggcaaggaggagaucaccccccacugcgcccucauggacugcaucauguucgacgccgccgucuccggcggccucaacauccccguccuccgcgccguccucccccgcgacauggucuuccgcaccuccucccccaaggucguccucuga

SEQ ID NO: 8337 - RNA, 1710 nt, Artificial Sequence
  derived and/or modified CDS sequence (opt2) from LASV(ISTH2094-NIG-2012;Clade II)__AIT17539__NP
auguccgccuccaaggaggucaaguccuuccucuggacccagucccuccgccgcgagcucuccggcuacugcuccaacaucaagcuccaggucgucaaggacgcccaggcccuccuccacggccucgacuucuccgaggucuccaacguccagcgccucaugcgcaagcagaagcgcgacgacggcgaccucaagcgccuccgcgaccucaaccaggccgucaacaaccucgucgagcucaaguccacccagcagaaguccguccuccgcgucggcacccucaccuccgacgaccuccucauccucgccgccgaccucgagaagcucaaguccaaggucauccgcaccgagcgcccccucuccuccggcgucuacaugggcaaccucuccacccagcagcucgagcagcgcaaggcccuccucuccaugaucggcauggucggcggcgcccagggcacccagcccggccgcgacggcgucguccgcgucugggacgucaagaaccccgaccuccucaacaaccaguucggcaccaugcccucccucacccucgccugccucaccaagcagggccaggucgaccucaacgacgccguccucgcccucaccgaccucggccucaucuacaccgccaaguaccccaacuccuccgaccucgaccgccucucccagucccaccccauccucaacauggucgacaccaagaaguccucccucaacaucuccggcuacaacuucucccucggcgccgccgucaaggccggcgccugcaugcucgacggcggcaacaugcucgagaccaucaaggucaccccccagaccauggacggcauccucaaguccauccucaaggucaagcgcucccucggcauguucgucuccgacacccccggcgagcgcaaccccuacgagaacauccucuacaagaucugccucuccggcgacggcuggcccuacaucgccucccgcaccuccaucgucggccgcgccugggagaacaccaccgucgaccucgaguccgacggcaagccccagaaggucggcuccgccggcuccaacaagucccuccaguccgccggcuuccccaccggccucaccuacucccagcucaugacccucaaggacuccaugaugcagcucgaccccuccgccaagaccuggaucgacaucgagggccgccccgaggaccccgucgagaucgcccucuaccagcccauguccggcugcuacauccacuucuuccgcgagcccaccgaccucaagcaguucaagcaggacgccaaguacucccacggcaucgacgucaccgaccucuucuccgcccagcccggccucaccuccgccgucaucgaggcccucccccgcaacaugguccucaccugccagggcuccgacgacaucaagaagcuccucgacucccagggccgccgcgacaucaagcucaucgacaucucccucggcaaggccgacucccgccgcuucgagaacgccgucugggaccagugcaaggaccucugccacaugcacaccggcgucgucgucgagaagaagaagcgcggcggcaaggaggagaucaccccccacugcgcccucauggacugcaucauguucgacgccgccgucuccggcggccucaacauccccauccuccgcgccguccucccccgcgacauggucuuccgcaccuccucccccaaggucguccucuga

SEQ ID NO: 8338 - RNA, 1710 nt, Artificial Sequence
  derived and/or modified CDS sequence (opt2) from LASV(ISTH2129-NIG-2012;Clade II)__AIT17545__NP
auguccgccuccaaggaggucaaguccuuccucuggacccagucccuccgccgcgagcucuccggcuacugcuccaacaucaagcuccaggucgucaaggacgcccaggcccuccuccacggccucgacuucuccgaggucuccaacguccagcgccucaugcgcaagcagaagcgcgacgacuccgaccucaagcgccuccgcgaccucaaccaggccgucaacaaccucgucgagcucaaguccacccagcagaaguccguccuccgcgucggcacccucaccuccgacgaccuccucacccucgccgccgaccucgagaagcucaaguccaaggucauccgcaccgagcgcccccucuccuccggcgucuacaugggcaaccucuccacccagcagcucgagcagcgccgcgcccuccucaacaugaucggcauggucggcggcgcccagggcacccagcccggccgcgacggcgucguccgcgucugggacgucaagaaccccgaccuccucaacaaccaguucggcaccaugcccucccucacccucgccugccucaccaagcagggccaggucgaccucaacgacgccguccucgcccucaccgaccucggccucaucuacaccgccaaguaccccaacuccuccgaccucgaccgccucucccagucccaccccauccucaacauggucgacaccaagaaguccucccucaacaucuccggcuacaacuucucccucggcgccgccgucaaggccggcgccugcaugcucgacggcggcaacaugcucgagaccaucaaggucaccccccagaccauggacggcauccucaaguccauccucaaggucaagaagucccucggcauguucgucuccgacacccccggcgagcgcaaccccuacgagaacauccucuacaagaucugccucuccggcgacggcuggcccuacaucgccucccgcaccuccaucgucggccgcgccugggagaacaccaccgucgaccucgaguccgacggcaagccccagaaggucggcaucgccggcuccaacaagucccuccaguccgccggcuuccccaccggccucaccuacucccagcucaugacccucaaggacuccaugaugcagcucgaccccuccgccaagaccuggaucgacaucgagggccgccccgaggaccccgucgagaucgcccucuaccagcccauguccggcugcuacauccacuucuuccgcgagcccaccgaccucaagcaguucaagcaggacgccaaguacucccacggcaucgacgucgccgaccucuucuccgcccagcccggccucaccuccgccgucaucgaggcccucccccgcaacaugguccucaccugccagggcuccgacgacaucaagcgccuccucgacucccagggccgccgcgacaucaagcucaucgacaucgcccucuccaaggccgacucccgcaaguucgagaacgccgucugggaccagugcaaggaccucugccacaugcacaccggcgucgucgucgagaagaagaagcgcggcggcaaggaggagaucaccccccacugcgcccucauggacugcaucauguacgacgccgccgucuccggcggccucgacauccccguccuccgcgccguccucccccgcgacauggucuuccgcaccuccucccccaaggucguccucuga

SEQ ID NO: 8339 - RNA, 1710 nt, Artificial Sequence
  derived and/or modified CDS sequence (opt2) from LASV(ISTH2217-NIG-2012;Clade II)__AIT17549__NP
auguccgccuccaaggaggucaaguccuuccucuggacccagucccuccgccgcgagcucuccggcuacugcuccaacaucaagcuccaggucgucaaggacgcccaggcccuccuccacggccucgacuucuccgaggucuccaacguccagcgccucaugcgcaagcagaagcgcgacgacuccgaccucaagcgccuccgcgaccucaaccaggccgucaacaaccucgucgagcucaaguccacccagcagaaguccauccuccgcgucggcacccucaccuccgacgaccuccucacccucgccgccgaccucgagaagcucaaguccaaggucauccgcaccgagcgcccccucuccuccggcgucuacaugggcaaccucuccacccagcagcucgagcagcgccgcgcccuccucaacaugaucggcauggucggcggcgcccagggcacccagcccggccgcgacggcgucguccgcgucugggacgucaagaaccccgaccuccucaacaaccaguucggcaccaugcccucccucacccucgccugccucaccaagcagggccaggucgaccucaacgacgucguccucgcccucaccgaccucggccucaucuacaccgccaaguaccccaacuccuccgaccucgaccgccucucccagucccaccccauccucaacauggucgacaccaagaaguccucccucaacaucuccggcuacaacuucucccucggcgccgccgucaaggccggcgccugcaugcucgacggcggcaacaugcucgagaccaucaaggucaccccccagaccauggacggcauccucaaguccauccucaaggucaagaagucccucggcauguucgucuccgacacccccggcgagcgcaaccccuacgagaacauccucuacaagaucugccucuccggcgacggcuggcccuacaucgccucccgcaccuccaucgucggccgcgccugggagaacaccaccgucgaccucgaguccgacggcaagccccagaaggucggcaccgucggcuccaacaagucccuccaguccgccggcuuccccaccggccucaccuacucccagcucaugacccucaaggacuccaugaugcagcucgaccccuccgccaagaccuggaucgacaucgagggccgccccgaggaccccgucgagaucgcccucuaccagcccauguccggcugcuacauccacuucuuccgcgagcccaccgaccucaagcaguucaagcaggacgccaaguacucccacggcaucgacgucgccgaccucuuccccgcccagcccggccucaccuccgccgucaucgaggcccucccccgcaacaugguccucaccugccagggcuccgacgacaucaagaagcuccucgacucccagggccgccgcgacaucaagcucaucgacaucgcccucuccaaggccgacucccgcaaguucgagaacgccgucugggaccagugcaaggaccucugccacaugcacaccggcgucgucgucgagaagaagaagcgcggcggcaaggaggagaucaccccccacugcgcccucauggacugcaucauguacgacgccgccgucuccggcggccucaacauccccguccuccgcgccguccucccccgcgacauggucuuccgcaccuccucccccaaggucguccucuga

SEQ ID NO: 8340 - RNA, 1710 nt, Artificial Sequence
  derived and/or modified CDS sequence (opt2) from LASV(ISTH2271-NIG-2012;Clade II)__AIT17553__NP
auguccgccuccaaggaggucaaguccuuccucuggacccagucccuccgccgcgagcucuccggcuacugcuccuccaucaagcuccaggucgucaaggacgcccaggcccuccuccacggccucgacuucuccgaggucuccaacguccagcgccucaugcgcaagcagaagcgcgacgacuccgaccucaagcgccuccgcgaccucaaccaggccgucaacaaccucgucgagcucaaguccacccagcagaaguccauccuccgcgucggcacccucaccuccgacgaccuccucacccucgccgccgaccucgagaagcucaaguccaaggucauccgcaccgagcgcccccucuccuccggcgucuacaugggcaaccucuccacccagcagcucgagcagcgccgcgcccuccucaacaugaucggcauggucggcggcgcccagggcacccagcccggccgcgacggcgucguccgcgucugggacgucaagaaccccgaccuccucaacaaccaguucggcaccaugcccucccucacccucgccugccucaccaagcagggccaggucgaccucaacgacgccguccucgcccucaccgaccucggccucaucuacaccgccaaguaccccaacuccuccgaccucgaccgccucucccagucccaccccauccucaacauggucgacaccaagaaguccucccucaacaucuccggcuacaacuucucccucggcgccgccgucaaggccggcgccugcaugcucgacggcggcaacaugcucgagaccaucaaggucaccccccagaccauggacggcauccucaaguccauccucaaggucaagcgcucccucggcauguucgucuccgacacccccggcgagcgcaaccccuacgagaacauccucuacaagaucugccucuccggcgacggcuggcccuacaucgccucccgcaccuccaucgucggccgcgccugggagaacaccaccgucgaccucgaguccgacggcaagccccagaagaugggcaccgccggcuccaacaagucccuccaguccgccggcuuccccaccggccucaccuacucccagcucaugacccucaaggacuccaugaugcagcucgaccccuccgccaagaccuggaucgacaucgagggccgccccgaggaccccgucgagaucgcccucuaccagcccauguccggcugcuacauccacuucuuccgcgagcccaccgaccucaagcaguucaagcaggacgccaaguacucccacggcaucgacgucgccgaccucuuccccgcccagcccggccucaccuccgccgucaucgaggcccucccccgcaacaugguccucaccugccagggcuccgacgacaucaagaagcuccucgacucccagggccgccgcgacaucaagcucaucgacaucgcccucuccaaggccgacucccgccgcuucgagaacgccgucugggaccagugcaaggaccucugccacaugcacaccggcgucgucgucgagaagaagaagcgcggcggcaaggaggagaucaccccccacugcgcccucauggacugcaucauguacgacgccgccgucuccggcggccucaacauccccguccuccgcgccguccucccccgcgacauggucuuccgcaccuccucccccaaggucguccucuga

SEQ ID NO: 8341 - RNA, 1710 nt, Artificial Sequence
  derived and/or modified CDS sequence (opt2) from LASV(ISTH2312-NIG-2012;Clade II)__AIT17561__NP
auguccgccuccaaggaggucaaguccuuccucuggacccagucccuccgccgcgagcucuccggcuacugcuccaacaucaagcuccaggucgucaaggacgcccaggcccuccuccacggccucgacuucuccgaggucuccaacguccagcgccucaugcgcaagcagaagcgcgacgacuccgaccucaagcgccuccgcgaccucaaccaggccgucaacaaccucgucgagcucaaguccacccagcagaaguccauccuccgcgucggcacccucaccuccgacgaccuccucacccucgccgccgaccucgagaagcucaaguccaaggucauccgcaccgagcgcccccucuccuccggcgucuacaugggcaaccucuccacccagcagcucgagcagcgccgcgcccuccucaacaugaucggcauggucggcggcgcccagggcacccagcccggccgcgacggcgucguccgcgucugggacgucaagaaccccgaccuccucaacaaccaguucggcaccaugcccucccucacccucgccugccucaccaagcagggccaggucgaccucaacgacgccguccucgcccucaccgaccucggccucaucuacaccgccaaguaccccaacuccuccgaccucgaccgccucucccagucccaccccauccucaacauggucgacaccaagaaguccucccucaacaucuccggcuacaacuucucccucggcgccgccgucaaggccggcgccugcaugcucgacggcggcaacaugcucgagaccaucaaggucaccccccagaccaucgacggcauccucaaguccauccucaaggucaagaagucccucggcauguucgucuccgacacccccggcgagcgcaaccccuacgagaacauccucuacaagaucugccucuccggcgacggcuggcccuacaucgccucccgcaccuccaucgucggccgcgccugggagaacaccaccgucgaccucgaguccgacggcaagccccagaaggucggcaccgucggcuccaacaagucccuccaguccgccggcuuccccaccggccucaccuacucccagcucaugacccucaaggacuccaugaugcagcucgaccccuccgccaagaccuggaucgacaucgagggccgccccgaggaccccgucgagaucgcccucuaccagcccauguccggcugcuacauccacuucuuccgcgagcccaccgaccucaagcaguucaagcaggacgccaaguacucccacggcaucgacgucgccgaccucuuccccgcccagcccggccucaccuccgccgucaucgaggcccucccccgcaacaugguccucaccugccagggcuccgacgacaucaagcgccuccucgacucccagggccgccgcgacaucaagcucaucgacaucgcccucuccaaggccgacucccgccgcuucgagaacgccgucugggaccagugcaaggaccucugccacaugcacaccggcgucgucgucgagaagaagcgccgcggcggcaaggaggagaucaccccccacugcgcccucauggacugcaucauguacgacgccgccgucuccggcggccucaacauccccguccuccgcgccguccucccccgcgacauggucuuccgcaccuccucccccaaggucguccucuga

SEQ ID NO: 8342 - RNA, 1710 nt, Artificial Sequence
  derived and/or modified CDS sequence (opt2) from LASV(ISTH2316-NIG-2012;Clade II)__AIT17565__NP
auguccgccuccaaggagaucaaguccuuccucuggacccagucccuccgccgcgagcucuccggcuacugcuccuccaucaagcuccaggucgucaaggacgcccaggcccuccuccacggccucgacuucuccgaggucuccaacguccagcgccucaugcgcaagcagaagcgcgacgacuccgaccucaagcgccuccgcgaccucaaccaggccgucaacaaccucgucgagcucaaguccacccagcagaaguccauccuccgcgucggcacccucaccuccgacgaccuccucacccucgccgccgaccucgagaagcucaaguccaaggucauccgcaccgagcgcccccucuccuccggcgucuacaugggcaaccucuccacccagcagcucgagcagcgccgcgcccuccucaacaugaucggcauggucggcggcgcccagggcacccagcccggccgcgacggcgucguccgcgucugggacgucaagaaccccgaccuccucaacaaccaguucggcaccaugcccucccucacccucgccugccucaccaagcagggccaggucgaccucaacgacgccguccucgcccucaccgaccucggccucaucuacaccgccaaguaccccaacuccuccgaccucgaccgccucucccagucccaccccauccucaacauggucgacaccaagaaguccucccucaacaucuccggcuacaacuucucccucggcgccgccgucaaggccggcgccugcaugcucgacggcggcaacaugcucgagaccaucaaggucaccccccagaccauggacggcauccucaaguccauccucaaggucaagcgcucccucggcauguucgucuccgacgcccccggcgagcgcaaccccuacgagaacauccucuacaagaucugccucuccggcgacggcuggcccuacaucgccucccgcaccuccaucgucggccgcgccugggagaacaccaccgucgaccucgaguccgacggcaagccccagaaggucggcaccgccggcuccaacaagucccuccaguccgccggcuuccccaccggccucaccuacucccagcucaugacccucaaggacuccaugaugcagcucgaccccuccgccaagaccuggaucgacaucgagggccgccccgaggaccccgucgagaucgcccucuaccagcccauguccggcugcuacauccacuucuuccgcgagcccaccgaccucaagcaguucaagcaggacgccaaguacucccacggcaucgacgucgccgaccucuuccccgcccagcccggccucaccuccgccgucaucgaggcccucccccgcaacaugguccucaccugccagggcuccgacgacaucaagcgccuccucgacucccagggccgccgcgacaucaagcucaucgacaucgcccucuccaaggccgacucccgcaaguucgagaacgccgucugggaccagugcaaggaccucugccacaugcacaccggcgucgucgucgagaagaagaagcgcggcggcaaggaggagaucaccccccacugcgcccucauggacugcaucauguacgacgccgccgucuccggcggccucaacauccccguccuccgcgccguccucccccgcgacauggucuuccgcaccuccucccccaaggucguccucuga

SEQ ID NO: 8343 - RNA, 1710 nt, Artificial Sequence
  derived and/or modified CDS sequence (opt2) from LASV(ISTH2334-NIG-2012;Clade II)__AIT17569__NP
auguccgccuccaaggaggucaaguccuuccucuggacccagucccuccgccgcgagcucuccggcuacugcuccaacaucaagcuccaggucgucaaggacgcccaggcccuccuccacggccucgacuucuccgaggucuccaacguccagcgccucaugcgcaagcagaagcgcgacgacuccgaccucaagcgccuccgcgaccucaaccaggccgucaacaaccucgucgagcucaaguccacccagcagaaguccauccuccgcgucggcacccucaccuccgacgaccuccucacccucgccgccgaccucgagaagcucaaguccaaggucauccgcaccgagcgcccccucuccuccggcgucuacaugggcaaccucuccacccagcagcucgagcagcgccgcgcccuccucaacaugaucggcauggucggcggcgcccagggcacccagcccggccgcgacggcgucguccgcgucugggacgucaagaaccccgaccuccucaacaaccaguucggcaccaugcccucccucacccucgccugccucaccaagcagggccaggucgaccucaacgacgccguccucgcccucaccgaccucggccucaucuacaccgccaaguuccccaacuccuccgaccucgaccgccucucccagucccaccccauccucaacauggucgacaccaagaaguccucccucaacaucuccggcuacaacuucucccucggcgccgccgucaaggccggcgccugcaugcucgacggcggcaacaugcucgagaccaucaaggucaccccccagaccauggacggcauccucaaguccauccucaaggucaagaagucccucggcauguucgucuccgacacccccggcgagcgcaaccccuacgagaacauccucuacaagaucugccucuccggcgacggcuggcccuacaucgccucccgcaccuccaucgucggccgcgccugggagaacaccaccgucgaccucgaguccgacggcaagccccagaaggucggcaccaccggcuccaacaagucccuccaguccgccggcuuccccaccggccucaccuacucccagcucaugacccucaaggacuccaugaugcagcucgaccccuccgccaagaccuggaucgacaucgagggccgccccgaggaccccgucgagaucgcccucuaccagcccauguccggcugcuacauccacuucuuccgcgagcccaccgaccucaagcaguucaagcaggacgccaaguacucccacggcaucgacgucgccgaccucuuccccgcccagcccggccucaccuccgccgucaucgaggcccucccccgcaacaugguccucaccugccagggcuccgacgacaucaagcgccuccucgacucccagggccgccgcgacaucaagcucaucgacaucgcccucuccaaggccgacucccgccgcuucgagaacgccgucugggaccagugcaaggaccucugccacaugcacaccggcgucgucgucgagaagaagaagcgcggcggcaaggaggagaucaccccccacugcgcccucauggacugcaucauguacgacgccgccgucuccggcggccucaaccuccccguccuccgcgccguccucccccgcgacauggucuuccgcaccuccucccccaaggucguccucuga

SEQ ID NO: 8344 - RNA, 1710 nt, Artificial Sequence
  derived and/or modified CDS sequence (opt2) from LASV(ISTH2358-NIG-2012;Clade II)__AIT17573__NP
auguccgccuccaaggaggucaaguccuuccucuggacccagucccuccgccgcgagcucuccggcuacugcuccaacaucaagcuccaggucgucaaggacgcccaggcccuccuccacggccucgacuucuccgaggucuccaacguccagcgccucaugcgcaagcagaagcgcgacgacuccgaccucaagcgccuccgcgaccucaaccaggccgucaacaaccucgucgagcucaaguccacccagcagaaguccauccuccgcgucggcacccucaccuccgacgaccuccucacccucgccgccgaccucgagaagcucaaguccaaggucauccgcaccgagcgcccccucuccuccggcgucuacaugggcaaccucuccacccagcagcucgagcagcgccgcgcccuccucaacaugaucggcauggucggcggcgcccagggcacccagcccggccgcgacggcgucguccgcgucugggacgucaagaaccccgaccuccucaacaaccaguucggcaccaugcccucccucacccucgccugccucaccaagcagggccaggucgaccucaacgacgccguccucgcccucaccgaccucggccucaucuacaccgccaaguaccccaacuccuccgaccucgaccgccucucccagucccaccccauccucaacauggucgacaccaagaaguccucccucaacaucuccggcuacaacuucucccucggcgccgccgucaaggccggcgccugcaugcucgacggcggcaacaugcucgagaccaucaaggucaccccccagaccauggacggcauccucaaguccauccucaaggucaagaagucccucggcauguucgucuccgacacccccggcgagcgcaaccccuacgagaacauccucuacaagaucugccucuccggcgacggcuggcccuacaucgccucccgcaccuccaucgucggccgcgccugggagaacaccaccgucgaccucgaguccgacggcaagccccagaaggucggcaccgccggcuccaacaagucccuccaguccgccggcuuccccaccggccucaccuacucccagcucaugacccucaaggacuccaugaugcagcucgaccccuccgccaagaccuggaucgacaucgagggccgccccgaggaccccgucgagaucgcccucuaccagcccauguccggcugcuacauccacuucuuccgcgagcccaccgaccucaagcaguucaagcaggacgccaaguacucccacggcaucgacaucgccgaccucuuccccgcccagcccggccucaccuccgccgucaucgaggcccucccccgcaacaugguccucaccugccagggcuccgacgacaucaagcgccuccucgacucccagggccgccgcgacaucaagcucaucgacaucgcccucuccaaggccgacucccgccgcuucgagaacgccgucugggaccagugcaaggaccucugccacaugcacaccggcgucgucgucgagaagaagaagcgcggcggcaaggaggagaucaccccccacugcgcccucauggacugcaucauguacgacgccgccgucuccggcggccucaacauccccguccuccgcgccguccucccccgcgacauggucuuccgcaccuccucccccaaggucguccucuga

SEQ ID NO: 8345 - RNA, 1710 nt, Artificial Sequence
  derived and/or modified CDS sequence (opt2) from LASV(ISTH2376-NIG-2012;Clade II)__AIT17577__NP
auguccgccuccaaggaggucaaguccuuccucuggacccagucccuccgccgcgagcucuccggcuacugcuccuccaucaagcuccaggucgucaaggacgcccaggcccuccuccacggccucgacuucuccgaggucuccaacguccagcgccucaugcgcaagcagaagcgcgacgacuccgaccucaagcgccuccgcgaccucaaccaggccgucaacaaccucgucgagcucaaguccacccagcagaaguccauccuccgcgucggcacccucaccuccgacgaccuccucacccucgccgccgaccucgagaagcucaaguccaaggucauccgcaccgagcgcccccucuccuccggcgucuacaugggcaaccucuccacccagcagcucgagcagcgccgcgcccuccucaacaugaucggcauggucggcggcgcccagggcacccagcccggccgcgacggcgucguccgcgucugggacgucaagaaccccgaccuccucaacaaccaguucggcaccaugcccucccucacccucgccugccucaccaagcagggccaggucgaccucaacgacgccguccucgcccucaccgaccucggccucaucuacaccgccaaguaccccaacuccuccgaccucgaccgccucucccagucccaccccauccucaacauggucgacaccaagaaguccucccucaacaucuccggcuacaacuucucccucggcgccgccgucaaggccggcgccugcaugcucgacggcggcaacaugcucgagaccaucaaggucaccccccagaccauggacggcauccucaaguccauccucaaggucaagcgcucccucggcauguucgucuccgacacccccggcgagcgcaaccccuacgagaacauccucuacaagaucugccucuccggcgacggcuggcccuacaucgccucccgcaccuccaucgccggccgcgccugggagaacaccaccgucgaccucgaguccgacggcaagccccagaaggucggcgccgccggcuccaacaagucccuccaguccgccggcuuccccaccggccucaccuacucccagcucaugacccucaaggacuccaugaugcagcucgaccccuccgccaagaccuggaucgacaucgagggccgccccgaggaccccgucgagaucgcccucuaccagcccauguccggcugcuacauccacuucuuccgcgagcccaccgaccucaagcaguucaagcaggacgccaaguacucccacggcaucgacgucgccgaccucuuccccgcccagcccggccucaccuccgccgucaucgaggcccucccccgcaacaugguccucaccugccagggcuccgacgacaucaagcgccuccucgacucccagggccgccgcgacaucaagcucaucgacaucgcccucuccaaggccgacucccgccgcuucgagaacgccgucugggaccagugccgcgaccucugccacaugcacaccggcgucgucgucgagaagaagaagcgcggcggcaaggaggagaucaccccccacugcgcccucauggacugcaucauguacgacgccgccgucuccggcggccucaacauccccguccuccgcgccguccucccccgcgacauggucuuccgcaccuccucccccaaggucguccucuga

SEQ ID NO: 8346 - RNA, 1710 nt, Artificial Sequence
  derived and/or modified CDS sequence (opt2) from LASV(Lassa virus/H.sapiens-wt/NGA/2015/ISTH_0543;Clade II)__AVO03640__NP
auguccgccuccaaggaggucaaguccuuccucuggacccagucccuccgccgcgagcucuccggcuacugcuccaacaucaagcuccaggucgucaaggacgcccaggcccuccuccacggccucgacuucuccgaggucuccaacguccagcgccucaugcgcaagcagaagcgcgacgacuccgaccucaagcgccuccgcgaccucaaccaggccgucaacaaccucgucgagcucaaguccacccagcagaaguccauccuccgcgucggcacccucaccuccgacgaccuccucacccucgccgccgaccucgagaagcucaaguccaaggucauccgcaccgagcgcccccucuccuccggcgucuacaugggcaaccucuccacccagcagcucgagcagcgccgcgcccuccucaacaugaucggcauggucggcggcgcccagggcacccagcccggccgcgacggcgucguccgcgucugggacgucaagaaccccgaccuccucaacaaccaguucggcaccaugcccucccucacccucgccugccucaccaagcagggccaggucgaccucaacgacgccguccucgcccucaccgaccucggccucaucuacaccgccaaguaccccaacuccuccgaccucgaccgccucucccagucccaccccauccucaacauggucgacaccaagaaguccucccucaacaucuccggcuacaacuucucccucggcgccgccgucaaggccggcgccugcaugcucgacggcggcaacaugcucgagaccaucaaggucaccccccagaccauggacggcauccucaaguccauccucaaggucaagaagucccucggcauguucgucuccgacacccccggcgagcgcaaccccuacgagaacauccucuacaagaucugccucuccggcgacggcuggcccuacaucgccucccgcaccuccaucgucggccgcgccugggagaacaccaccgucgaccucgaguccgacggcaagccccagaaggucggcuccgccggcuccaacaagucccuccaguccgccggcuuccccaccggccucaccuacucccagcucaugacccucaaggacuccaugaugcagcucgaccccuccgccaagaccuggaucgacaucgagggccgccccgaggaccccgucgagaucgcccucuaccagcccauguccggcugcuacauccacuucuuccgcgagcccaccgaccucaagcaguucaagcaggacgccaaguacucccacggcaucgacgucgccgaccucuuccccgcccagcccggccucaccuccgccgucaucgaggcccucccccgcaacaugguccucaccugccagggcuccgacgacaucaagcgccuccucgacucccagggccgcaaggacaucaagcucaucgacaucgcccucuccaaggccgacucccgccgcuucgagaacgccgucugggaccagugcaaggaccucugccacaugcacaccggcgucgucgucgagaagaagaagcgcggcggcaaggaggagaucaccccccacugcgcccucauggacugcaucauguacgacgccgccgucuccggcggccucaacauccccguccuccgcgccguccucccccgcgacauggucuuccgcaccuccucccccaaggucguccucuga

SEQ ID NO: 8347 - RNA, 1710 nt, Artificial Sequence
  derived and/or modified CDS sequence (opt2) from LASV(Lassa virus/H.sapiens-wt/NGA/2015/ISTH_0547;Clade II)__AVO03584__NP
auguccgccuccaaggaggucaaguccuuccucuggacccagucccuccgccgcgagcucuccggcuacugcuccuccaucaagcuccaggucgucaaggacgcccaggcccuccuccacggccucgacuucuccgaggucuccaacguccagcgccucaugcgcaagcagaagcgcgacgacuccgaccucaagcgccuccgcgaccucaaccaggccgucaacaaccucgucgagcucaaguccacccagcagaaguccauccuccgcgucggcacccucaccuccgacgaccuccucacccucgccgccgaccucgagaagcucaaguccaaggucauccgcaccgagcgcccccucuccuccggcgucuacaugggcaaccucuccacccagcagcucgagcagcgccgcgcccuccucaacaugaucggcauggucggcggcgcccagggcacccagcccggccgcgacggcgucguccgcgucugggacgucaagaaccccgaccuccucaacaaccaguucggcaccaugcccucccucacccucgccugccucaccaagcagggccaggucgaccucaacgacgccguccucgcccucaccgaccucggccucaucuacaccgccaaguaccccaacuccuccgaccucgaccgccucucccagucccaccccauccucaacauggucgacaccaagaaguccucccucaacaucuccggcuacaacuucucccucggcgccgccgucaaggccggcgccugcaugcucgacggcggcaacaugcucgagaccaucaaggucaccccccagaccauggacggcauccucaaguccauccucaaggucaagcgcucccucggcauguucgucuccgacacccccggcgagcgcaaccccuacgagaacauccucuacaagaucugccucuccggcgacggcuggcccuacaucgccucccgcaccuccaucgucggccgcgccugggagaacaccaccgucgaccucgaguccgacggcaagccccagaaggucggcgucgccggcuccaacaagucccuccaguccgccggcuuccccaccggccucaccuacucccagcucaugacccucaaggacuccaugaugcagcucgaccccuccgccaagaccuggaucgacaucgagggccgccccgaggaccccgucgagaucgcccucuaccagcccauguccggcugcuacauccacuucuuccgcgagcccaccgaccucaagcaguucaagcaggacgccaaguacucccacggcaucgacgucgccgaccucuuccccgcccagcccggccucaccuccgccgucaucgaggcccucccccgcaacaugguccucaccugccagggcuccgacgacaucaagcgccuccucgacucccagggccgccgcgacaucaagcucaucgacaucgcccucuccaaggccgacucccgccgcuucgagaacgccgucugggaccagugcaaggaccucugccacaugcacaccggcgucgucgucgagaagaagaagcgcggcggcaaggaggagaucaccccccacugcgcccucauggacugcaucauguacgacgccgccgucuccggcggccucaacauccccguccuccgcgccguccucccccgcgacauggucuuccgcaccuccucccccaaggucguccucuga

SEQ ID NO: 8348 - RNA, 1710 nt, Artificial Sequence
  derived and/or modified CDS sequence (opt2) from LASV(Lassa virus/H.sapiens-wt/NGA/2015/ISTH_0574;Clade II)__AVO03658__NP
auguccgccuccaaggaggucaaguccuuccucuggacccagucccuccgccgcgagcucuccggcuacugcuccaacaucaagcuccaggucgucaaggacgcccaggcccuccuccacggccucgacuucuccgaggucuccaacguccagcgccucaugcgcaagcagaagcgcgacgacuccgaccucaagcgccuccgcgaccucaaccaggccgucaacaaccucgucgagcucaaguccacccagcagaaguccauccuccgcgucggcacccucaccuccgacgaccuccucacccucgccgccgaccucgagaagcucaaguccaaggucauccgcaccgagcgcccccucuccuccggcgucuacaugggcaaccucuccacccagcagcucgagcagcgccgcgcccuccucaacaugaucggcauggucggcggcacccagggcacccagcccggccgcgacggcgucguccgcgucugggacgucaagaaccccgaccuccucaacaaccaguucggcaccaugcccucccucacccucgccugccucaccaagcagggccaggucgaccucaacgacgccguccucgcccucaccgaccucggccucaucuacaccgccaaguaccccaacuccuccgaccucgaccgccucucccagucccaccccauccucaacauggucgacaccaagaaguccucccucaacaucuccggcuacaacuucucccucggcgccgccgucaaggccggcgccugcaugcucgacggcggcaacaugcucgagaccaucaaggucaccccccagaccauggacggcauccucaaguccauccucaaggucaagaagucccucggcauguucgucuccgacacccccggcgagcgcaaccccuacgagaacauccucuacaagaucugccucuccggcgacggcuggcccuacaucgccucccgcaccuccaucgucggccgcgccugggagaacaccaccgucgaccucgaguccgagggcaagccccagaaggucggcaccgccggcuccaacaagucccuccaguccgccggcuuccccaccggccucaccuacucccagcucaugacccucaaggacuccaugaugcagcucgaccccuccgccaagaccuggaucgacaucgagggccgccccgaggaccccgucgagaucgcccucuaccagcccauguccggcugcuacauccacuucuuccgcgagcccaccgaccucaagcaguucaagcaggacgccaaguacucccacggcaucgacgucgccgaccucuuccccgcccagcccggccucaccuccgccgucaucgaggcccucccccgcaacaugguccucaccugccagggcuccgacgacaucaagcgccuccucgacucccagggccgccgcgacaucaagcucaucgacaucucccucuccaaggccgacucccgccgcuucgagaacgccgucugggaccagugcaaggaccucugccacaugcacaccggcgucgucgucgagaagaagaagcgcggcggcaaggaggagaucaccccccacugcgcccucauggacugcaucauguacgacgccgccgucuccggcggccucaacauccccguccuccgcgccguccucccccgcgacauggucuuccgcaccuccucccccaaggucguccucuga

SEQ ID NO: 8349 - RNA, 1710 nt, Artificial Sequence
  derived and/or modified CDS sequence (opt2) from LASV(Lassa virus/H.sapiens-wt/NGA/2015/ISTH_0682;Clade II)__AVO03626__NP
auguccgccuccaaggaggucaaguccuuccucuggacccagucccuccgccgcgagcucuccggcuacugcuccuccaucaagcuccaggucgucaaggacgcccaggcccuccuccacggccucgacuucuccgaggucuccaacguccagcgccucaugcgcaagcagaagcgcgacgacuccgaccucaagcgccuccgcgaccucaaccaggccgucaacaaccucgucgagcucaaguccacccagcagaaguccguccuccgcgucggcacccucaccuccgacgaccuccucacccucgccgccgaccucgagaagcucaaguccaaggucauccgcaccgagcgcccccucuccuccggcgucuacaugggcaaccucuccacccagcagcucgagcagcgccgcgcccuccucuccaugaucggcauggucggcggcacccagggcacccagcccggccgcgacggcgucguccgcgucugggacgucaagaaccccgaccuccucaacaaccaguucggcaccaugcccucccucacccucgccugccucaccaagcagggccaggucgaccucaacgacgccguccucgcccucaccgaccucggccucaucuacaccgccaaguaccccaacuccuccgaccucgaccgccucucccagucccaccccauccucaacauggucgacaccaagaaguccucccucaacaucuccggcuacaacuucucccucggcgccgccgucaaggccggcgccugcaugcucgacggcggcaacaugcucgagaccaucaaggucaccccccagaccauggacggcauccucaaguccauccucaaggucaagaagucccucggcauguucgucuccgacacccccggcgagcgcaaccccuacgagaacauccucuacaagaucugccucuccggcgacggcuggcccuacaucgccucccgcaccuccaucgucggccgcgccugggagaacaccaccgucgaccucgaguccaacggcaagccccagaaggucggcaccgccggcuccaacaagucccuccaguccgccggcuuccccaccggccucaccuacucccagcucaugacccucaaggacuccaugaugcagcucgaccccuccgccaagaccuggaucgacaucgagggccgccccgaggaccccgucgagaucgcccucuaccagcccauguccggcugcuacauccacuucuuccgcgagcccaccgaccucaagcaguucaagcaggacgccaaguacucccacggcaucgacgucgccgaccucuuccccgcccagcccggccucaccuccgccgucaucgaggcccucccccgcaacaugguccucaccugccagggcuccgacgacaucaagcgccuccucgacucccagggccgccgcgacaucaagcucaucgacaucucccucuccaaggccgacucccgcaaguucgagaacgccgucugggaccagugcaaggaccucugccacaugcacaccggcgucgucgucgagaagaagaagcgcggcggcaaggaggagaucaccccccacugcgcccucauggacugcaucauguacgacgccgccgucuccggcggccucaacauccccguccuccgcgccguccucccccgcgacauggucuuccgcaccuccucccccaaggucguccucuga

SEQ ID NO: 8350 - RNA, 1710 nt, Artificial Sequence
  derived and/or modified CDS sequence (opt2) from LASV(Lassa virus/H.sapiens-wt/NGA/2015/ISTH_0687;Clade II)__AVO03582__NP
auguccgccuccaaggaggucaaguccuuccucuggacccagucccuccgccgcgagcucuccggcuacugcuccuccaucaagcuccaggucgucaaggacgcccaggcccuccuccacggccucgacuucuccgaggucuccaacguccagcgccucaugcgcaagcagaagcgcgacgacuccgaccucaagcgccuccgcgaccucaaccaggccgucaacaaccucgucgagcucaaguccacccagcagaaguccauccuccgcgucggcacccucaccuccgacgaccuccucacccucgccgccgaccucgagaagcucaaguccaaggucauccgcaccgagcgcccccucuccuccggcgucuacaugggcaaccucuccacccagcagcucgagcagcgccgcgcccuccucaacaugaucggcauggucggcggcgcccaguccacccagcccggccgcgacggcgucguccgcgucugggacgucaagaaccccgaccuccucaacaaccaguucggcaccaugcccucccucacccucgccugccucaccaagcagggccaggucgaccucaacgacgccguccucgcccucaccgaccucggccucaucuacaccgccaaguaccccaacuccuccgaccucgaccgccucucccagucccaccccauccucaacauggucgacaccaagaaguccucccucaacaucuccggcuacaacuucucccucggcgccgccgucaaggccggcgccugcaugcucgacggcggcaacaugcucgagaccaucaaggucaccccccagaccauggacggcauccucaaguccauccucaaggucaagcgcucccucggcauguucgucuccgacacccccggcgagcgcaaccccuacgagaacauccucuacaagaucugccucuccggcgacggcuggcccuacaucgccucccgcaccuccaucgucggccgcgccugggagaacaccaccgucgaccucgaguccgacggcaagccccagaaggucggcgccaccggcuccaacaagucccuccaguccgccggcuuccccaccggccucaccuacucccagcucaugacccucaaggacuccaugaugcagcucgaccccuccgccaagaccuggaucgacaucgagggccgccccgaggaccccgucgagaucgcccucuaccagcccaucuccggcugcuacauccacuucuuccgcgagcccaccgaccucaagcaguucaagcaggacgccaaguacucccacggcaucgacgucgccgaccucuuccccgcccagcccggccucaccuccgccgucaucgaggcccucccccgcaacaugguccucaccugccagggcuccgacgacaucaagcgccuccucgacucccagggccgccgcgacaucaagcucaucgacaucgcccucuccaaggccgacucccgccgcuucgagaacgccgucugggaccagugcaaggaccucugccacaugcacaccggcgucgucgucgagaagaagaagcgcggcggcaaggaggagaucaccccccacugcgcccucauggacugcaucauguacgacgccgccgucuccggcggccucaacauccccguccuccgcgccguccucccccgcgacauggucuuccgcaccuccucccccaaggucguccucuga

SEQ ID NO: 8351 - RNA, 1710 nt, Artificial Sequence
  derived and/or modified CDS sequence (opt2) from LASV(Lassa virus/H.sapiens-wt/NGA/2015/ISTH_0736;Clade II)__AVO03574__NP
auguccgccuccaaggaggucaaguccuuccucuggacccagucccuccgccgcgagcucuccggcuacugcuccaacaucaagcuccaggucgucaaggacgcccaggcccuccuccacggccucgacuucuccgaggucuccaacguccagcgccucaugcgcaagcagaagcgcgacgacuccgaccucaagcgccuccgcgaccucaaccaggccgucaacaaccucgucgagcucaaguccacccagcagaaguccguccuccgcgucggcacccucaccuccgacgaccuccucacccucgccgccgaccucgagaagcucaaguccaaggucauccgcaccgagcgcccccucuccuccggcgucuacaugggcaaccucuccacccagcagcucgagcaccgccgcgcccuccucaacaugaucggcauggucggcggcgcccagggcacccagcccggccgcgacggcgucguccgcgucugggacgucaagaaccccgaccuccucaacaaccaguucggcaccaugcccucccucacccucgccugccucaccaagcagggccaggucgaccucaacgacgccguccucgcccucaccgaccucggccucaucuacaccgccaaguaccccaacuccuccgaccucgaccgccucucccagucccaccccauccucaacauggucgacaccaagaaguccucccucaacaucuccggcuacaacuucucccucggcgccgccgucaaggccggcgccugcaugcucgacggcggcaacaugcucgagaccaucaaggucaccccccagaccauggacggcauccucaaguccauccucaaggucaagcgcucccucggcauguucgucuccgacacccccggcgagcgcaaccccuacgagaacauccucuacaagaucugccucuccggcgacggcuggcccuacaucgccucccgcaccuccaucgucggccgcgccugggagaacaccaccgucgaccucgaguccgacggcaagccccagaaggucggcaccgccggcuccaacaagucccuccaguccgccggcuuccccaccggccucaccuacucccagcucaugacccucaaggacuccaugaugcagcucgaccccuccgccaagaccuggaucgacaucgagggccgccccgaggaccccgucgagaucgcccucuaccagcccaucuccggcugcuacauccacuucuuccgcgagcccaccgaccucaagcaguucaagcaggacgccaaguacucccacggcaucgacgucgccgaccucuuccccgcccagcccggccucaccuccgccgucaucgaggcccucccccgcaacaugguccucaccugccagggcuccgacgacaucaagcgccuccucgacucccagggccgccgcgacaucaagcucaucgacaucgcccucuccaaggccgacucccgccgcuucgagaacgccgucugggaccagugcaaggaccucugccacaugcacaccggcgucgucgucgagaagaagaagcgcggcggcaaggaggagaucaccccccacugcgcccucauggacugcaucauguacgacgccgccgucuccggcggccucaacauccccguccuccgcgccguccucccccgcgacauggucuuccgcaccuccucccccaaggucguccucuga

SEQ ID NO: 8352 - RNA, 1710 nt, Artificial Sequence
  derived and/or modified CDS sequence (opt2) from LASV(Lassa virus/H.sapiens-wt/NGA/2015/ISTH_0789;Clade II)__AVO03552__NP
auguccgccuccaaggaggucaaguccuuccucuggacccagucccuccgccgcgagcucuccggcuacugcuccaacaucaagcuccaggucgucaaggacgcccaggcccuccuccacggccucgacuucuccgaggucuccaacguccagcgccucaugcgcaagcagaagcgcgacgacggcgaccucaagcgccuccgcgaccucaaccaggccgucaacaaccucgucgagcucaaguccacccagcagaaguccguccuccgcgucggcacccucuccuccgacgaccuccucauccucgccgccgaccucgagaagcucaaguccaaggucauccgcaccgagcgcccccucuccuccggcgucuacaugggcaaccucuccucccagcagcucgaccagcgccgcgcccuccucaacaugaucggcaugaccggcggcggccagggcgccaacgccggccgcgacggcaucguccgcgucugggacgucaagaacgccgagcuccucaacaaccaguucggcaccaugcccucccucacccucgccugccucaccaagcagggccaggucgaccucaacgacgccguccaggcccucaccgaccucggccucaucuacaccgccaaguaccccaacuccuccgaccucgaccgccucucccagucccaccccauccucaacaugaucgacaccaagaaguccucccucaacaucuccggcuacaacuucucccucggcgccgccgucaaggccggcgccugcaugcucgacggcggcaacaugcucgagaccaucaaggucuccccccagaccauggacggcauccucaaguccauccucaaggucaagcgcucccucggcauguucgucuccgacgcccccggcgagcgcaaccccuacgagaacauccucuacaagaucugccucuccggcgacggcuggcccuacaucgccucccgcaccuccaucaucggccgcgccugggagaacaccgucgucgaccucgaguccgacaacaagccccagaagcucggcaacuccggcuccaaccgcucccuccaguccgccggcuaccccgccggccucaccuacucccagcucaugacccucaaggacuccaugcuccagcucgaccccaacgccaagaccuggauggacgucgagggccgccccgacgaccccgucgagaucgcccucuaccagcccuccuccggcugcuacauccacuucuuccgcgagcccaccgaccucaagcaguucaagcaggacgccaaguacucccacggcaucgacgucggcgaccucuucgccgcccagcccggccucaccuccgccgucaucgaggcccucccccgcaacauggucaucaccugccagggcuccgaggacaucaagaagcuccucgagucccagggccgcaaggacaucaagcucgucgacaucuccauguccaagcucgacucccgcaaguucgagaacgccgucugggaccaguacaaggaccucugccacaugcacaccggcaucgucgucgagaagaagaagcgcggcggcaaggaggagaucaccccccacugcgcccucauggacugcaucauguucgacgccgccgucgucggcggccucgacgccaagauccuccgcgccguccucccccgcgacauggucuuccgcaccuccacccccaaggucguccucuga

SEQ ID NO: 8353 - RNA, 1710 nt, Artificial Sequence
  derived and/or modified CDS sequence (opt2) from LASV(Lassa virus/H.sapiens-wt/NGA/2015/ISTH_0821;Clade II)__AVO03642__NP
auguccgccuccaaggaggucaaguccuuccucuggacccagucccuccgccgcgagcucuccggcuacugcuccaacaucaagcuccaggucgucaaggacgcccaggcccuccuccacggccucgacuucuccgaggucuccaacguccagcgccucaugcgcaagcagaagcgcgacgacuccgaccucaagcgccuccgcgaccucaaccaggccgucaacaaccucgucgagcucaaguccacccagcagaaguccauccuccgcgucggcacccucaccuccgacgaccuccucacccucgccgccgaccucgagaagcucaaguccaaggucauccgcaccgagcgcccccucuccuccggcgucuacaugggcaaccucuccacccagcagcucgagcagcgccgcgcccuccucaacaugaucggcauggucggcggcgcccagggcacccagcccggccgcgacggcgucguccgcgucugggacgucaagaaccccgaccuccucaacaaccaguucggcaccaugcccucccucacccucgccugccucaccaagcagggccaggucgaccucaacgacgccguccucgcccucaccgaccucggccucaucuacaccgccaaguaccccaacuccuccgaccucgaccgccucucccagucccaccccauccucaacauggucgacaccaagaaguccucccucaacaucuccggcuacaacuucucccucggcgccgccgucaaggccggcgccugcaugcucgacggcggcaacaugcucgagaccaucaaggucaccccccagaccauggacggcauccucaaguccauccucaaggucaagcgcucccucggcauguucgucuccgacacccccggcgagcgcaaccccuacgagaacauccucuacaagaucugccucuccggcgacggcuggcccuacaucgccucccgcaccuccaucgucggccgcgccugggagaacaccaccgucgaccucgaguccgacggcaagccccagaaggucggcaucgccggcuccaacaagucccuccaguccgccggcuuccccaccggccucaccuacucccagcucaugacccucaaggacuccaugaugcagcucgaccccuccgccaagaccuggaucgacaucgagggccgccccgaggaccccgucgagaucgcccucuaccagcccauguccggcugcuacauccacuucuuccgcgagcccaccgaccucaagcaguucaagcaggacgccaaguacucccacggcaucgacgucgccgaccucuuccccgcccagcccggccucaccuccgccgucaucgaggcccucccccgcaacaugguccucaccugccagggcuccgacgacaucaagaagcuccucgacucccagggccgcaaggacaucaagcucaucgacaucgcccucuccaaggucgacucccgccgcuucgagaacgccgucugggaccagugcaaggaccucugccacaugcacaccggcgucgucgucgagaagaagaagcgcggcggcaaggaggagaucaccccccacugcgcccucauggacugcaucauguacgacgccgccgucuccggcggccucaacauccccguccuccgcgccguccucccccgcgacauggucuuccgcaccuccucccccaaggucguccucuga

SEQ ID NO: 8354 - RNA, 1710 nt, Artificial Sequence
  derived and/or modified CDS sequence (opt2) from LASV(Lassa virus/H.sapiens-wt/NGA/2015/ISTH_0831;Clade II)__AVO03546__NP
auguccgccuccaaggaggucaaguccuuccucuggacccagucccuccgccgcgagcucgccggcuacugcuccaacaucaagcuccaggucgucaaggacgcccaggcccuccuccacggccucgacuucuccgaggucuccaacguccagcgccucaugcgcaagcagaagcgcgacgacuccgaccucaagcgccuccgcgaccucaaccaggccgucaacaaccucgucgagcucaaguccacccagcagaaguccauccuccgcgucggcacccucuccuccgacgaccuccucacccucgccgccgaccucgagaagcucaaguccaaggucauccgcaccgagcgcccccucuccuccggcgucuacaugggcaaccucuccacccagcagcucgaccagcgccgcgcccuccucaacaugaucggcauggucggcggcucccagggcaccuccgccggccgcgacggcaucguccgcgucugggacguccgcaaccccgagcuccucaacaaccaguucggcaccaugcccucccucacccucgccugccucaccaagcagggccaggucgaccucaacgacgccguccaggcccucaccgaccucggccucaucuacaccgccaaguaccccaacuccuccgaccucgaccgccucucccagucccaccccauccucaacaugaucgacaccaagaaguccuccaucaacaucuccggcuacaacuucucccucggcgccgccgucaaggccggcgccugcaugcucgacggcggcaacaugcucgagaccaucaaggucuccccccaguccauggacggcauccucaaguccauccucaaggucaagcgcucccucggcauguucgucuccgacacccccggcgagcgcaaccccuacgagaacauccucuacaagaucugccucuccggcgacggcuggcccuacaucgccucccgcaccuccaucaccggccgcgccugggagaacaccgucgucgaccucgaguccgacaacaagcccaagaagcccggcaacaacgaguccaaccgcucccuccaguccgccggcuuccccgccggccucaccuacucccagcucaugacccucaaggacuccaugcuccagcucgaccccaacgccaagaccuggauggacaucgagggccgccccgacgaccccgucgagaucgcccucuaccagcccaacuccggcugcuacauccacuucuuccgcgagcccaccgaccucaagcaguucaagcaggacgccaaguacucccacggcaucgacaucuccgaccucuucgccgcccagcccggccucaccuccgccgucaucgaggcccucccccgcaacauggucaucaccugccagggcuccgaggacaucaagaagcuccucgagucccagggccgcaaggacauccgccucgucgacaucucccucuccaaggccgacucccgcaaguucgagaacgccgucugggaccaguacaaggaccucugccacaugcacaccggcaucgucgucgagaagaagaagaagggcggcaaggaggagaucaccccccacugcgcccucauggacugcaucauguucgacgccgccgucaugaacggccucgacgcccgcguccuccgcgccguccucccccgcgacauggucuuccgcaccuccaccccccgcgucguccucuga

SEQ ID NO: 8355 - RNA, 1710 nt, Artificial Sequence
  derived and/or modified CDS sequence (opt2) from LASV(Lassa virus/H.sapiens-wt/NGA/2016/ISTH_0009;Clade II)__AVO03572__NP
auguccgccuccaaggaggucaaguccuuccucuggacccagucccuccgccgcgagcucuccggcuacugcuccaacaucaagcuccaggucgucaaggacgcccaggcccuccuccacggccucgacuucuccgaggucuccaacguccagcgccucaugcgcaagcagaagcgcgacgacuccgaccucaagcgccuccgcgaccucaaccaggccgucaacaaccucgucgagcucaaguccacccagcagaaguccauccuccgcgucggcacccucaccuccgacgaccuccucacccucgccgccgaccucgagaagcucaaguccaaggucauccgcaccgagcgcccccucuccuccggcgucuacaugggcaaccucuccacccagcagcucgagcagcgccgcgcccuccucaacaugaucggcauggucggcggcgcccagggcacccagcccggccgcgacggcgucguccgcgucugggacgucaagaaccccgaccuccucaacaaccaguucggcaccaugcccucccucacccucgccugccucaccaagcagggccaggucgaccucaacgacgccguccucgcccucaccgaccucggccucaucuacaccgccaaguaccccaacuccuccgaccucgaccgccucucccagucccaccccauccucaacauggucgacaccaagaaguccucccucaacaucuccggcuacaacuucucccucggcgccgccgucaaggccggcgccugcaugcucgacggcggcaacaugcucgagaccaucaaggucaccccccagaccauggacggcauccucaaguccauccucaaggucaagaagucccucggcauguucgucuccgacacccccggcgagcgcaaccccuacgagaacauccucuacaagaucugccucuccggcgacggcuggcccuacaucgccucccgcaccuccaucgucggccgcgccugggagaacaccaccgucgaccucgaguccgacggcaagccccagaaggucggcuccgccggcuccaacaagucccuccaguccgccggcuuccccaccggccucaccuacucccagcucaugacccucaaggacuccaugaugcagcucgaccccuccgccaagaccuggaucgacaucgagggccgccccgaggaccccgucgagaucgcccucuaccagcccauguccggcugcuacauccacuucuuccgcgagcccaccgaccucaagcaguucaagcaggacgccaaguacucccacggcaucgacgucgccgaccucuuccccgcccagcccggccucaccuccgccgucaucgaggcccucccccgcaacaugguccucaccugccagggcuccgacgacaucaagcgccuccucgacucccagggccgccgcgacaucaagcucaucgacaucgcccucuccaaggccgacucccgccgcuucgagaacgccgucugggaccagugcaaggaccucugccacaugcacaccggcgucgucgucgagaagaagaagcgcggcggcaaggaggagaucaccccccacugcgcccucauggacugcaucauguacgacgccgccgucuccggcggccucaacauccccguccuccgcgccguccucccccgcgacauggucuuccgcaccuccucccccaaggucguccucuga

SEQ ID NO: 8356 - RNA, 1710 nt, Artificial Sequence
  derived and/or modified CDS sequence (opt2) from LASV(Lassa virus/H.sapiens-wt/NGA/2016/ISTH_0017;Clade II)__AVO03568__NP
auguccgccuccaaggaggucaaguccuuccucuggacccagucccuccgccgcgagcucuccggcuacugcuccuccaucaagcuccaggucgucaaggacgcccaggcccuccuccacggccucgacuucuccgaggucuccaacguccagcgccucaugcgcaagcagaagcgcgacgacuccgaccucaagcgccuccgcgaccucaaccaggccgucaacaaccucgucgagcucaaguccacccagcagaaguccauccuccgcgucggcacccucaccuccgacgaccuccucacccucgccgccgaccucgagaagcucaaguccaaggucauccgcaccgagcgcccccucuccuccggcgucuacaugggcaaccucuccacccagcagcucgagcagcgccgcgcccuccucaacaugaucggcauggccggcggcgcccagggcacccagcccggccgcgacggcgucguccgcgucugggacgucaagaaccccgaccuccucaacaaccaguucggcaccaugcccucccucacccucgccugccucaccaagcagggccaggucgaccucaacgacgccguccucgcccucaccgaccucggccucaucuacaccgccaaguaccccaacuccuccgaccucgaccgccucucccagucccaccccauccucaacauggucgacaccaagaaguccucccucaacaucuccggcuacaacuucucccucggcgccgccgucaaggccggcgccugcaugcucgacggcggcaacaugcucgagaccaucaaggucaccccccagaccauggacggcauccucaaguccauccucaaggucaagcgcucccucggcauguucgucuccgacgcccccggcgagcgcaaccccuacgagaacauccucuacaagaucugccucuccggcgacggcuggcccuacaucgccucccgcaccuccaucgucggccgcgccugggagaacaccaccgucgaccucgaguccgacggcaagccccagaaggucggcgccaccggcuccaacaagucccuccaguccgccggcuuccccaccggccucaccuacucccagcucaugacccucaaggacuccaugaugcagcucgaccccuccgccaagaccuggaucgacaucgagggccgccccgaggaccccgucgaggucgcccucuaccagcccgucuccggcugcuacauccacuucuuccgcgagcccaccgaccucaagcaguucaagcaggacgccaaguacucccacggcaucgacgucgccgaccucuuccccgcccagcccggccucaccuccgccgucaucgaggcccucccccgcaacaugguccucaccugccagggcuccgacgacaucaagaagcuccucgacucccagggccgcaaggacaucaagcucaucgacaucgcccucuccaaggccgacucccgccgcuucgagaacgccgucugggaccagugcaaggaccucugccacaugcacaccggcgucgucgucgagaagaagaagcgcggcggcaaggaggagaucaccccccacugcgcccucauggacugcaucauguacgacgccgccgucuccggcggccucaacauccccguccuccgcgccguccucccccgcgacauggucuuccgcaccuccucccccaaggucguccucuga

SEQ ID NO: 8357 - RNA, 1710 nt, Artificial Sequence
  derived and/or modified CDS sequence (opt2) from LASV(Lassa virus/H.sapiens-wt/NGA/2016/ISTH_0035;Clade II)__AVO03620__NP
auguccgccuccaaggaggucaaguccuuccucuggacccagucccuccgccgcgagcucuccggcuacugcuccuccaucaagcuccaggucgucaaggacgcccaggcccuccuccacggccucgacuucuccgaggucuccaacguccagcgccucaugcgcaagcagaagcgcgacgacuccgaccucaagcgccuccgcgaccucaaccaggccgucaacaaccucgucgagcucaaguccacccagcagaaguccauccuccgcgucggcacccucaccuccgacgaccuccucacccucgccgccgaccucgagaagcucaaguccaaggucauccgcaccgagcgcccccucuccuccggcgucuacaugggcaaccucuccucccagcagcucgagcagcgccgcgcccuccucaacaugaucggcauggucggcggcgcccagggcacccagcccggccgcgacggcgucguccgcgucugggacgucaagaaccccgaccuccucaacaaccaguucggcaccaugcccucccucacccucgccugccucaccaagcagggccaggucgaccucaacgacgccguccucgcccucaccgaccucggccucaucuacaccgccaaguaccccaacuccuccgaccucgaccgccucucccagucccaccccauccucaacauggucgacaccaagaaguccucccucaacaucuccggcuacaacuucucccucggcgccgccgucaaggccggcgccugcaugcucgacggcggcaacaugcucgagaccaucaaggucaccccccagaccauggacggcauccucaaguccauccucaaggucaagcgcucccucggcauguucgucuccgacacccccggcgagcgcaaccccuacgagaacauccucuacaagaucugccucuccggcgacggcuggcccuacaucgccucccgcaccuccaucgucggccgcgccugggagaacaccaccgucgaccucgaguccgacggcaagccccagaaggucggcuccgccggcuccaacaagucccuccaguccgccggcuuccccaccggccucaccuacucccagcucaugacccucaaggacuccaugaugcagcucgaccccuccgccaagaccuggaucgacaucgagggccgccccgaggaccccgucgagaucgcccucuaccagcccaucuccggcugcuacauccacuucuuccgcgagcccaccgaccucaagcaguucaagcaggacgccaaguacucccacggcaucgacgucgccgaccucuuccccgcccagcccggccucaccuccgccgucaucgaggcccucccccgcaacaugguccucaccugccagggcuccgacgacaucaagcgccuccucgacucccagggccgccgcgacaucaagcucaucgacaucgcccucuccaaggccgacucccgccgcuucgagaacgccgucugggaccagugcaaggaccucugccacaugcacaccggcgucgucgucgagaagaagaagcgcggcggcaaggaggagaucaccccccacugcgcccucauggacugcaucauguacgacgccgccgucuccggcggccucaacauccccguccuccgcgccguccucccccgcgacauggucuuccgcaccuccucccccaaggucguccucuga

SEQ ID NO: 8358 - RNA, 1710 nt, Artificial Sequence
  derived and/or modified CDS sequence (opt2) from LASV(Lassa virus/H.sapiens-wt/NGA/2016/ISTH_0104;Clade II)__AVO03632__NP
auguccgccuccaaggaggucaaguccuuccucuggacccagucccuccgccgcgagcucuccggcuacugcuccaacaucaagcuccaggucgucaaggacgcccaggcccuccuccacggccucgacuucuccgaggucuccaacguccagcgccucaugcgcaagcagaagcgcgacgacuccgaccucaagcgccuccgcgaccucaaccaggccgucaacaaccucgucgagcucaaguccacccagcagaaguccauccuccgcgucggcacccucaccuccgacgaccuccucacccucgccgccgaccucgagaagcucaaguccaaggucauccgcaccgagcgcccccucuccuccggcgucuacaugggcaaccucuccacccagcagcucgagcagcgccgcgcccuccucaacaugaucggcauggucggcggcacccaguccacccagcccggccgcgacggcgucguccgcgucugggacgucaagaaccccgaccuccucaacaaccaguucggcaccaugcccucccucacccucgccugccucaccaagcagggccaggucgaccucaacgacgccguccucgcccucaccgaccucggccucaucuacaccgccaaguaccccaacuccuccgaccucgaccgccucucccagucccaccccauccucaacauggucgacaccaagaaguccucccucaacaucuccggcuacaacuucucccucggcgccgccgucaaggccggcgccugcaugcucgacggcggcaacaugcucgagaccaucaaggucaccccccagaccauggacggcauccucaaguccauccucaaggucaagcgcucccucggcauguucgucuccgacacccccggcgagcgcaaccccuacgagaacauccucuacaagaucugccucuccggcgacggcuggcccuacaucgccucccgcaccuccaucgucggccgcgccugggagaacaccaccgucgaccucgaguccgacggcaagccccagaaggucggcaccaccggcuccaacaagucccuccaguccgccggcuuccccaccggccucaccuacucccagcucaugacccucaaggacuccaugaugcagcucgaccccuccgccaagaccuggaucgacaucgagggccgccccgaggaccccgucgagaucgcccucuaccagcccauguccggcugcuacauccacuucuuccgcgagcccaccgaccucaagcaguucaagcaggacgccaaguacucccacggcaucgacgucgccgaccucuuccccgcccagcccggccucaccuccgccgucaucgaggcccucccccgcaacaugguccucaccugccagggcuccgacgacaucaagaagcuccucgacucccagggccgccgcgacaucaagcucaucgacaucucccucuccaaggccgacucccgcaaguucgagaacgccgucugggaccagugcaaggaccucugccacaugcacaccggcgucgucgucgagaagaagaagcgcggcggcaaggaggagaucaccccccacugcgcccucauggacugcaucauguucgacgccgccgucuccggcggccucaacauccccguccuccgcgccguccucccccgcgacauggucuuccgcaccuccucccccaaggucguccucuga

SEQ ID NO: 8359 - RNA, 1710 nt, Artificial Sequence
  derived and/or modified CDS sequence (opt2) from LASV(Lassa virus/H.sapiens-wt/NGA/2016/ISTH_0133;Clade II)__AVO03636__NP
auguccgccuccaaggaggucaaguccuuccucuggacccagucccuccgccgcgagcucuccggcuacugcuccaacaucaagcuccaggucgucaaggacgcccaggcccuccuccacggccucgacuucuccgaggucuccaacguccagcgccucaugcgcaagcagaagcgcgacgacuccgaccucaagcgccuccgcgaccucaaccaggccgucaacaaccucgucgagcucaaguccacccagcagaaguccauccuccgcgucggcacccucaccuccgacgaccuccucacccucgccgccgaccucgagaagcucaaguccaaggucauccgcaccgagcgcccccucuccuccggcgucuacaugggcaaccucuccgcccagcagcucgagcagcgccgcgcccuccucaacaugaucggcauggucggcggcacccagggcacccagcccggccgcgacggcgucguccgcgucugggacgucaagaaccccgaccuccucaacaaccaguucggcaccaugcccucccucacccucgccugccucaccaagcagggccaggucgaccucaacgacgccguccucgcccucaccgaccucggccucaucuacaccgccaaguaccccaacgccuccgaccucgaccgccucucccagucccaccccauccucaacauggucgacaccaagaaguccucccucaacaucuccggcuacaacuucucccucggcgccgccgucaaggccggcgccugcaugcucgacggcggcaacaugcucgagaccaucaaggucaccccccagaccauggacggcauccucaaguccguccucaaggucaagaagucccucggcauguucgucuccgacacccccggcgagcgcaaccccuacgagaacauccucuacaagaucugccucuccggcgacggcuggcccuacaucgccucccgcaccuccaucgucggccgcgccugggagaacaccaccgucgaccucgaguccgacggcaagccccagaagaucggccccgccggcuccaacaagucccuccaguccgccggcuuccccgccggccucaccuacucccagcucaugacccucaaggacuccaugaugcagcucgaccccuccgccaagaccuggaucgacaucgagggccgccccgaggaccccgucgagaucgcccucuaccagcccauguccggcugcuacauccacuucuuccgcgagcccaccgaccucaagcaguucaagcaggacgccaaguacucccacggcaucgacgucaccgaccucuucuccgcccagcccggccucaccuccgccgucaucgaggcccucccccgcaacaugguccucaccugccagggcuccgacgacaucaagcgccuccucgacucccagggccgccgcgacaucaagcucaucgacaucucccucuccaaggucgacucccgccgcuucgagaacgccgucugggaccagugcaaggaccucugccacaugcacaccggcgucgucgucgagaagaagaagcgcggcggcaaggaggagaucaccccccacugcgcccucauggacugcaucauguacgacgccgccgucuccggcggccucaacauccccguccuccgcgccguccucccccgcgacauggucuuccgcaccuccucccccaaggucguccucuga

SEQ ID NO: 8360 - RNA, 1710 nt, Artificial Sequence
  derived and/or modified CDS sequence (opt2) from LASV(Lassa virus/H.sapiens-wt/NGA/2016/ISTH_0146;Clade II)__AVO03634__NP
auguccgccuccaaggaggucaaguccuuccucuggacccagucccuccgccgcgagcucuccggcuacugcuccaacaucaagcuccaggucgucaaggacgcccaggcccuccuccacggccucgacuucuccgaggucuccaacguccagcgccucaugcgcaagcagaagcgcgacgacuccgaccucaagcgccuccgcgaccucaaccaggccgucaacaaccucgucgagcucaaguccacccagcagaaguccauccuccgcgucggcacccucaccuccgacgaccuccucacccucgccgccgaccucgagaagcucaaguccaaggucauccgcaccgagcgcccccucuccuccggcgucuacaugggcaaccucuccgcccagcagcucgagcagcgccgcgcccuccucaacaugaucggcauggccggcggcgcccaguccacccagcccggccgcgacggcgucguccgcgucugggacgucaagaaccccgaccuccucaacaaccaguucggcaccaugcccucccucacccucgccugccucaccaagcagggccaggucgaccucaacgacgccguccucgcccucaccgaccucggccucaucuacaccgccaaguaccccaacuccuccgaccucgaccgccucucccagucccaccccauccucaacauggucgacaccaagaaguccucccucaacaucuccggcuacaacuucucccucggcgccgccgucaaggccggcgccugcaugcucgacggcggcaacaugcucgagaccaucaagaucaccccccagaccauggacggcauccucaaguccauccucaaggucaagcgcucccucggcauguucgucuccgacacccccggcgagcgcaaccccuacgagaacauccucuacaagaucugccucuccggcgacggcuggcccuacaucgccucccgcaccuccaucgucggccgcgccugggagaacaccaccgucgaccucgaguccgacggcaagccccagaaggucggcaccaucggcuccaacaagucccuccaguccgccggcuuccccaccggccucaccuacucccagcucaugacccucaaggacuccaugaugcagcucgaccccuccgccaagaccuggaucgacaucgagggccgccccgaggaccccgucgagaucgcccucuaccagcccauguccggcugcuacauccacuucuuccgcgagcccaccgaccucaagcaguucaagcaggacgccaaguacucccacggcaucgacgucgccgaccucuuccccgcccagcccggccucaccuccgccgucaucgaggcccucccccgcaacaugguccucaccugccagggcuccgacgacaucaagcgccuccucgacucccagggccgccgcgacaucaagcucaucgacaucgcccucuccaaggccgacucccgccgcuucgagaacgccgucugggaccagugcaaggaccucugccacaugcacaccggcgucgucgucgagaagaagaagcgcggcggcaaggaggagaucaccccccacugcgcccucauggacugcaucauguacgacgccgccgucuccggcggccucaacauccccguccuccgcgccguccucccccgcgacauggucuuccgcaccuccucccccaaggucguccucuga

SEQ ID NO: 8361 - RNA, 1710 nt, Artificial Sequence
  derived and/or modified CDS sequence (opt2) from LASV(Lassa virus/H.sapiens-wt/NGA/2016/ISTH_0187;Clade II)__AVO03550__NP
auguccgucuccaaggaggucaaguccuuccucuggacccagucccuccgccgcgagcucuccggcuacugcuccaacaucaagcuccaggucgucaaggacgcccaggcccuccuccacggccucgacuucuccgaggucuccaacguccagcgccucaugcgcaagcagcgccgcgacgacggcgaccucaagcgccuccgcgaccucaaccaggccgucaacaaccucgucgagcucaaguccacccagcagaaguccguccuccgcgucggcacccucuccuccgacgaccuccucguccucgccgccgaccucgagaagcucaaguccaaggucauccgcaccgagcgcccccucuccuccggcgucuacaugggcaaccucuccucccagcagcucgaccagcgccgcgcccuccucaacaugaucggcaugaccggcggcaaccgcggcggcuccgccuccuccgacggcaucguccgcgucugggacgucaagaacgccgagcuccucaacaaccaguucggcaccaugcccucccucacccucgccugccucaccaagcagggccaggucgaccucaacgacgccguccaggcccucaccgaccucggccucaucuacaccgccaaguaccccaacuccuccgaccucgaccgccucgcccagucccaccccauccucaacaugaucgacaccaagaaguccucccucaacaucuccggcuacaacuucucccucggcgccgccgucaaggccggcgccugcaugcucgacggcggcaacaugcucgagaccaucaaggucuccccccagaccaucgacggcauccucaagaccauccucaaggucaagaagucccucggcauguucaucuccgacguccccggcgagcgcaaccccuacgagaacauccucuacaagaucugccucuccggcgacggcuggcccuacaucgccucccgcaccuccaucgucggccgcgccugggagaacaccgucgucgaccucgaguccgacaacaagccccagaagaccggcaacggcggcuccaacaagucccuccaguccgccggcuucgccgccggccucaccuacucccagcucaugacccucaaggacuccaugcuccagcucgaccccaacuccaagaccuggauggacaucgagggccgccccgaggaccccgucgagaucgcccucuaccagcccuccuccggcugcuacauccacuucuuccgcgagcccaccgaccucaagcaguucaagcaggacgccaaguacucccacggcaucgacgucaccgaccucuucgccgcccagcccggccucaccuccgccgucaucgaggcccucccccgcaacauggucaucaccugccagggcuccgaggacauccgcaagcuccucgagucccagggccgccgcgacaucaagcucaucgacaucucccucaacaaggccgacucccgcaaguucgagaacgccgucugggaccaguucaaggaccucugccacaugcacaccggcgucgucgucgagaagaagaagcgcggcggcaaggaggagaucaccccccacugcgcccucauggacugcaucauguucgacgccgccgucuccggcggccucgacaccaagguccuccgcgccguccucccccgcgacauggucuuccgcaccuccacccccaaggucguccucuga

SEQ ID NO: 8362 - RNA, 1710 nt, Artificial Sequence
  derived and/or modified CDS sequence (opt2) from LASV(Lassa virus/H.sapiens-wt/NGA/2016/ISTH_0419;Clade II)__AVO03540__NP
auguccgccuccaaggaggucaaguccuuccucuggacccagucccuccgccgcgagcucuccggcuacugcuccaacaucaagcuccaggucgucaaggacgcccaggcccuccuccacggccucgacuucuccgaggucuccaacguccagcgccucaugcgcaagcagaagcgcgacgacggcgaccucaagcgccuccgcgaccucaaccaggccgucaacaaccucgucgagcucaaguccacccagcagaaguccguccuccgcgucggcacccucuccuccgacgaccuccucacccucgccgccgaccucgagaagcucaaguccaaggucauccgcaccgagcgcccccucuccuccggcgucuacaugggcaaccucuccucccagcagcucgaccagcgccgcgcccuccucaacaugaucggcaugaccggcggcggccagggcgccuccgccggccgcgacggcaucguccgcgucugggacgucaagaacgccgagcuccucaacaaccaguucggcaccaugcccucccucacccucgccugccucaccaagcagggccaggucgaccucaacgacgccguccaggcccucaccgaccucggccucaucuacaccgccaaguaccccaacuccuccgaccucgaccgccucucccagucccaccccauccucaacaugaucgacaccaagaaguccucccucaacaucuccggcuacaacuucucccucggcgccgccgucaaggccggcgccugcaugcucgacggcggcaacaugcucgagaccauccgcgucuccccccagaccauggacggcauccucaaguccauccucaaggucaagcgcucccucggcauguucgucuccgacauccccggcgagcgcaaccccuacgagaacauccucuacaagaucugccucuccggcgacggcuggcccuacaucgccucccgcaccuccaucaccggccgcgccugggagaacaccaucgucgaccucgaguccgacucccgcccccagaagcccggcaacuccggcuccaaccgcucccuccaguccgccggcuuccccgccggccucaccuacucccagcucaugacccucaaggacuccaugcuccagcucgaccccaacgccaagaccuggauggacaucgagggccgccccgacgaccccgucgagaucgcccucuaccagcccuccuccggcugcuacauccacuucuuccgcgagcccaccgaccucaagcaguucaagcaggacgccaaguacucccacggcaucgacgucggcgaccucuucaccgcccagcccggccucaccuccgccguccucgaggcccucccccgcaacauggucaucaccugccagggcuccgaggacaucaagaagcuccucgagucccagggccgcaaggacaucaagcucgucgacaucuccauguccaagcccgacucccgcaaguucgagaacgccgucugggaccaguacaaggaccucugccacaugcacaccggcaucgucgucgagaagaagaagcgcggcggcaaggaggagaucaccccccacugcgcccucauggacugcaucauguucgacgccgccgucgucggcggccucgacgccaagauccuccgcgccguccucccccgcgacauggucuuccgcaccuccacccccaaggucguccucuga

SEQ ID NO: 8363 - RNA, 1710 nt, Artificial Sequence
  derived and/or modified CDS sequence (opt2) from LASV(Lassa virus/H.sapiens-wt/NGA/2016/ISTH_0447;Clade II)__AVO03560__NP
auguccgccuccaaggagguccgcuccuuccucuggacccagucccuccgccgcgagcucuccggcuacugcuccuccaucaagcuccaggucgucaaggacgcccaggcccuccuccacggccucgacuucuccgaggucuccaacguccagcgccucaugcgcaagcagaagcgcgacgacuccgaccucaagcgccuccgcgaccucaaccaggccgucaacaaccucgucgagcucaaguccacccagcagaaguccauccuccgcgucggcacccucaccuccgacgaccuccucacccucgccgccgaccucgagaagcucaaguccaaggucauccgcaccgagcgcccccucuccuccggcgucuacaugggcaaccucuccucccagcagcucgagcagcgccgcgcccuccucaacaugaucggcauggucggcggcgcccagggcacccagcccggccgcgacggcgucguccgcgucugggacgucaagaaccccgaccuccucaacaaccaguucggcaccaugcccucccucacccucgccugccucaccaagcagggccaggucgaccucaacgacgccguccucgcccucaccgaccucggccucaucuacaccgccaaguaccccaacuccuccgaccucgaccgccucucccagucccaccccauccucaacauggucgacaccaagaaguccucccucaacaucuccggcuacaacuucucccucggcgccgccgucaaggccggcgccugcaugcucgacggcggcaacaugcucgagaccaucaaggucaccccccagaccauggacggcauccucaaguccauccucaaggucaagcgcucccucggcauguucgucuccgacacccccggcgagcgcaaccccuacgagaacauccucuacaagaucugccucuccggcgacggcuggcccuacaucgccucccgcaccuccaucgucggccgcgccugggagaacaccaccgucgaccucgaguccgacggcaagccccagaaggucggcgccgccggcuccaccaagucccuccaguccgccggcuuccccaccggccucaccuacucccagcucaugacccucaaggacuccaugaugcagcucgaccccuccgccaagaccuggaucgacaucgagggccgccccgaggaccccgucgagaucgcccucuaccagcccauguccggcugcuacauccacuucuuccgcgagcccaccgaccucaagcaguucaagcaggacgccaaguacucccacggcaucgacgucgccgaccucuuccccgcccagcccggccucaccuccgccgucaucgaggcccucccccgcaacaugguccucaccugccagggcuccgacgacaucaagcgccuccucgacucccagggccgccgcgacaucaagcucaucgacaucgcccucuccaaggucgacucccgccgcuucgagaacgccgucugggaccagugcaaggaccucugccacaugcacaccggcgucgucgucgagaagaagaagcgcggcggcaaggaggagaucaccccccacugcgcccucauggacugcaucauguacgacgccgccgucuccggcggccucaacauccccguccuccgcgccguccucccccgcgacauggucuuccgcaccuccucccccaaggucguccucuga

SEQ ID NO: 8364 - RNA, 1710 nt, Artificial Sequence
  derived and/or modified CDS sequence (opt2) from LASV(Lassa virus/H.sapiens-wt/NGA/2016/ISTH_0543;Clade II)__AVO03596__NP
auguccgccuccaaggaggucaaguccuuccucuggacccagucccuccgccgcgagcucuccggcuacugcuccaacaucaagcuccaggucgucaaggacgcccaggcccuccuccacggccucgacuucuccgaggucuccaacguccagcgccucaugcgcaagcagaagcgcgacgacggcgaccucaagcgccuccgcgaccucaaccaggccgucaacaaccucgucgagcucaaguccacccagcagaaguccguccuccgcgucggcacccucaccuccgacgaccuccucauccucgccgccgaccucgagaagcucaaguccaaggucauccgcaccgagcgcccccucuccuccggcgucuacaugggcaaccucuccacccagcagcucgagcagcgcaaggcccuccucuccaugaucggcauggucggcggcgcccagggcacccagcccggccgcgacggcgucguccgcgucugggacgucaagaaccccgaccuccucaacaaccaguucggcaccaugcccucccucacccucgccugccucaccaagcagggccaggucgaccucaacgacgccguccucgcccucaccgaccucggccucaucuacaccgccaaguaccccaacuccuccgaccucgaccgccucucccagucccaccccauccucaacauggucgacaccaagaaguccucccucaacaucuccggcuacaacuucucccucggcgccgccgucaaggccggcgccugcaugcucgacggcggcaacaugcucgagaccaucaaggucaccccccagaccauggacggcauccucaaguccauccucaaggucaagcgcucccucggcauguucgucuccgacacccccggcgagcgcaaccccuacgagaacauccucuacaagaucugccucuccggcgacggcuggcccuacaucgccucccgcaccuccaucgucggccgcgccugggagaacaccaccgucgaccucgaguccgacggcaagccccagaaggucggcaccgccggcuccaacaagucccuccaguccgccggcuuccccaccggccucaccuacucccagcucaugacccucaaggacuccaugaugcagcucgaccccuccgccaagaccuggaucgacaucgagggccgccccgaggaccccgucgagaucgcccucuaccagcccauguccggcugcuacauccacuucuuccgcgagcccaccgaccucaagcaguucaagcaggacgccaaguacucccacggcaucgacgucaccgaccucuucuccgcccagcccggccucaccuccgccgucaucgaggcccucccccgcaacaugguccucaccugccagggcuccgacgacaucaagaagcuccucgacucccagggccgccgcgacaucaagcucaucgacaucucccucuccaaggccgacucccgccgcuucgagaacgccgucugggaccagugcaaggaccucugccacaugcacaccggcgucgucgucgagaagaagaagcgcggcggcaaggaggagaucaccccccacugcgcccucauggacugcaucauguucgacgccgccgucuccggcggccucaacauccccauccuccgcgccguccucccccgcgacauggucuuccgcaccuccucccccaaggucguccucuga

SEQ ID NO: 8365 - RNA, 1710 nt, Artificial Sequence
  derived and/or modified CDS sequence (opt2) from LASV(Lassa virus/H.sapiens-wt/NGA/2016/ISTH_0565;Clade II)__AVO03638__NP
auguccgccuccaaggaggucaaguccuuccucuggacccagucccuccgccgcgagcucuccggcuacugcuccaacaucaagcuccaggucgucaaggacgcccaggcccuccuccacggccucgacuucuccgaggucuccaacguccagcgccucaugcgcaagcagaagcgcgacgacggcgaccucaagcgccuccgcgaccucaaccaggccgucaacaaccucgucgagcucaaguccacccagcagaaguccguccuccgcgucggcacccucaccuccgacgaccuccucacccucgccgccgaccucgagaagcucaaguccaaggucauccgcaccgagcgcccccucuccuccggcgucuacaugggcaaccucuccacccagcagcucgagcagcgcaaggcccuccucuccaugaucggcauggucggcggcgcccagggcacccagcccggccgcgacggcgucguccgcgucugggacgucaagaaccccgaccuccucaacaaccaguucggcaccaugcccucccucacccucgccugccucaccaagcagggccaggucgaccucaacgacgccguccucgcccucaccgaccucggccucaucuacaccgccaaguaccccaacuccuccgaccucgaccgccucucccagucccaccccauccucaacauggucgacaccaagaaguccucccucaacaucuccggcuacaacuucucccucggcgccgccgucaaggccggcgccugcaugcucgacggcggcaacaugcucgagaccaucaaggucaccccccagaccauggacggcauccucaaguccauccucaaggucaagcgcucccucggcauguucgucuccgacacccccggcgagcgcaaccccuacgagaacauccucuacaagaucugccucuccggcgacggcuggcccuacaucgccucccgcaccuccaucgucggccgcgccugggagaacaccaccgucgaccucgaguccgacggcaagccccagaaggucggcaccgccggcuccaacaagucccuccaguccgccggcuuccccaccggccucaccuacucccagcucaugacccucaaggacuccaugaugcagcucgaccccuccgccaagaccuggaucgacaucgagggccgccccgaggaccccgucgagaucgcccucuaccagcccauguccggcugcuacauccacuucuuccgcgagcccaccgaccucaagcaguucaagcaggacgccaaguacucccacggcaucgacgucaccgaccucuucuccgcccagcccggccucaccuccgccgucaucgaggcccucccccgcaacaugguccucaccugccagggcuccgacgacaucaagaagcuccucgacucccagggccgccgcgacaucaagcucaucgacaucucccucuccaaggccgacucccgccgcuucgagaacgccgucugggaccagugcaaggaccucugccacaugcacaccggcgucgucgucgagaagaagaagcgcggcggcaaggaggagaucaccccccacugcgcccucauggacugcaucauguucgacgccgccgucuccggcggccucaacauccccauccuccgcgccguccucccccgcgacauggucuuccgcaccuccucccccaaggucguccucuga

SEQ ID NO: 8366 - RNA, 1710 nt, Artificial Sequence
  derived and/or modified CDS sequence (opt2) from LASV(Lassa virus/H.sapiens-wt/NGA/2016/ISTH_0610;Clade II)__AVO03586__NP
auguccgccuccaaggaggucaaguccuuccucuggacccagucccuccgccgcgagcucuccggcuacugcuccaacaucaagcuccaggucgucaaggacgcccaggcccuccuccacggccucgacuucuccgaggucuccaacguccagcgccucaugcgcaagcagaagcgcgacgacuccgaccucaagcgccuccgcgaccucaaccaggccgucaacaaccucgucgagcucaaguccacccagcagaaguccguccuccgcgucggcacccucaccuccgacgaccuccucacccucgccgccgaccucgagaagcucaaguccaaggucauccgcaccgagcgcccccucuccuccggcgucuacaugggcaaccucuccgcccagcagcucgagcagcgccgcgcccuccucaacaugaucggcauggucggcggcgcccagggcacccagcccggccgcgacggcgucguccgcgucugggacgucaagaaccccgaccuccucaacaaccaguucggcaccaugcccucccucacccucgccugccucaccaagcagggccaggucgaccucaacgacgucguccucgcccucaccgaccucggccucaucuacaccgccaaguaccccaacuccuccgaccucgaccgccucucccagucccaccccauccucaacauggucgacaccaagaaguccucccucaacaucuccggcuacaacuucucccucggcgccgccgucaaggccggcgccugcaugcucgacggcggcaacaugcucgagaccaucaaggucaccccccagaccauggacggcauccucaaguccauccucaaggucaagaagucccucggcauguucgucuccgacacccccggcgagcgcaaccccuacgagaacauccucuacaagaucugccucuccggcgacggcuggcccuacaucgccucccgcaccuccaucaugggccgcgccugggagaacaccaccgucgaccucgaguccgacggcaagccccagaaggucggcaccgccggcuccaacaagucccuccaguccgccggcuuccccaccggccucaccuacucccagcucaugacccucaaggacuccaugaugcagcucgaccccuccgccaagaccuggaucgacaucgagggccgccccgaggaccccgucgagaucgcccucuaccagcccauguccggcugcuacauccacuucuuccgcgagcccaccgaccucaagcaguucaagcaggacgccaaguacucccacggcaucgacgucaccgaccucuucuccgcccagcccggccucaccuccgccgucaucgaggcccucccccgcaacaugguccucaccugccagggcuccgacgacaucaagcgccuccucgacucccagggccgccgcgacaucaagcucaucgacaucgcccucuccaaggccgacucccgccgcuucgagaacgccgucugggaccagugcaaggaccucugccacaugcacaccggcgucgucgucgagaagaagaagcgcggcggcaaggaggagaucaccccccacugcgcccucauggacugcaucauguacgacgccgccgucuccggcggccucaacauccccguccuccgcgccguccucccccgcgacauggucuuccgcaccuccucccccaaggucguccucuga

SEQ ID NO: 8367 - RNA, 1710 nt, Artificial Sequence
  derived and/or modified CDS sequence (opt2) from LASV(Lassa virus/H.sapiens-wt/NGA/2016/ISTH_0621;Clade II)__AVO03544__NP
auguccgccuccaaggaggucaaguccuuccucuggacccagucccuccgccgcgagcucuccggcuacugcuccaacaucaagcuccaggucgucaaggacgcccaggcccuccuccacggccucgacuucuccgaggucuccaacguccagcgccucaugcgcaagcagaagcgcgacgacggcgaccucaagcgccuccgcgaccucaaccaggccgucaacaaccucgucgagcucaaguccacccagcagaaguccguccuccgcgucggcacccucuccuccgacgaccuccucauccucgccgccgaccucgagaagcucaaguccaaggucauccgcaccgagcgcccccucuccuccggcgucuacaugggcaaccucuccucccagcagcucgaccagcgccgcgcccuccucaacaugaucggcaugaccggcggcucccagggcaccaacaccggccgcgacggcaucguccgcaucugggacgucaagaacgccgagcuccucaacaaccaguucggcaccaugcccucccucacccucgccugccucaccaagcagggccaggucgaccucaacgacgccguccaggcccucaccgaccucggccucaucuacaccgccaaguaccccaacuccuccgaccucgaccgccucucccagucccaccccauccucaacaugaucgacaccaagaaguccucccucaacaucuccggcuacaacuucucccucggcgccgccgucaaggccggcgccugcaugcucgacggcggcaacaugcucgagaccaucaaggucuccccccagaccauggacggcauccucaaguccauccucaaggucaagaagucccucggcauguucgucuccgacacccccggcgagcgcaaccccuacgagaacauccucuacaagaucugccucuccggcgacggcuggcccuacaucgccucccgcaccuccaucaccggccgcgccugggagaacaccaucgucgaccucgagaccgacaacaagucccagaagcccggcaacuccggcuccaaccgcucccuccaguccgccggcuuccccgccggccucaccuacucccagcucaugacccucaaggacuccaugcuccagcucgaccccaacgccaagaccuggauggacaucgagggccgccccgacgaccccgucgagaucgcccucuaccagcccuccuccggcugcuacauccacuucuuccgcgagcccaccgaccucaagcaguucaagcaggacgccaaguacucccacggcaucgacgucuccgaccucuucgccgcccagcccggccucaccuccgccgucaucgaggcccucccccgcaacauggucaucaccugccagggcuccgaggacauccgcaagcuccucgagucccagggccgccgcgacaucaagcucgucgacaucucccucuccaaguccgacucccgcaaguucgagaacgucgucugggaccaguucaaggaccucugccacaugcacaccggcgucgucgucgagaagaagaagaagggcggcaaggaggagaucaccccccacugcgcccucauggacugcaucauguucgacgccgccgucaugggcggccucgacgcccgcguccuccgcgccguccucccccgcgacauggucuuccgcaccuccacccccaaggucguccucuga

SEQ ID NO: 8368 - RNA, 1710 nt, Artificial Sequence
  derived and/or modified CDS sequence (opt2) from LASV(Lassa virus/H.sapiens-wt/NGA/2016/ISTH_0701;Clade II)__AVO03630__NP
auguccgccuccaaggaggucaaguccuuccucuggacccagucccuccgccgcgagcucuccggcuacugcuccaacaucaagcuccaggucgucaaggacgcccaggcccuccuccacggccucgacuucuccgaggucuccaacguccagcgccucaugcgcaagcagaagcgcgacgacuccgaccucaagcgccuccgcgaccucaaccaggccgucaacaaccucgucgagcucaaguccacccagcagaaguccauccuccgcgucggcacccucaccuccgacgaccuccucauccucgccgccgaccucgagaagcucaaguccaaggucauccgcaccgagcgcccccucuccuccggcgucuacaugggcaaccucuccacccagcagcucgagcagcgccgcgcccuccucaaccucaucggcauggucggcggcgcccagggcacccagcccggccgcgacggcgucguccgcgucugggacgucaagaaccccgaccuccucaacaaccaguucggcaccaugcccucccucacccucgccugccucaccaagcagggccaggucgaccucaacgacgccguccucgcccucaccgaccucggccucaucuacaccgccaaguaccccaacuccuccgaccucgaccgccucucccagucccaccccauccucaacauggucgacaccaagaaguccucccucaacaucuccggcuucaacuucucccucggcgccgccgucaaggccggcgccugcaugcucgacggcggcaacaugcucgagaccaucaaggucaccccccagaccauggacggcauccucaaguccauccucaaggucaagcgcucccucggcauguucgucuccgacacccccggcgagcgcaaccccuacgagaacauccucuacaagaucugccucuccggcgacggcuggcccuacaucgccucccgcaccuccaucgucggccgcgccugggagaacaccaccgucgaccucgaguccgacggcaagccccacaaggucggcaccgccggcuccaacaagucccuccaguccgccggcuuccccaccggccucaccuacucccagcucaugacccucaaggacuccaugaugcagcucgaccccuccgccaagaccuggaucgacaucgagggccgccccgaggaccccgucgagaucgcccucuaccagcccauguccggcugcuacauccacuucuuccgcgagcccaccgaccucaagcaguucaagcaggacgccaaguacucccacggcaucgacgucgccgaccucuuccccgcccagcccggccucaccuccgccgucaucgaggcccucccccgcaacaugguccucaccugccagggcuccgacgacaucaagcgccuccucgacucccagggccgccgcgacaucaagcucaucgacaucgcccucuccaaggccgacucccgccgcuucgagaacgccgucugggaccagugcaaggaccucugccacaugcacaccggcgucgucgucgagaagaagaagcgcggcggcaaggaggagaucaccccccacugcgcccucauggacugcaucauguacgacgccgccgucuccggcggccucaacauccccguccuccgcgccguccucccccgcgacauggucuuccgcaccuccucccccaaggucguccucuga

SEQ ID NO: 8369 - RNA, 1710 nt, Artificial Sequence
  derived and/or modified CDS sequence (opt2) from LASV(Lassa virus/H.sapiens-wt/NGA/2016/ISTH_0702;Clade II)__AVO03558__NP
auguccgccuccaaggaggucaaguccuuccucuggacccagucccuccgccgcgagcucuccggcuacugcuccaacaucaagcuccaggucgucaaggacgcccaggcccuccuccacggccucgacuucuccgaggucuccaacguccagcgccucaugcgcaagcagaagcgcgacgacuccgaccucaagcgccuccgcgaccucaaccaggccgucaacaaccucgucgagcucaaguccacccagcagaaguccauccuccgcgucggcacccucaccuccgacgaccuccucacccucgccgccgaccucgagaagcucaaguccaaggucauccgcaccgagcgcccccucuccuccggcgucuacaugggcaaccucuccacccagcagcucgagcagcgccgcgcccuccucuccaugaucggcauggucggcggcacccagggcacccagcccggccgcgacggcgucguccgcgucugggacgucaagaaccccgaccuccucaacaaccaguucggcaccaugcccucccucacccucgccugccucaccaagcagggccaggucgaccucaacgacgccguccucgcccucaccgaccucggccucaucuacaccgccaaguaccccaacuccuccgaccucgaccgccucucccagucccaccccauccucaacauggucgacaccaagaaguccucccucaacaucuccggcuacaacuucucccucggcgccgccgucaaggccggcgccugcaugcucgacggcggcaacaugcucgagaccaucaaggucaccccccagaccauggacggcauccucaaguccauccucaaggucaagaagucccucggcauguucgucuccgacacccccggcgagcgcaaccccuacgagaacauccucuacaagaucugccucuccggcgacggcuggcccuacaucgccucccgcaccuccaucgucggccgcgccugggagaacaccaccgucgaccucgaguccgacggcaagccccagaaggucggcaccgccggcuccaacaagucccuccaguccgccggcuuccccaccggccucaccuacucccagcucaugacccucaaggacuccaugaugcagcucgaccccuccgccaagaccuggaucgacaucgagggccgccccgaggaccccgucgagaucgcccucuaccagcccauguccggcugcuacauccacuucuuccgcgagcccaccgaccucaagcaguucaagcaggacgccaaguacucccacggcaucgacgucgccgaccucuuccccgcccagcccggccucaccuccgccgucaucgaggcccucccccgcaacaugguccucaccugccagggcuccgacgacaucaagcgccuccucgacucccagggccgccgcgacaucaagcucaucgacaucucccucuccaaggccgacucccgccgcuucgagaacgccgucugggaccagugcaaggaccucugccacaugcacaccggcgucgucgucgagaagaagaagcgcggcggcaaggaggagaucaccccccacugcgcccucauggacugcaucauguacgacgccgccgucuccggcggccucaacauccccguccuccgcgccguccucccccgcgacauggucuuccgcaccuccucccccaaggucguccucuga

SEQ ID NO: 8370 - RNA, 1710 nt, Artificial Sequence
  derived and/or modified CDS sequence (opt2) from LASV(Lassa virus/H.sapiens-wt/NGA/2016/ISTH_0717;Clade II)__AVO03548__NP
auguccgucuccaaggaggucaaguccuuccucuggacccagucccuccgccgcgagcucuccggcuacugcuccaacaucaagguccaggucgucaaggacgcccaggcccuccuccacggccucgacuucuccgaggucuccaacguccagcgccucaugcgcaagcagaagcgcgacgacggcgaccucaagcgccuccgcgaccucaaccaggccgucaacaaccucgucgagcucaaguccacccagcagaaguccguccuccgcgucggcacccucuccuccgacgaccuccucguccucgccgccgaccucgagaagcucaaguccaaggucauccgcaccgagcgcccccucuccuccggcaucuacaugggcaaccucuccucccagcagcucgaccagcgcaaggcccuccucaacaugaucggcaugaccggcggcaacgucggccgcaacaccaccggcgacggcgucguccgcgucugggacgucaagaacgccgagcuccucaacaaccaguucggcaccaugcccucccucacccucgccugccucaccaagcagggccaggucgaccucaacgacgccguccucgcccucaccgaccucggccucaucuacaccgccaaguaccccaacuccuccgaccucgaccgccucgcccagucccaccccauccucuccaugaucgacaccaagaaguccucccucaacaucuccggcuacaacuucucccucggcgccgccgucaaggccggcgccugcaugcucgacggcggcaacaugcucgagaccaucaaggucuccccccagaccaucgacggcauccucaaguccauccucaaggucaagcgcucccucggcauguucaucuccgacacccccggcgagcgcaaccccuacgagaacauccucuacaagaucugccucuccggcgacggcuggcccuacaucgccucccgcaccuccaucgucggccgcgccugggagaacaccgucgucgaccucgaguccgacaacaagccccagaagaccggcaacggcggcuccaacaagucccuccaguccgccggcuucgccgccggccucaccuacucccagcucaugacccucaaggacuccaugcuccagcucgaccccaacgccaagaccuggauggacaucgagggccgccccgaggaccccgucgagaucgcccucuaccagcccuccuccggcugcuacauccacuucuuccgcgagcccaccgaccucaagcaguucaagcaggacgccaaguacucccacggcaucgacgucaccgaccucuucgccgcccagcccggccucaccuccgccgucaucgaggcccucccccgcaacauggucaucaccugccagggcuccgaggacauccgcaagcuccucgagucccagggccgccgcgacaucaagcucaucgacaucucccucuccaaggucgacucccgcaaguucgagaacgccgucugggaccaguucaaggaccucugccacaugcacaccggcaucgucgucgagaagaagaagcgcggcggcaaggaggagaucaccccccacugcgcccucauggacugcaucauguucgacgccgccgucuccggcggcgucgacgccaagguccuccgcgccguccucccccgcgacauggucuuccgcaccuccacccccaaggucguccucuga

SEQ ID NO: 8371 - RNA, 1710 nt, Artificial Sequence
  derived and/or modified CDS sequence (opt2) from LASV(Lassa virus/H.sapiens-wt/NGA/2016/ISTH_0753;Clade II)__AVO03610__NP
auguccgccuccaaggaggucaaguccuuccucuggacccagucccuccgccgcgagcucuccggcuacugcuccuccaucaagcuccaggucgucaaggacgcccaggcccuccuccacggccucgacuucuccgaggucuccaacguccagcgccucaugcgcaagcagaagcgcgacgacuccgaccucaagcgccuccgcgaccucaaccaggccgucaacaaccucgucgagcucaaguccacccagcagaaguccauccuccgcgucggcacccucaccuccgacgaccuccucacccucgccgccgaccucgagaagcucaaguccaaggucauccgcaccgagcgcccccucuccuccggcgucuacaugggcaaccucuccacccagcagcucgagcagcgccgcgcccuccucaacaugaucggcauggucggcggcgcccagggcacccagcccggccgcgacggcgucguccgcgucugggacgucaagaaccccgaccuccucaacaaccaguucggcaccaugcccucccucacccucgccugccucaccaagcagggccaggucgaccucaacgacgccguccucgcccucaccgaccucggccucaucuacaccgccaaguaccccaacuccuccgaccucgaccgccucucccagucccaccccauccucaacauggucgacaccaagaaguccucccucaacaucuccggcuacaacuucucccucggcgccgccgucaaggccggcgccugcaugcucgacggcggcaacaugcucgagaccaucaaggucaccccccagaccauggacggcauccucaaguccguccucaaggucaagcgcucccucggcauguucgucuccgacacccccggcgagcgcaaccccuacgagaacauccucuacaagaucugccucuccggcgacggcuggcccuacaucgccucccgcaccuccaucgucggccgcgccugggagaacaccaccgucgaccucgaguccgacggcaagccccagaaggucggcgccgccggcuccaacaagucccuccaguccgccggcuuccccaccggccucaccuacucccagcucaugacccucaaggacuccaugaugcagcucgaccccuccgccaagaccuggaucgacaucgagggccgccccgaggaccccgucgagaucgcccucuaccagcccauguccggcugcuacauccacuucuuccgcgagcccaccgaccucaagcaguucaagcaggacgccaaguacucccacggcaucgacgucgccgaccucuuccccgcccagcccggccucaccuccgccgucaucgaggcccucccccgcaacaugguccucaccugccagggcuccgacgacaucaagcgccuccucgacucccagggccgccgcgacaucaagcucaucgacaucgcccucuccaaggccgacucccgccgcuucgagaacgccgucugggaccagugcaaggaccucugccacaugcacaccggcgucgucgucgagaagaagaagcgcggcggcaaggaggagaucaccccccacugcgcccucauggacugcaucauguacgacgccgccgucuccggcggccucaacauccccguccuccgcgccguccucccccgcgacauggucuuccgcaccuccucccccaaggucguccucuga

SEQ ID NO: 8372 - RNA, 1710 nt, Artificial Sequence
  derived and/or modified CDS sequence (opt2) from LASV(Lassa virus/H.sapiens-wt/NGA/2016/ISTH_0759;Clade II)__AVO03594__NP
auguccgccuccaaggaggucaaguccuuccucuggacccagucccuccgccgcgagcucuccggcuacugcuccuccaucaagcuccaggucgucaaggacgcccaggcccuccuccacggccucgacuucuccgaggucuccaacguccagcgccucaugcgcaagcagaagcgcgacgacuccgaccucaagcgccuccgcgaccucaaccaggccgucaacaaccucgucgagcucaaguccacccagcagaaguccauccuccgcgucggcacccucaccuccgacgaccuccucacccucgccgccgaccucgagaagcucaaguccaaggucacccgcaccgagcgcccccucuccuccggcgucuacaugggcaaccucuccacccagcagcucgagcagcgccgcgcccuccucaacaugaucggcauggucggcggcgcccagggcacccagcccggccgcgacggcgucguccgcgucugggacgucaagaaccccgaccuccucaacaaccaguucggcaccaugcccucccucacccucgccugccucaccaagcagggccaggucgaccucaacgacgccguccucgcccucaccgaccucggccucaucuacaccgccaaguaccccaacuccuccgaccucgaccgccucucccagucccaccccauccucaacauggucgacaccaagaaguccucccucaacaucuccggcuacaacuucucccucggcgccgccgucaaggccggcgccugcaugcucgacggcggcaacaugcucgagaccaucaaggucaccccccagaccauggacggcauccucaaguccauccucaaggucaagcgcucccucggcauguucgucuccgacgcccccggcgagcgcaaccccuacgagaacauccucuacaagaucugccucuccggcgacggcuggcccuacaucgccucccgcaccuccaucgucggccgcgccugggagaacaccaccgucgaccucgaguccgacggcaagccccagaaggucggcaccgccggcuccaacaagucccuccaguccgccggcuuccccaccggccucaccuacucccagcucaugacccucaaggacuccaugaugcagcucgaccccuccgccaagaccuggaucgacaucgagggccgccccgaggaccccgucgagaucgcccucuaccagcccauguccggcugcuacauccacuucuuccgcgagcccaccgaccucaagcaguucaagcaggacgccaaguacucccacggcaucgacgucgccgaccucuuccccgcccagcccggccucaccuccgccgucaucgaggcccucccccgcaacaugguccucaccugccagggcuccgacgacaucaagaagcuccucgacucccagggccgccgcgacaucaagcucaucgacaucgcccucucccgcgccgacucccgccgcuucgagaacgccgucugggaccagugcaaggaccucugccacaugcacaccggcgucgucgucgagaagaagaagcgcggcggcaaggaggagaucaccccccacugcgcccucauggacugcaucauguacgacgccgccgucuccggcggccucaacauccccguccuccgcgccguccucccccgcgacauggucuuccgcaccuccucccccaaggucguccucuga

SEQ ID NO: 8373 - RNA, 1710 nt, Artificial Sequence
  derived and/or modified CDS sequence (opt2) from LASV(Lassa virus/H.sapiens-wt/NGA/2016/ISTH_0777;Clade II)__AVO03616__NP
auguccgccuccaaggaggucaaguccuuccucuggacccagucccuccgccgcgagcucuccggcuacugcuccaacaucaagcuccaggucgucaaggacgcccaggcccuccuccacggccucgacuucuccgaggucuccaacguccagcgccucaugcgcaagcagaagcgcgacgacggcgaccucaagcgccuccgcgaccucaaccaggccgucaacaaccucgucgagcucaaguccacccagcagaaguccguccuccgcgucggcacccucaccuccgacgaccuccucacccucgccgccgaccucgagaagcucaaguccaaggucauccgcaccgagcgcccccucuccuccggcgucuacaugggcaaccucuccacccagcagcucgagcagcgcaagguccuccucuccaugaucggcauggucggcggcacccagcgcgcccagcccggcaaggacggcgucguccgcgucugggacgucaagaaccccgaccuccucaacaaccaguucggcaccaugcccucccucacccucgccugccucaccaagcagggccaggucgaccucaacgacaccguccucgcccucaccgaccucggccucaucuacaccgccaaguaccccaacuccuccgaccucgaccgccucucccagucccaccccauccucaacauggucgacaccaagaaguccucccucaacaucuccggcuacaacuucucccucggcgccgccgucaaggccggcgccugcaugcucgacggcggcaacaugcucgagaccaucaaggucaccccccagaccauggacggcauccucaaguccauccucaaggucaagcgcucccucggcauguucgucuccgacacccccggcgagcgcaaccccuacgagaacauccucuacaagaucugccucuccggcgacggcuggcccuacaucgccucccgcaccuccaucgucggccgcgccugggagaacaccaccgucgaccucgaguccgacggcaagccccagaaggucggcaccgccggcuccaacaagucccuccaguccgccggcuuccccaccggccucaccuacucccagcucaugacccucaaggacuccaugaugcagcucgaccccuccgccaagaccuggaucgacaucgagggccgccccgaggaccccgucgagaucgcccucuaccagcccgucuccggcugcuacauccacuucuuccgcgagcccaccgaccucaagcaguucaagcaggacgccaaguacucccacggcaucgacgucaccgaccucuucuccgcccagcccggccucaccuccgccgucaucgaggcccucccccgcaacaugguccucaccugccagggcuccgacgacaucaagaagcuccucgacucccagggccgccgcgacaucaagcucaucgacaucucccucuccaaguucgacucccgcaaguucgagaacgccgucugggaccagugcaaggaccucugccacaugcacaccggcgucgucgucgagaagaagaagcgcggcggcaaggaggagaucaccccccacugcgcccucauggacugcaucauguucgacgccgccgucuccggcggccucaacauccccauccuccgcgccguccucccccgcgacauggucuuccgcaccuccucccccaaggucguccucuga

SEQ ID NO: 8374 - RNA, 1707 nt, Artificial Sequence
  derived and/or modified CDS sequence (opt2) from LASV(Lassa virus/H.sapiens-wt/NGA/2016/ISTH_0779;Clade II)__AVO03656__NP
uccgucuccaaggaggucaaguccuuccucuggacccagucccuccgccgcgagcucuccggcuacugcuccaacaucaagcuccaggucgucaaggacgcccaggcccuccuccacggccucgacuucuccgaggucuccaacguccagcgccucaugcgcaagcagaagcgcgacgacaacgaccucaagcgccuccgcgaccucaaccaggccgucaacaaccucgucgagcucaaguccguccagcagaaguccauccuccgcgucggcacccucuccuccgacgaccuccucauccucgccgccgaccucgagaagcucaaguccaaggucauccgcaccgagcgcccccucuccuccggcgucuacaugggcaaccucuccucccagcagcucgagcagcgcaaggcccuccucaacaugaucggcaugaccggcggcucccagggcgcccagcccggccgcgacggcgucguccgcgucugggacgucaagaacuccgaccuccucaacaaccaguucggcaccaugcccucccucacccucgccugccucaccaagcagggccaggucgaccucaacgacgccguccucgcccucaccgaccucggccucaucuacaccgccaaguaccccaacaccuccgaccucgaccgccucucccagucccaccccauccucaacauggucgacaccaagaaguccucccucaacaucuccggcuacaacuucucccucggcgccgccgucaaggccggcgccugcaugcucgacggcggcaacaugcucgagaccaucaaggucaccccccagaccauggacggcauccucaaguccauccucaaggucaagcgcgcccucggcauguucgucuccgacacccccggcgagcgcaaccccuacgagaacauccucuacaagaucugccucuccggcgagggcuggcccuacaucgccucccgcaccuccaucaccggccgcgccugggagaacaccaucgucgaccucgaguccgacuccaagccccagaagaugggcaccaccggcuccaacaagucccuccaguccgccggcuuccccgccggccucaccuacucccagcucaugacccucaaggacuccaugaugcagcucgaccccuccgccaagaccuggaucgacaucgagggccgccccgaggaccccgucgagaucgcccucuaccagcccaucuccggcugcuacauccacuucuuccgcgagcccaccgaccucaagcaguucaagcaggacgccaaguacucccacggcaucgacgucgccgaccucuucuccgcccagcccggccucaccuccgccgucaucgaggcccucccccgcaacaugguccucaccugccagggcuccgacgacaucaagaagcuccucgacucccagggccgccgcgacaucaagcucaucgacaucucccucaacaaggccgacucccgccgcuucgagaacgccgucugggaccagugcaaggaccucugccacaugcacaccggcgucgucgucgagaagaagaagcgcggcggcaaggaggagaucaccccccacugcgcccucauggacugcaucauguucgacgccgccgucuccggcggccucaacauccccauccuccgcgccguccucccccgcgacauggucuuccgcaccuccucccccaaggucguccucuga

SEQ ID NO: 8375 - RNA, 1710 nt, Artificial Sequence
  derived and/or modified CDS sequence (opt2) from LASV(Lassa virus/H.sapiens-wt/NGA/2016/ISTH_0917;Clade II)__AVO03536__NP
auguccgccuccaaggaggucaaguccuuccucuggacccagucccuccgccgcgagcucuccggcuacugcuccaacaucaagcuccaggucgucaaggacgcccaggcccuccuccacggccucgacuucuccgaggucuccaacguccagcgccucaugcgcaagcagaagcgcgacgacuccgaccucaagcgccuccgcgaccucaaccaggccgucaacaaccucgucgagcucaaguccacccagcagaaguccauccuccgcgucggcacccucuccuccgacgaccuccucacccucgccaccgaccucgagaagcucaaguccaaggucauccgcaccgagcgcccccucuccuccggcgucuacaugggcaaccucuccacccagcagcucgaccagcgccgcgcccuccucaacaugaucggcauggucggcggcucccagggcaccuccgccggccgcgacggcaucguccgcgucugggacguccgcaaccccgagcuccucaacaaccaguucggcaccaugcccucccucacccucgccugccucaccaagcagggccaggucgaccucaacgacgccguccaggcccucaccgaccucggccucaucuacaccgccaaguaccccaacuccuccgaccucgaccgccucucccagucccaccccauccucaacaugaucgacaccaagaaguccuccaucaacaucuccggcuacaacuucucccucggcgccgccgucaaggccggcgccugcaugcucgacggcggcaacaugcucgagaccaucaaggucuccccccaguccaucgacggcauccucaaguccauccucaaggucaagcgcacccucggcauguucgucuccgacacccccggcgagcgcaaccccuacgagaacauccucuacaagaucugccucuccggcgacggcuggcccuacaucgccucccgcaccuccaucaccggccgcgccugggagaacaccgucgucgaccucgaguccgacgacaagcccaagaagcccggcaacaacgaguccaaccgcucccuccaguccgccggcuuccccgccggccucaccuacucccagcucaugacccucaaggacuccaugcuccagcucgaccccaacgccaagaccuggauggacaucgagggccgccccgacgaccccgucgagaucgcccucuaccagcccaacuccggcugcuacauccacuucuuccgcgagcccaccgaccucaagcaguucaagcaggacgccaaguacucccacggcaucgacaucggcgaccucuucgccucccagcccggccucaccuccgccgucaucgaggcccucccccgcaacauggucaucaccugccagggcuccgaggacaucaagaagcuccucgagucccagggccgcaaggacauccgccucgucgacaucucccucuccaaggccgacucccgcaaguucgagaacgccgucugggaccaguacaaggaccucugccacaugcacaccggcaucgucgucgagaagaagaagaagggcggcaaggaggagaucaccccccacugcgcccucauggacugcaucauguucgacgccgccgucaugggcggccucgacgccaagguccuccgcgccguccucccccgcgacauggucuuccgcaccuccaccccccgcgucguccucuga

SEQ ID NO: 8376 - RNA, 1710 nt, Artificial Sequence
  derived and/or modified CDS sequence (opt2) from LASV(Lassa virus/H.sapiens-wt/NGA/2016/ISTH_0919;Clade II)__AVO03660__NP
auguccgccuccaaggaggucaaguccuuccucuggacccagucccuccgccgcgagcucuccggcuacugcuccaacaucaagcuccaggucgucaaggacgcccaggcccuccuccacggccucgacuucuccgaggucuccaacguccagcgccucaugcgcaagcagaagcgcgacgacuccgaccucaagcgccuccgcgaccucaaccaggccgucaacaaccucgucgagcucaaguccacccagcagaaguccauccuccgcgucggcacccucaccuccgacgaccuccucacccucgccgccgaccucgagaagcucaaguccaaggucauccgcaccgagcgcccccucuccuccggcgucuacaugggcaaccucuccacccagcagcucgagcagcgccgcgcccuccucaaccucaucggcauggucggcggcgcccagggcgcccagcccggccgcgacggcgucguccgcgucugggacgucaagaaccccgaccuccucaacaaccaguucggcaccaugcccucccucacccucgccugccucaccaagcagggccaggucgaccucaacgacgucguccucgcccucaccgaccucggccucaucuacaccgccaaguaccccaacuccuccgaccucgaccgccucucccagucccaccccauccucaacauggucgacaccaagaaguccucccucaacaucuccggcuucaacuucucccucggcgccgccgucaaggccggcgccugcaugcucgacggcggcaacaugcucgagaccaucaaggucaccccccagaccauggacggcauccucaaguccauccucaaggucaagaagucccucggcauguucgucuccgacacccccggcgagcgcaaccccuacgagaacauccucuacaagaucugccucuccggcgacggcuggcccuacaucgccucccgcaccuccaucgucggccgcgccugggagaacaccaccgucgaccucgaguccgacggcaagccccacaaggucggcaccgccggcuccaacaagucccuccaguccgccggcuuccccaccggccucaccuacucccagcucaugacccucaaggacuccaugaugcagcucgaccccuccgccaagaccuggaucgacaucgagggccgccccgaggaccccgucgagaucgcccucuaccagcccauguccggcugcuacauccacuucuuccgcgagcccaccgaccucaagcaguucaagcaggacgccaaguacucccacggcaucgacgucgccgaccucuuccccgcccagcccggccucaccuccgccgucaucgaggcccucccccgcaacaugguccucaccugccagggcuccgacgacaucaagcgccuccucgacucccagggccgccgcgacaucaagcucaucgacaucgcccucuccaaggccgacucccgccgcuucgagaacgccgucugggaccagugcaaggaccucugccacaugcacaccggcgucgucgucgagaagaagaagcgcggcggcaaggaggagaucaccccccacugcgcccucauggacugcaucauguacgacgccgccgucuccggcggccucaacauccccguccuccgcgccguccucccccgcgacauggucuuccgcaccuccucccccaaggucguccucuga

SEQ ID NO: 8377 - RNA, 1710 nt, Artificial Sequence
  derived and/or modified CDS sequence (opt2) from LASV(Lassa virus/H.sapiens-wt/NGA/2016/ISTH_1006;Clade II)__AVO03644__NP
auguccgccuccaaggaggucaaguccuuccucuggacccagucccuccgccgcgagcucuccggcuacugcuccaacaucaagcuccaggucgucaaggacgcccaggcccuccuccacggccucgacuucuccgaggucuccaacguccagcgccucaugcgcaagcagaagcgcgacgacuccgaccucaagcgccuccgcgaccucaaccaggccgucaacaaccucgucgagcucaaguccacccagcagaaguccauccuccgcgucggcacccucaccuccgacgaccuccucacccucgccgccgaccucgagaagcucaaguccaaggucauccgcaccgagcgcccccucuccuccggcgucuacaugggcaaccucuccacccagcagcucgagcagcgccgcgcccuccucaacaugaucggcauggucggcggcacccagggcacccagcccggccgcgacggcgucguccgcgucugggacgucaagaaccccgaccuccucaacaaccaguucggcaccaugcccucccucacccucgccugccucaccaagcagggccaggucgaccucaacgacgccguccucgcccucaccgaccucggccucaucuacaccgccaaguaccccaacuccuccgaccucgaccgccucucccagucccaccccauccucaacauggucgacaccaagaaguccucccucaacaucuccggcuacaacuucucccucggcgccgccgucaaggccggcgccugcaugcucgacggcggcaacaugcucgagaccaucaaggucaccccccagaccauggacggcauccucaaguccauccucaaggucaagaagucccucggcauguucgucuccgacacccccggcgagcgcaaccccuacgagaacauccucuacaagaucugccucuccggcgacggcuggcccuacaucgccucccgcaccuccaucgucggccgcgccugggagaacaccaccgucgaccucgaguccgacggcaagccccagaaggucggcaccgccggcuccaacaagucccuccaguccgccggcuuccccaccggccucaccuacucccagcucaugacccucaaggacuccaugaugcagcucgaccccuccgccaagaccuggaucgacaucgagggccgccccgaggaccccgucgagaucgcccucuaccagcccauguccggcugcuacauccacuucuuccgcgagcccaccgaccucaagcaguucaagcaggacgccaaguacucccacggcaucgacgucgccgaccucuuccccgcccagcccggccucaccuccgccgucaucgaggcccucccccgcaacaugguccucaccugccagggcuccgacgacaucaagcgccuccucgacucccagggccgccgcgacaucaagcucaucgacaucucccucuccaaggccgacucccgccgcuucgagaacgccgucugggaccagugcaaggaccucugccacaugcacaccggcgucgucgucgagaagaagaagcgcggcggcaaggaggagaucaccccccacugcgcccucauggacugcaucauguacgacgccgccgucuccggcggccucaacauccccguccuccgcgccguccucccccgcgacauggucuuccgcaccuccucccccaaggucguccucuga

SEQ ID NO: 8378 - RNA, 1710 nt, Artificial Sequence
  derived and/or modified CDS sequence (opt2) from LASV(Lassa virus/H.sapiens-wt/NGA/2016/ISTH_1026;Clade II)__AVO03590__NP
auguccgccuccaaggaggucaaguccuuccucuggacccagucccuccgccgcgagcucuccggcuacugcuccaacaucaagcuccaggucgucaaggacgcccaggcccuccuccacggccucgacuucuccgaggucuccaacguccagcgccucaugcgcaagcagaagcgcgacgacuccgaccucaagcgccuccgcgaccucaaccaggccgucaacaaccucgucgagcucaaguccacccagcagaaguccauccuccgcgucggcacccucaccuccgacgaccuccucacccucgccgccgaccucgagaagcucaaguccaaggucauccgcaccgagcgcccccucuccuccggcgucuacaugggcaaccucuccgcccagcagcucgagcagcgccgcgcccuccucaaccucaucggcauggucggcggcgcccagggcacccagcccggccgcgacggcgucguccgcgucugggacgucaagaaccccgaccuccucaacaaccaguucggcaccaugcccucccucacccucgccugccucaccaagcagggccaggucgaccucaacgacgccguccucgcccucaccgaccucggccucaucuacaccgccaaguaccccaacuccuccgaccucgaccgccucucccagucccaccccauccucaacauggucgacaccaagaaguccucccucaacaucuccggcuucaacuucucccucggcgccgccgucaaggccggcgccugcaugcucgacggcggcaacaugcucgagaccaucaaggucaccccccagaccaucgacggcauccucaaguccauccucaaggucaagaagucccucggcauguucgucuccgacacccccggcgagcgcaaccccuacgagaacauccucuacaagaucugccucuccggcgacggcuggcccuacaucgccucccgcaccuccaucgucggccgcgccugggagaacaccaccgucgaccucgaguccgacggcaagccccacaaggucggcaccgccggcuccaacaagucccuccaguccgccggcuuccccaccggccucaccuacucccagcucaugacccucaaggacuccaugaugcagcucgaccccuccgccaagaccuggaucgacaucgagggccgccccgaggaccccgucgagaucgcccucuaccagcccauguccggcugcuacauccacuucuuccgcgagcccaccgaccucaagcaguucaagcaggacgccaaguacucccacggcaucgacgucgccgaccucuuccccgcccagcccggccucaccuccgccgucaucgaggcccucccccgcaacaugguccucaccugccagggcuccgacgacaucaagcgccuccucgacucccagggccgccgcgacaucaagcucaucgacaucgcccucuccaaggccgacucccgccgcuucgagaacgccgucugggaccagugcaaggaccucugccacaugcacaccggcgucgucgucgagaagaagaagcgcggcggcaaggaggagaucaccccccacugcgcccucauggacugcaucauguacgacgccgccgucuccggcggccucaacauccccguccuccgcgccguccucccccgcgacauggucuuccgcaccuccucccccaaggucguccucuga

SEQ ID NO: 8379 - RNA, 1710 nt, Artificial Sequence
  derived and/or modified CDS sequence (opt2) from LASV(Lassa virus/H.sapiens-wt/NGA/2016/ISTH_1070;Clade II)__AVO03652__NP
auguccgccuccaaggaggucaaguccuuccucuggacccagucccuccgccgcgagcucuccggcuacugcuccaacaucaagcuccaggucgucaaggacgcccaggcccuccuccacggccucgacuucuccgaggucuccaacguccagcgccucaugcgcaagcagaagcgcgacgacggcgaccucaagcgccuccgcgaccucaaccaggccgucaacaaccucgucgagcucaaguccacccagcagaaguccguccuccgcgucggcacccucaccuccgacgaccuccucacccucgccgccgaccucgagaagcucaaguccaaggucauccgcaccgagcgcccccucuccuccggcgucuacaugggcaaccucuccacccagcagcucgagcagcgccgcgcccuccucuccaugaucggcauggucggcggcgcccagggcacccagcccggccgcgacggcgucguccgcgucugggacgucaagaaccccgaccuccucaacaaccaguucggcaccaugcccucccucacccucgccugccucaccaagcagggccaggucgaccucaacgacgucguccucgcccucaccgaccucggccucaucuacaccgccaaguaccccaacuccuccgaccucgaccgccucucccagucccaccccauccucaacauggucgacaccaagaaguccucccucaacaucuccggcuacaacuucucccucggcgccgccgucaaggccggcgccugcaugcucgacggcggcaacaugcucgagaccaucaaggucaccccccagaccauggacggcauccucaaguccauccucaaggucaagaagucccucggcauguucgucuccgacacccccggcgagcgcaaccccuacgagaacauccucuacaagaucugccucuccggcgacggcuggcccuacaucgccucccgcaccgccaucgucggccgcgccugggagaacaccaccgucgaccucgaguccgacggcaagccccagaaggucggcgccaccggcuccaacaagucccuccaguccgccggcuuccccaccggccucaccuacucccagcucaugacccucaaggacuccaugaugcagcucgaccccuccgccaagaccuggaucgacaucgagggccgccccgaggaccccgucgagaucgcccucuaccagcccauguccggcugcuacauccacuucuuccgcgagcccaccgaccucaagcaguucaagcaggacgccaaguacucccacggcaucgacgucaccgaccucuucuccgcccagcccggccucaccuccgccgucaucgaggcccucccccgcaacaugguccucaccugccagggcuccgacgacaucaagcgccuccucgacucccagggccgccgcgacaucaagcucaucgacaucgcccucuccaaggccgacucccgccgcuucgagaacgccgucugggaccagugcaaggaccucugccacaugcacaccggcgucgucgucgagaagaagaagcgcggcggcaaggaggagaucaccccccacugcgcccucauggacugcaucauguacgacgccgccgucuccggcggccucaacauccccguccuccgcgccguccucccccgcgacauggucuuccgcaccuccucccccaaggucguccucuga

SEQ ID NO: 8380 - RNA, 1710 nt, Artificial Sequence
  derived and/or modified CDS sequence (opt2) from LASV(Lassa virus/H.sapiens-wt/NGA/2016/ISTH_1150;Clade II)__AVO03628__NP
auguccgccuccaaggaggucaaguccuuccucuggacccagucccuccgccgcgagcucuccggcuacugcuccuccaucaagcuccaggucgucaaggacgcccaggcccuccuccacggccucgacuucuccgaggucuccaacguccagcgccucaugcgcaagcagaagcgcgacgacuccgaccucaagcgccuccgcgaccucaaccaggccgucaacaaccucgucgagcucaaguccacccagcagaaguccauccuccgcgucggcacccucaccuccgacgaccuccucacccucgccgccgaccucgagaagcucaaguccaaggucauccgcaccgagcgcccccucuccuccggcgucuacaugggcaaccucuccacccagcagcucgagcagcgccgcgcccuccucuccaugaucggcauggucggcggcgcccagggcacccagcccggccgcgacggcgucguccgcgucugggacgucaagaaccccgaccuccucaacaaccaguucggcaccaugcccucccucacccucgccugccucaccaagcagggccaggucgaccucaacgacaccguccucgcccucaccgaccucggccucaucuacaccgccaaguaccccaacuccuccgaccucgaccgccucucccagucccaccccauccucaacauggucgacaucaagaaguccucccucaacaucuccggcuacaacuucucccucggcgccgccgucaaggccggcgccugcaugcucgacggcggcaacaugcucgagaccaucaaggucaccccccagaccauggacggcauccucaaguccauccucaaggucaagcgcucccucggcauguucgucuccgacacccccggcgagcgcaaccccuacgagaacauccucuacaagaucugccucuccggcgacggcuggcccuacaucgccucccgcaccuccaucgucggccgcgccugggagaacaccaccgucgaccucgaguccgacggcaagccccagaaggucggcaccgccggcuccaacaagucccuccaguccgccggcuuccccaccggccucaccuacucccagcucaugacccucaaggacuccaugaugcagcucgaccccuccgccaagaccuggaucgacaucgagggccgccccgaggaccccgucgagaucgcccucuaccagcccauguccggcugcuacauccacuucuuccgcgagcccaccgaccucaagcaguucaagcaggacgccaaguacucccacggcaucgacgucaccgaccucuucuccgcccagcccggccucaccuccgccgucaucgaggcccucccccgcggcaugguccucaccugccagggcuccgacgacaucaagaagcuccucgacucccagggccgccgcgacaucaagcucaucgacaucucccucuccaaggccgacucccgccgcuucgagaacgccgucugggaccagugcaaggaccucugccacaugcacaccggcgucgucgucgagaagaagaagcgcggcggcaaggaggagaucaccccccacugcgcccucauggacugcaucauguucgacgccgccgucuccggcggccucaacauccccauccuccgcgccguccucccccgcgacauggucuuccgcaccuccucccccaaggucguccucuga

SEQ ID NO: 8381 - RNA, 1710 nt, Artificial Sequence
  derived and/or modified CDS sequence (opt2) from LASV(Lassa virus/H.sapiens-wt/NGA/2016/ISTH_1174;Clade II)__AVO03556__NP
auguccgccuccaaggaggucaaguccuuccucuggacccagucccuccgccgcgagcucuccggcuacugcuccaacaucaagcuccaggucgucaaggacgcccaggcccuccuccacggccucgacuucuccgaggucuccaacguccagcgccucaugcgcaagcagaagcgcgacgacuccgaccucaagcgccuccgcgaccucaaccaggccgucaacaaccucgucgagcucaaguccacccagcagaaguccauccuccgcgucggcacccucaccuccgacgaccuccucacccucgccgccgaccucgagaagcucaaguccaaggucauccgcaccgagcgcccccucuccuccggcgucuacaugggcaaccucuccacccagcagcucgagcagcgccgcgcccuccucaacaugaucggcauggucggcggcgcccaguccacccagcccggccgcgacggcgucguccgcgucugggacgucaagaaccccgaccuccucaacaaccaguucggcaccaugcccucccucacccucgccugccucaccaagcagggccaggucgaccucaacgacgccguccucgcccucaccgaccucggccucaucuacaccgccaaguaccccaacuccuccgaccucgaccgccucucccagucccaccccauccucaacauggucgacaccaagaaguccucccucaacaucuccggcuacaacuucucccucggcgccgccgucaaggccggcgccugcaugcucgacggcggcaacaugcucgagaccaucaagaucaccccccagaccauggacggcauccucaaguccauccucaaggucaagcgcucccucggcauguucgucuccgacacccccggcgagcgcaaccccuacgagaacauccucuacaaggucugccucuccggcgacggcuggcccuacaucgccucccgcaccuccaucgucggccgcgccugggagaacaccaccgucgaccucgaguccgacggcaagccccagaaggucggcaccgucggcuccaacaagucccuccaguccgccggcuuccccaccggccucaccuacucccagcucaugacccucaaggacuccaugaugcagcucgaccccuccgccaagaccuggaucgacaucgagggccgccccgaggaccccgucgagaucgcccucuaccagcccauguccggcugcuacauccacuucuuccgcgagcccaccgaccucaagcaguucaagcaggacgccaaguacucccacggcaucgacgucgccgaccucuuccccgcccagcccggccucaccuccgccgucaucgaggcccucccccgcaacaugguccucaccugccagggcuccgacgacaucaagcgccuccucgacucccagggccgccgcgacaucaagcucaucgacaucgcccucuccaaggccgacucccgccgcuucgagaacgccgucugggaccagugcaaggaccucugccacaugcacaccggcgucgucgucgagaagaagaagcgcggcggcaaggaggagaucaccccccacugcgcccucauggacugcaucauguacgacgccgccgucuccggcggccucaacauccccguccuccgcgccguccucccccgcgacauggucuuccgcaccuccucccccaaggucguccucuga

SEQ ID NO: 8382 - RNA, 1710 nt, Artificial Sequence
  derived and/or modified CDS sequence (opt2) from LASV(Lassa virus/H.sapiens-wt/NGA/2016/ISTH_1207;Clade II)__AVO03600__NP
auguccgccuccaaggaggucaaguccuuccucuggacccagucccuccgccgcgagcucuccggcuacugcuccaacaucaagcuccaggucgucaaggacgcccaggcccuccuccacggccucgacuucuccgaggucuccaacguccagcgccucaugcgcaagcagaagcgcgacgacuccgaccucaagcgccuccgcgaccucaaccaggccgucaacaaccucgucgagcucaaguccacccagcagaaguccauccuccgcgucggcacccucaccuccgacgaccuccucauccucgccgccgaccucgagaagcucaaguccaaggucauccgcaccgagcgcccccucuccuccggcgucuacaugggcaaccucuccacccagcagcucgagcagcgccgcgcccuccucaacaugaucggcauggucgacggcgcccagggcacccagcccggccgcgacggcgucguccgcgucugggacgucaagaaccccgaccuccucaacaaccaguucggcaccaugcccucccucacccucgccugccucaccaagcagggccaggucgaccucaacgacgccguccucgcccucaccgaccucggccucaucuacaccgccaaguaccccaacuccuccgaccucgaccgccucucccagucccaccccauccucaacauggucgacaccaagaaguccucccucaacaucuccggcuacaacuucucccucggcgccgccgucaaggccggcgccugcaugcucgacggcggcaacaugcucgagaccaucaaggucaccccccagaccauggacggcauccucaaguccauccucaaggucaagaagucccucggcauguucgucuccgacacccccggcgagcgcaaccccuacgagaacauccucuacaagaucugccucuccggcgacggcuggcccuacaucgccucccgcaccuccaucgucggccgcgccugggagaacaccaccgucgaccucgaguccgacggcaagucccagaaggucggcaccgccggcuccaacaagucccuccaguccgccggcuuccccaccggccucaccuacucccagcucaugacccucaaggacuccaugaugcagcucgaccccuccgccaagaccuggaucgacaucgagggccgccccgaggaccccgucgagaucgcccucuaccagcccauguccggcugcuacauccacuucuuccgcgagcccaccgaccucaagcaguucaagcaggacgccaaguacucccacggcaucgacgucgccgaccucuuccccgcccagcccggccucaccuccgccgucaucgaggcccucccccgcaacaugguccucaccugccagggcuccgacgacaucaagcgccuccucgacucccagggccgccgcgacaucaagcucaucgacaucgcccucuccaaggccgacucccgccgcuucgagaacgccgucugggaccagugcaaggaccucugccacaugcacaccggcgucgucgucgagaagaagaagcgcggcggcaaggaggagaucaccccccacugcgcccucauggacugcaucauguacgacgccgccgucuccggcggccucaacauccccguccuccgcgccguccucccccgcgacauggucuuccgcaccuccucccccaaggucguccucuga

SEQ ID NO: 8383 - RNA, 1710 nt, Artificial Sequence
  derived and/or modified CDS sequence (opt2) from LASV(Lassa virus/H.sapiens-wt/NGA/2016/ISTH_1306;Clade II)__AVO03624__NP
auguccgccuccaaggaggucaaguccuuccucuggacccagucccuccgccgcgagcucuccggcuacugcuccaacaucaagcuccaggucgucaaggacgcccaggcccuccuccacggccucgacuucuccgaggucuccaacguccagcgccucaugcgcaagcagaagcgcgacgacggcgaccucaagcgccuccgcgaccucaaccaggccgucaacaaccucgucgagcucaaguccacccagcagaaguccauccuccgcgucggcacccucaccuccgacgaccuccucacccucgccgccgaccucgagaagcucaaguccaaggucauccgcaccgagcgcccccucuccuccggcgucuacaugggcaaccucuccacccagcagcucgagcagcgccgcgcccuccucaacaugaucggcauggucggcggcgcccagggcacccagcccggccgcgacggcgucguccgcgucugggacgucaagaaccccgaccuccucaacaaccaguucggcaccaugcccucccucacccucgccugccucaccaagcagggccaggucgaccucaacgacgccguccucgcccucaccgaccucggccucaucuacaccgccaaguaccccaacuccuccgaccucgaccgccucucccagucccaccccauccucaacauggucgacaccaagaaguccucccucaacaucuccggcuacaacuucucccucggcgccgccgucaaggccggcgccugcaugcucgacggcggcaacaugcucgagaccaucaaggucaccccccagaccauggacggcauccucaaguccauccucaaggucaagaagucccucggcauguucgucuccgacacccccggcgagcgcaaccccuacgagaacauccucuacaagaucugccucuccggcgacggcuggcccuacaucgccucccgcaccuccaucgucggccgcgccugggagaacaccaccgucgaccucgaguccgacggcaagccccagaaggucggcaccgccggcuccaacaagucccuccaguccgccggcuuccccaccggccucaccuacucccagcucaugacccucaaggacuccaugaugcagcucgaccccuccgccaagaccuggaucgacaucgagggccgccccgaggaccccgucgagaucgcccucuaccagcccauguccggcugcuacauccacuucuuccgcgagcccaccgaccucaagcaguucaagcaggacgccaaguacucccacggcaucgacgucgccgaccucuuccccgcccagcccggccucaccuccgccgucaucgaggcccucccccgcaacaugguccucaccugccagggcuccgacgacaucaagcgccuccucgacucccagggccgccgcgacaucaagcucaucgacaucgcccucuccaaggccgacucccgccgcuucgagaacgccgucugggaccagugcaaggaccucugccacaugcacaccggcgucgucgucgagaagaagaagcgcggcggcaaggaggagaucaccccccacugcgcccucauggacugcaucauguacgacgccgccgucuccggcggccucaacauccccguccuccgcgccguccucccccgcgacauggucuuccgcaccuccucccccaaggucguccucuga

SEQ ID NO: 8384 - RNA, 1710 nt, Artificial Sequence
  derived and/or modified CDS sequence (opt2) from LASV(Lassa virus/H.sapiens-wt/NGA/2016/ISTH_1311;Clade II)__AVO03576__NP
auguccgccuccaaggaggucaaguccuuccucuggacccagucccuccgccgcgagcucuccggcuacugcuccaacaucaagcuccaggucgucaaggacgcccaggcccuccuccacggccucgacuucuccgaggucuccaacguccagcgccucaugcgcaagcagaagcgcgacgacggcgaccucaagcgccuccgcgaccucaaccaggccgucaacaaccucgucgagcucaaguccacccagcagaaguccguccuccgcgucggcacccucaccuccgacgaccuccucauccucgccgccgaccucgagaagcucaaguccaaggucauccgcaccgagcgcccccucuccuccggcgucuacaugggcaaccucuccacccagcagcucgagcagcgccgcgcccuccucuccaugaucggcauggucggcggcgcccagggcacccagcccggccgcgacggcgucguccgcgucugggacgucaagaaccccgaccuccucaacaaccaguucggcaccaugcccucccucacccucgccugccucaccaagcagggccaggucgaccucaacgacgccguccucgcccucaccgaccucggccucaucuacaccgucaaguaccccaacuccuccgaccucgaccgccucucccagucccaccccauccucaacauggucgacaccaagaaguccucccucaacaucuccggcuacaacuucucccucggcgccgccgucaaggccggcgccugcaugcucgacggcggcaacaugcucgagaccaucaaggucaccccccagaccaucgacggcauccucaaguccauccucaaggucaagcgcucccucggcauguucgucuccgacacccccggcgagcgcaaccccuacgagaacauccucuacaagaucugccucuccggcgacggcuggcccuacaucgccucccgcaccuccaucgucggccgcgccugggagaacaccaccgucgaccucgaguccgacggcaagccccagaaggucggcgccgccggcuccaacaagucccuccaguccgccggcuuccccaccggccucaccuacucccagcucaugacccucaaggacuccaugaugcagcucgaccccuccgccaagaccuggaucgacaucgagggccgccccgaggaccccgucgagaucgcccucuaccagcccauguccggcugcuacauccacuucuuccgcgagcccaccgaccucaagcaguucaagcaggacgccaaguacucccacggcaucgacgucaccgaccucuucuccgcccagcccggccucaccuccgccgucaucgaggcccucccccgcaacaugguccucaccugccagggcuccgacgacaucaagaagcuccucgacucccagggccgccgcgacaucaagcucaucgacaucucccucaacaagaccgacucccgccgcuucgagaacgccgucugggaccagugcaaggaccucugccacaugcacaccggcgucgucgucgagaagaagaagcgcggcggcaaggaggagaucaccccccacugcgcccucauggacugcaucauguucgacgccgccgucuccggcggccucaacauccccauccuccgcgccguccucccccgcgacauggucuuccgcaccuccucccccaaggucguccucuga

SEQ ID NO: 8385 - RNA, 1710 nt, Artificial Sequence
  derived and/or modified CDS sequence (opt2) from LASV(Lassa virus/H.sapiens-wt/NGA/2016/ISTH_1423;Clade II)__AVO03578__NP
auguccgccuccaaggaggucaaguccuuccucuggacccagucccuccgccgcgagcucuccggcuacugcuccaacaucaagcuccaggucgucaaggacgcccaggcccuccuccacggccucgacuucuccgaggucuccaacguccagcgccucaugcgcaagcagaagcgcgacgacuccgaccucaagcgccuccgcgaccucaaccaggccgucaacaaccucgucgagcucaaguccacccagcagaaguccauccuccgcgucggcacccucaccuccgacgaccuccucacccucgccgccgaccucgagaagcucaaguccaaggucauccgcaccgagcgcccccucuccuccggcgucuacaugggcaaccucuccacccagcagcucgagcagcgccgcgcccuccucaacaugaucggcauggucuccggcacccagggcacccagcccggccgcgacggcgucguccgcgucugggacgucaagaaccccgaccuccucaacaaccaguucggcaccaugcccucccucacccucgccugccucaccaagcagggccaggucgaccucaacgacgccguccucgcccucaccgaccucggccucaucuacaccgccaaguaccccaacuccuccgaccucgaccgccucucccagucccaccccauccucaacauggucgacaccaagaaguccucccucaacaucuccggcuacaacuucucccucggcgccgccgucaaggccggcgccugcaugcucgacggcggcaacaugcucgagaccaucaaggucaccccccagaccauggacggcauccucaaguccauccucaaggucaagaagucccucggcauguucgucuccgacacccccggcgagcgcaaccccuacgagaacauccucuacaagaucugccucuccggcgacggcuggcccuacaucgccucccgcaccuccaucgucggccgcgccugggagaacaccaccgucgaccucgaguccgacggcaagccccagaagaugggcaccgccggcuccaacaagucccuccaguccgccggcuuccccaccggccucaccuacucccagcucaugacccucaaggacuccaugaugcagcucgaccccuccgccaagaccuggaucgacaucgagggccgccccgaggaccccgucgagaucgcccucuaccagcccauguccggcugcuacauccacuucuuccgcgagcccaccgaccucaagcaguucaagcaggacgccaaguacucccacggcaucgacgucgccgaccucuuccccgcccagcccggccucaccuccgccgucaucgaggcccucccccgcaacaugguccucaccugccagggcuccgacgacaucaagaagcuccucgacucccagggccgccgcgacaucaagcucaucgacaucgcccucuccaaggccgacucccgccgcuucgagaacgccgucugggaccagugcaaggaccucugccacaugcacaccggcgucgucgucgagaagaagaagcgcggcggcaaggaggagaucaccccccacugcgcccucauggacugcaucauguacgacgccgccgucuccggcggccucaacauccccguccuccgcgccguccucccccgcgacauggucuuccgcaccuccaaccccaaggucguccucuga

SEQ ID NO: 8386 - RNA, 1710 nt, Artificial Sequence
  derived and/or modified CDS sequence (opt2) from LASV(Lassa virus/H.sapiens-wt/NGA/2016/ISTH_1472;Clade II)__AVO03606__NP
auguccgccuccaaggaggucaaguccuuccucuggacccagucccuccgccgcgagcucuccggcuacugcuccaacaucaagcuccaggucgucaaggacgcccaggcccuccuccacggccucgacuucuccgaggucuccaacguccagcgccucaugcgcaagcagaagcgcgacgacuccgaccucaagcgccuccgcgaccucaaccaggccgucaacaaccucgucgagcucaaguccacccagcagaaguccauccuccgcgucggcacccucaccuccgacgaccuccucacccucgccgccgaccucgagaagcucaaguccaaggucauccgcaccgagcgcccccucuccuccggcgucuacaugggcaaccucuccacccagcagcucgagcagcgccgcgcccuccucaacaugaucggcauggucggcggcauccagggcacccagcccggccgcgacggcgucguccgcgucugggacgucaagaaccccgaccuccucaacaaccaguucggcaccaugcccucccucacccucgccugccucaccaagcagggccaggucgaccucaacgacaccguccaggcccucaccgaccucggccucaucuacaccgccaaguaccccaacuccuccgaccucgaccgccucucccagucccaccccauccucaacauggucgacaccaagaaguccucccucaacaucuccggcuacaacuucucccucggcgccgccgucaaggccggcgccugcaugcucgacggcggcaacaugcucgagaccaucaaggucaccccccagaccauggacggcauccucaaguccauccucaaggucaagaagucccucggcauguucgucuccgacacccccggcgagcgcaaccccuacgagaacauccucuacaagaucugccucuccggcgacggcuggcccuacaucgccucccgcaccuccaucgucggccgcgccugggagaacaccaccgucgaccucgaguccgacggcaagccccagaaggucggcaccgccggcuccaacaagucccuccaguccgccggcuuccccaccggccucaccuacucccagcucaugacccucaaggacuccaugaugcagcucgaccccuccgccaagaccuggaucgacaucgagggccgccccgaggaccccgucgagaucgcccucuaccagcccauguccggcugcuacauccacuucuuccgcgagcccaccgaccucaagcaguucaagcaggacgccaaguacucccacggcaucgacgucgccgaccucuuccccgcccagcccggccucaccuccgccgucaucgaggcccucccccgcaacaugguccucaccugccagggcuccgacgacaucaagcgccuccucgacucccagggccgccgcgacaucaagcucaucgacaucucccucuccaagaccgacucccgccgcuucgagaacgccgucugggaccagugcaaggaccucugccacaugcacaccggcgucgucgucgagaagaagaagcgcggcggcaaggaggagaucaccccccacugcgcccucauggacugcaucauguacgacgccgccgucuccggcggccucaacauccccguccuccgcgccguccucccccgcgacauggucuuccgcaccuccucccccaaggucguccucuga

SEQ ID NO: 8387 - RNA, 1710 nt, Artificial Sequence
  derived and/or modified CDS sequence (opt2) from LASV(Lassa virus/H.sapiens-wt/NGA/2016/ISTH_1474;Clade II)__AVO03614__NP
auguccgccuccaaggaggucaaguccuuccucuggacccagucccuccgccgcgagcucuccggcuacugcuccaacaucaagcuccaggucgucaaggacgcccaggcccuccuccacggccucgacuucuccgaggucuccaacguccagcgccucaugcgcaagcagaagcgcgacgacuccgaccucaagcgccuccgcgaccucaaccaggccgucaacaaccucgucgagcucaaguccacccagcagaaguccauccuccgcgucggcacccucaccuccgacgaccuccucacccucgccgccgaccucgagaagcucaaguccaaggucauccgcaccgagcgcccccucuccuccggcgucuacaugggcaaccucuccacccagcagcucgagcagcgccgcgcccuccucaacaugaucggcauggucggcggcauccagggcacccagcccggccgcgacggcgucguccgcgucugggacgucaagaaccccgaccuccucaacaaccaguucggcaccaugcccucccucacccucgccugccucaccaagcagggccaggucgaccucaacgacaccguccaggcccucaccgaccucggccucaucuacaccgccaaguaccccaacuccuccgaccucgaccgccucucccagucccaccccauccucaacauggucgacaccaagaaguccucccucaacaucuccggcuacaacuucucccucggcgccgccgucaaggccggcgccugcaugcucgacggcggcaacaugcucgagaccaucaaggucaccccccagaccauggacggcauccucaaguccauccucaaggucaagcgcucccucggcauguucgucuccgacacccccggcgagcgcaaccccuacgagaacauccucuacaagaucugccucuccggcgacggcuggcccuacaucgccucccgcaccuccaucgucggccgcgccugggagaacaccaccgucgaccucgaguccgacggcaagccccagaaggucggcaccgccggcuccaacaagucccuccaguccgccggcuuccccaccggccucaccuacucccagcucaugacccucaaggacuccaugaugcagcucgaccccuccgccaagaccuggaucgacaucgagggccgccccgaggaccccgucgagaucgcccucuaccagcccauguccggcugcuacauccacuucuuccgcgagcccaccgaccucaagcaguucaagcaggacgccaaguacucccacggcaucgacgucgccgaccucuuccccgcccagcccggccucaccuccgccgucaucgaggcccucccccgcaacaugguccucaccugccagggcuccgacgacaucaagcgccuccucgacucccagggccgccgcgacaucaagcucaucgacaucgcccucuccaaggccgacucccgccgcuucgagaacgccgucugggaccagugcaaggaccucugccacaugcacaccggcgucgucgucgagaagaagaagcgcggcggcaaggaggagaucaccccccacugcgcccucauggacugcaucauguacgacgccgccgucuccggcggccucaacauccccguccuccgcgccguccucccccgcgacauggucuuccgcaccuccucccccaaggucguccucuga

SEQ ID NO: 8388 - RNA, 1710 nt, Artificial Sequence
  derived and/or modified CDS sequence (opt2) from LASV(Lassa virus/H.sapiens-wt/NGA/2016/ISTH_1496;Clade II)__AVO03580__NP
auguccgccuccaaggaggucaaguccuuccucuggacccagucccuccgccgcgagcucuccggcuacugcuccaacaucaagcuccaggucgucaaggacgcccaggcccuccuccacggccucgacuucuccgaggucuccaacguccagcgccucaugcgcaagcagaagcgcgacgacuccgaccucaagcgccuccgcgaccucaaccaggccgucaacaaccucgucgagcucaaguccacccagcagaaguccauccucaaggucggcacccucaccuccgacgaccuccucacccucgccgccgaccucgagaagcucaaguccaaggucauccgcaccgagcgcccccucuccuccggcgucuacaugggcaaccucuccacccagcagcucgagcagcgccgcgcccuccucaacaugaucggcauggucggcggcgcccagggcacccagcccggccgcgacggcgucguccgcgucugggacgucaagaaccccgaccuccucaacaaccaguucggcaccaugcccucccucacccucgccugccucaccaagcagggccaggucgaccucaacgacgccguccucgcccucaccgaccucggccucaucuacaccgccaaguaccccaacuccuccgaccucgaccgccucucccagucccaccccauccucaacauggucgacaccaagaaguccucccucaacaucuccggcuacaacuucucccucggcgccgccgucaaggccggcgccugcaugcucgacggcggcaacaugcucgagaccaucaaggucaccccccagaccauggacggcauccucaaguccauccucaaggucaagcgcucccucggcauguucgucuccgacacccccggcgagcgcaaccccuacgagaacauccucuacaagaucugccucuccggcgacggcuggcccuacaucgccucccgcaccuccaucgucggccgcgccugggagaacaccaccgucgaccucgaguccgacggcaagccccagaaggucggcaccaucggcuccaacaagucccuccaguccgccggcuuccccaccggccucaccuacucccagcucaugacccucaaggacuccaugaugcagcucgaccccuccgccaagaccuggaucgacaucgagggccgccccgaggaccccgucgagaucgcccucuaccagcccauguccggcugcuacauccacuucuuccgcgagcccaccgaccucaagcaguucaagcaggacgccaaguacucccacggcaucgacgucgccgaccucuuccccgcccagcccggccucaccuccgccgucaucgaggcccucccccgcaacaugguccucaccugccagggcuccgacgacaucaagcgccuccucgacucccagggccgccgcgacaucaagcucaucgacaucgcccucuccaaggccgacucccgccgcuucgagaacgccgucugggaccagugcaaggaccucugccacaugcacaccggcgucgucgucgagaagaagaagcgcggcggcaaggaggagaucaccccccacugcgcccucauggacugcaucauguacgacgccgccgucuccggcggccucaacauccccguccuccgcgccguccucccccgcgacauggucuuccgcaccuccucccccaaggucguccucuga

SEQ ID NO: 8389 - RNA, 1710 nt, Artificial Sequence
  derived and/or modified CDS sequence (opt2) from LASV(Lassa virus/H.sapiens-wt/NGA/2016/ISTH_1541;Clade II)__AVO03554__NP
auguccgccuccaaggaggucaaguccuuccucuggacccagucccuccgccgcgagcucuccggcuacugcuccaacaucaagcuccaggucgucaaggacgcccaggcccuccuccacggccucgacuucuccgaggucuccaacguccagcgccucaugcgcaagcagaagcgcgacgacggcgaccucaagcgccuccgcgaccucaaccaggccgucaacaaccucgucgagcucaaguccacccagcagaaguccauccuccgcgucggcacccucuccuccgacgaccuccucauccucgccgccgaccucgagaagcucaaguccaaggucauccgcaccgagcgcccccucuccuccggcgucuacaugggcaaccucuccucccagcagcucgaccagcgccgcgcccuccucaacaugaucggcaugaccggcggcaaccagggcgccuccaccggccgcgacggcaucguccgcgucugggacgucaagaacgccgagcuccucaacaaccaguucggcaccaugcccucccucacccucgccugccucaccaagcagggccaggucgaccucaacgacgccguccaggcccucaccgaccucggccucaucuacaccgccaaguaccccaacuccuccgaccucgaccgccucucccagucccaccccauccucaacaugaucgacaccaagaaguccucccucaacaucuccggcuacaacuucucccucggcgccgccgucaaggccggcgccugcaugcucgacggcggcaacaugcucgagaccaucaaggucuccccccagaccauggacggcauccucaaguccauccucaaggucaagaagucccucggcauguucgucuccgacacccccggcgagcgcaaccccuacgagaacauccucuacaagaucugccucuccggcgacggcuggcccuacaucgccucccgcaccuccaucaucggccgcgccugggagaacaccaucgucgaccucgaggccgacaacaagccccagaaguccggcaacaacggcuccaaccgcucccuccaguccgccggcuuccccuccggccucaccuacucccagcucaugacccucaaggacuccaugcuccagcucgaccccaacgccaagaccuggauggacaucgagggccgccccgacgaccccgucgagaucgcccucuaccagcccuccuccggcugcuacauccacuucuuccgcgagcccaccgaccucaagcaguucaagcaggacgccaaguacucccacggcaucgacgucuccgaccucuucgccgcccagcccggccucaccuccgccgucaucgaggcccucccccgcaacauggucaucaccugccagggcuccgaggacaucaagaagcuccucgagucccagggccgcaaggacaucaagcucgucgacaucucccucuccaagcucgacucccgcaaguucgagaacgucgucugggaccaguacaaggaccucugccacaugcacaccggcaucgucgucgagaagaagaagcgcggcggcaaggaggagaucaccccccacugcgcccucauggacugcaucauguucgacgccgccgucaugggcggccucgacgcccgcguccuccgcgccguccucccccgcgacauggucuuccgcaccuccacccccaaggucguccucuga

SEQ ID NO: 8390 - RNA, 1710 nt, Artificial Sequence
  derived and/or modified CDS sequence (opt2) from LASV(Lassa virus/H.sapiens-wt/NGA/2016/ISTH_1546;Clade II)__AVO03538__NP
auguccgccuccaaggaggucaaguccuuccucuggacccagucccuccgccgcgagcucuccggcuacugcuccaacaucaagcuccaggucgucaaggacgcccaggcccuccuccacggccucgacuucuccgaggucuccaacguccagcgccucaugcgcaagcagaagcgcgacgacggcgaccucaagcgccuccgcgaccucaaccaggccgucaacaaccucgucgagcucaaguccacccagcagaaguccguccuccgcgucggcacccucuccuccgacgaccuccucauccucgccgccgaccucgagaagcucaaguccaaggucauccgcaccgagcgcccccucuccuccggcgucuacaugggcaaccucuccucccagcagcucgaccagcgccgcgcccuccucaacaugaucggcaugaccggcggcaaccagggcaccaacgccggccgcgacggcaucguccgcaucugggacgucaagaacgccgagcuccucaacaaccaguucggcaccaugcccucccucacccucgccugccucaccaagcagggccaggucgaccucaacgacgucguccaggcccucaccgaccucggccucaucuacaccgccaaguaccccaacuccuccgaccucgaccgccucucccagucccaccccauccucaacaugaucgacaccaagaaguccucccucaacaucuccggcuacaacuucucccucggcgccgccgucaaggccggcgccugcaugcucgacggcggcaacaugcucgagaccaucaaggucuccccccagaccauggacggcauccucaaguccauccucaaggucaagcgcucccucggcauguucgucuccgacacccccggcgagcgcaaccccuacgagaacauccucuacaagaucugccucuccggcgacggcuggcccuacaucgccucccgcaccuccaucaucggccgcgccugggagaacaccaucgucgaccucgagaccaacaacaagccccagaagcccggcaacaacggcuccaaccgcucccuccaguccgccggcuuccccgccggccucaccuacucccagcucaugacccucaaggacuccaugcuccagcucgaccccaacgccaagaccuggauggacaucgagggccgccccgacgaccccgucgagaucgcccucuaccagcccuccuccggcugcuacauccacuucuuccgcgagcccaccgaccucaagcaguucaagcaggacgccaaguacucccacggcaucgaccucuccgaccucuucgccgcccagcccggccucaccuccgccgucaucgaggcccucccccgcaacauggucaucaccugccagggcuccgaggacaucaugaagcuccucgagucccagggccgcaaggacaucaagcucgucgacaucucccucuccaaguccgacucccgcaaguucgagaacgccgucugggaccaguacaaggaccucugccacaugcacaccggcaucgucgucgagaagaagaagaagggcggcaaggaggagaucaccccccacugcgcccucauggacugcaucauguucgacgccgccgucaugggcggccucgacgccaagguccuccgcgccguccuccccaaggacauggucuuccgcaccuccacccccaaggucguccucuga

SEQ ID NO: 8391 - RNA, 1710 nt, Artificial Sequence
  derived and/or modified CDS sequence (opt2) from LASV(Lassa virus/H.sapiens-wt/NGA/2016/ISTH_1568;Clade II)__AVO03562__NP
auguccgccuccaaggaggucaaguccuuccucuggacccagucccuccgccgcgagcucuccggcuacugcuccuccaucaagcuccaggucgucaaggacgcccaggcccuccuccacggccucgacuucuccgaggucuccaacguccagcgccucaugcgcaagcagaagcgcgacgacuccgaccucaagcgccuccgcgaccucaaccaggccgucaacaaccucgucgagcucaaguccacccagcagaaguccauccuccgcgucggcacccucaccuccgacgaccuccucacccucgccgccgaccucgagaagcucaaguccaaggucauccgcaccgagcgcccccucuccuccggcgucuacaugggcaaccucuccucccagcagcucgagcagcgccgcgcccuccucaacaugaucggcauggucggcggcgcccagggcacccagcccggccgcgacggcgucguccgcgucugggacgucaagaaccccgaccuccucaacaaccaguucggcaccaugcccucccucacccucgccugccucaccaagcagggccaggucgaccucaacgacgccguccucgcccucaccgaccucggccucaucuacaccgccaaguaccccaacuccuccgaccucgaccgccucucccagucccaccccauccucaacauggucgacaccaagaaguccucccucaacaucuccggcuacaacuucucccucggcgccgccgucaaggccggcgccugcaugcucgacggcggcaacaugcucgagaccaucaaggucaccccccagaccauggacggcauccucaaguccauccucaaggucaagcgcucccucggcauguucgucuccgacacccccggcgagcgcaaccccuacgagaacauccucuacaagaucugccucuccggcgacggcuggcccuacaucgccucccgcaccuccaucgucggccgcgccugggagaacaccaccgucgaccucgaguccgacggcaagccccagaaggucggccccgccggcuccaacaagucccuccaguccgccggcuuccccaccggccucaccuacucccagcucaugacccucaaggacuccaugaugcagcucgaccccuccgccaagaccuggaucgacaucgagggccgccccgaggaccccgucgagaucgcccucuaccagcccaucuccggcugcuacauccacuucuuccgcgagcccaccgaccucaagcaguucaagcaggacgccaaguacucccacggcaucgacgucgccgaccucuuccccgcccagcccggccucaccuccgccgucaucgaggcccucccccgcaacaugguccucaccugccagggcuccgacgacaucaagcgccuccucgacucccagggccgccgcgacaucaagcucaucgacaucgcccucuccaaggccgacucccgccgcuucgagaacgccgucugggaccagugcaaggaccucugccacaugcacaccggcgucgucgucgagaagaagaagcgcggcggcaaggaggagaucaccccccacugcgcccucauggacugcaucauguacgacgccgccgucuccggcggccucaacauccccguccuccgcgccguccucccccgcgacauggucuuccgcaccuccucccccaaggucguccucuga

SEQ ID NO: 8392 - RNA, 1710 nt, Artificial Sequence
  derived and/or modified CDS sequence (opt2) from LASV(Lassa virus/H.sapiens-wt/NGA/2016/ISTH_1591;Clade II)__AVO03648__NP
auguccgccuccaaggaggucaaguccuuccucuggacccagucccuccgccgcgagcucuccggcuacugcuccuccaucaagcuccaggucgucaaggacgcccaggcccuccuccacggccucgacuucuccgaggucuccaacguccagcgccucaugcgcaagcagaagcgcgacgacuccgaccucaagcgccuccgcgaccucaaccaggccgucaacaaccucgucgagcucaaguccacccagcagaaguccauccuccgcgucggcacccucaccuccgacgaccuccucacccucgccgccgaccucgagaagcucaaguccaaggucauccgcaccgagcgcccccucuccuccggcgucuacaugggcaaccucuccucccagcagcucgagcagcgccgcgcccuccucaacaugaucggcauggucggcggcgcccagggcacccagcccggccgcgacggcgucguccgcgucugggacgucaagaaccccgaccuccucaacaaccaguucggcaccaugcccucccucacccucgccugccucaccaagcagggccaggucgaccucaacgacgccguccucgcccucaccgaccucggccucaucuacaccgccaaguaccccaacuccuccgaccucgaccgccucucccagucccaccccauccucaacauggucgacaccaagaaguccucccucaacaucuccggcuacaacuucucccucggcgccgccgucaaggccggcgccugcaugcucgacggcggcaacaugcucgagaccaucaaggucaccccccagaccauggacggcauccucaaguccauccucaaggucaagcgcucccucggcauguucgucuccgacacccccggcgagcgcaaccccuacgagaacauccucuacaagaucugccucuccggcgacggcuggcccuacaucgccucccgcaccuccaucgucggccgcgccugggagaacaccaccgucgaccucgaguccgacggcaagccccagaaggucggcuccgccggcuccaacaagucccuccaguccgccggcuuccccaccggccucaccuacucccagcucaugacccucaaggacuccaugaugcagcucgaccccuccgccaagaccuggaucgacaucgagggccgccccgaggaccccgucgagaucgcccucuaccagcccauguccggcugcuacauccacuucuuccgcgagcccaccgaccucaagcaguucaagcaggacgccaaguacucccacggcaucgacgucgccgaccucuuccccgcccagcccggccucaccuccgccgucaucgaggcccucccccgcaacaugguccucaccugccagggcuccgacgacgucaagcgccuccucgacucccagggccgccgcgacaucaagcucaucgacaucgcccucuccaaggccgacucccgccgcuucgagaacgccgucugggaccagugcaaggaccucugccacaugcacaccggcgucgucgucgagaagaagaagcgcggcggcaaggaggagaucaccccccacugcgcccucauggacugcaucauguacgacgccgccgucuccggcggccucaacauccccguccuccgcgccguccucccccgcgacauggucuuccgcaccuccucccccaaggucguccucuga

SEQ ID NO: 8393 - RNA, 1710 nt, Artificial Sequence
  derived and/or modified CDS sequence (opt2) from LASV(Lassa virus/H.sapiens-wt/NGA/2016/ISTH_1604;Clade II)__AVO03542__NP
auguccgccuccaaggaggucaaguccuuccucuggacccagucccuccgccgcgagcucuccggcuacugcuccaacaucaagcuccaggucgucaaggacgcccaggcccuccuccacggccucgacuucuccgaggucuccaacguccagcgccucaugcgcaagcagaagcgcgacgacggcgaccucaagcgccuccgcgaccucaaccaggccgucaacaaccucgucgagcucaaguccacccagcagaaguccauccuccgcgucggcacccucuccuccgacgaccuccucacccucgccgccgaccucgagaagcucaaguccaaggucauccgcaccgagcgcccccucuccuccggcgucuacaugggcaaccucuccacccagcagcucgaccagcgccgcgcccuccucaacaugaucggcauggucggcggcucccagggcaccuccgccggccgcgacggcaucguccgcgucugggacguccgcaaccccgagcuccucaacaaccaguucggcaccaugcccucccucacccucgccugccucaccaagcagggccaggucgaccucaacgacgccguccaggcccucaccgaccucggccucaucuacaccgccaaguaccccaacuccuccgaccucgaccgccucucccagucccaccccauccucaacaugaucgacaccaagaaguccuccaucaacaucuccggcuacaacuucucccucggcgccgccgucaaggccggcgccugcaugcucgacggcggcaacaugcucgagaccaucaaggucuccccccaguccauggacggcauccucaaguccauccucaaggucaagcgcucccucggcauguucgucuccgacacccccggcgagcgcaaccccuacgagaacauccucuacaagaucugccucuccggcgacggcuggcccuacaucgccucccgcaccuccaucaccggccgcgccugggagaacaccgucgucgaccucgaguccgacaacaagcccaagaagcccggcaacaacgaguccaaccgcucccuccaguccgccggcuuccccgccggccucaccuacucccagcucaugacccucaaggacuccaugcuccagcucgaccccaacgccaagaccuggauggacaucgagggccgccccgacgaccccgucgagaucgcccucuaccagcccaacuccggcugcuacauccacuucuuccgcgagcccaccgaccucaagcaguucaagcaggacgccaaguacucccacggcaucgacaucuccgaccucuucgccgcccagcccggccucaccuccgccgucaucgaggcccucccccgcaacauggucaucaccugccagggcuccgaggacgucaagaagcuccucgagucccagggccgcaaggacauccgccucgucgacaucucccucuccaaggccgacucccgcaaguucgagaacgccgucugggaccaguacaaggaccucugccacaugcacaccggcaucgucgucgagaagaagaagaagggcggcaaggaggagaucaccccccacugcgcccucauggacugcaucauguucgacgccgccgucaugaacggccucgacgcccgcguccuccgcgccguccucccccgcgacauggucuuccgcaccuccaccccccgcgucguccucuga

SEQ ID NO: 8394 - RNA, 1710 nt, Artificial Sequence
  derived and/or modified CDS sequence (opt2) from LASV(Lassa virus/H.sapiens-wt/NGA/2016/ISTH_1609;Clade II)__AVO03662__NP
auguccgccuccaaggaggucaaguccuuccucuggacccagucccuccgccgcgagcucuccggcuacugcuccaacaucaagcuccaggucgucaaggacgcccaggcccuccuccacggccucgacuucuccgaggucuccaacguccagcgccucaugcgcaagcagaagcgcgacgacggcgaccucaagcgccuccgcgaccucaaccaggccgucaacaaccucgucgagcucaaguccacccagcagaaguccauccuccgcgucggcacccucuccuccgacgaccuccucauccucgccgccgaccucgagaagcucaaguccaaggucauccgcaccgagcgcccccucuccuccggcgucuacaugggcaaccucuccucccagcagcucgaccagcgccgcgcccuccucaacaugaucggcaugaccggcggcaaccagggcaccaacaccggccgcgacggcaucguccgcgucugggacgucaagaacgccgagcuccucaacaaccaguucggcaccaugcccucccucacccucgccugccucaccaagcagggccaggucgaccucaacgacgccguccaggcccucaccgaccucggccucaucuacaccgccaaguaccccaacuccuccgaccucgaccgccucucccagucccaccccauccucaacaugaucgacaccaagaaguccucccucaacaucuccggcuacaacuucucccucggcgccgccgucaaggccggcgccugcaugcucgacggcggcaacaugcucgagaccaucaaggucuccccccagaccauggacggcauccucaaguccauccucaaggucaagaagucccucggcauguucgucuccgacacccccggcgagcgcaaccccuacgagaacauccucuacaagaucugccucuccggcgacggcuggcccuacaucgccucccgcaccuccaucaccggccgcgccugggagaacaccauggucgaccucgagaccaacaacaagucccagaagcccggcaacaacggcuccaaccgcucccuccaguccgccggcuuccccgccggccucaccuacucccagcucaugacccucaaggacuccaugcuccagcucgaccccaacgccaagaccuggauggacaucgagggccgccccgacgaccccgucgagaucgcccucuaccagcccuccuccggcugcuacauccacuucuuccgcgagcccaccgaccucaagcaguucaagcaggacgccaaguacucccacggcaucgacaucuccgaccucuucgccgcccagcccggccucaccuccgccgucaucgagguccucccccgcaacaugaccaucaccugccagggcuccgaggacaucaagaagcuccucgagucccagggccgcaaggacaucaagcucgucgacaucucccucuccaagcucgacucccgcaaguucgagaacgccgucugggaccaguucaaggaccucugccacaugcacaccggcaucgucgucgagaagaagaagaagggcggcaaggaggagaucaccccccacugcgcccucauggacugcaucauguucgacgccgccgucaugggcggccucgacgccaagguccuccgcgccguccucccccgcgacauggucuuccgcaccuccacccccaaggucguccucuga

SEQ ID NO: 8395 - RNA, 1710 nt, Artificial Sequence
  derived and/or modified CDS sequence (opt2) from LASV(Lassa virus/H.sapiens-wt/NGA/2016/ISTH_1610;Clade II)__AVO03604__NP
auguccgccuccaaggagaucaaguccuuccucuggacccagucccuccgccgcgagcucuccggcuacugcuccuccaucaagcuccaggucgucaaggacgcccaggcccuccuccacggccucgacuucuccgaggucuccaacguccagcgccucaugcgcaagcagaagcgcgacgacuccgaccucaagcgccuccgcgaccucaaccaggccgucaacaaccucgucgagcucaaguccacccagcagaaguccauccuccgcgucggcacccucaccuccgacgaccuccucacccucgccgccgaccucgagaagcucaaguccaaggucauccgcaccgagcgcccccucuccuccggcgucuacaugggcaaccucuccacccagcagcucgagcagcgccgcgcccuccucaacaugaucggcauggucggcggcgcccagggcacccagcccggccgcgacggcgucguccgcgucugggacgucaagaaccccgaccuccucaacaaccaguucggcaccaugcccucccucacccucgccugccucaccaagcagggccaggucgaccucaacgacgccguccucgcccucaccgaccucggccucaucuacaccgccaaguaccccaacuccuccgaccucgaccgccucucccagucccaccccauccucaacauggucgacaccaagaaguccucccucaacaucuccggcuacaacuucucccucggcgccgccgucaaggccggcgccugcaugcucgacggcggcaacaugcucgagaccaucaaggucaccccccagaccauggacggcauccucaaguccauccucaaggucaagcgcucccucggcauguucgucuccgacacccccggcgagcgcaaccccuacgagaacauccucuacaagaucugccucuccggcgacggcuggcccuacaucgccucccgcaccuccaucgucggccgcgccugggagaacaccaccgucgaccucgaguccgacggcaagccccagaaggucggcaccgccggcuccaacaagucccuccaguccgccggcuuccccaccggccucaccuacucccagcucaugacccucaaggacuccaugaugcagcucgaccccuccgccaagaccuggaucgacaucgagggccgccccgaggaccccgucgagaucgcccucuaccagcccauguccggcugcuacauccacuucuuccgcgagcccaccgaccucaagcaguucaagcaggacgccaaguacucccacggcaucgacgucgccgaccucuuccccgcccagcccggccucaccuccgccgucaucgaggcccucccccgcaacaugguccucaccugccagggcuccgacgacaucaagaagcuccucgacucccagggccgccgcgacaucaagcucaucgacaucgcccucuccaagaccgacucccgccgcuucgagaacgccgucugggaccagugcaaggaccucugccacaugcacaccggcgucgucgucgagaagaagaagcgcggcggcaaggaggagaucaccccccacugcgcccucauggacugcaucauguacgacgccgccgucuccggcggccucaacauccccguccuccgcgccguccucccccgcgacauggucuuccgcaccuccucccccaaggucguccucuga

SEQ ID NO: 8396 - RNA, 1710 nt, Artificial Sequence
  derived and/or modified CDS sequence (opt2) from LASV(Lassa virus/H.sapiens-wt/NGA/2018/ISTH_0541;Clade II)__AVV65114__NP
auguccgccuccaaggaggucaaguccuuccucuggacccagucccuccgccgcgagcucuccggcuacugcuccuccaucaagcuccaggucgucaaggacgcccaggcccuccuccacggccucgacuucuccgaggucuccaacguccagcgccucaugcgcaagcagaagcgcgacgacuccgaccucaagcgccuccgcgaccucaaccaggccgucaacaaccucgucgagcucaaguccacccagcagaaguccauccuccgcgucggcacccucaccuccgacgaccuccucacccucgccgccgaccucgagaagcucaaguccaaggucauccgcaccgagcgcccccucuccuccggcgucuacaugggcaaccucuccacccagcagcucgagcagcgccgcgcccuccucaacaugaucggcauggucggcggcgcccagggcacccagcccggccgcgacggcgucguccgcgucugggacgucaagaaccccgaccuccucaacaaccaguucggcaccaugcccucccucacccucgccugccucaccaagcagggccaggucgaccucaacgacgccguccucgcccucaccgaccucggccucaucuacaccgccaaguaccccaacuccuccgaccucgaccgccucucccagucccaccccauccucaacauggucgacaccaagaaguccucccucaacaucuccggcuacaacuucucccucggcgccgccgucaaggccggcgccugcaugcucgacggcggcaacaugcucgagaccaucaaggucaccccccagaccauggacggcauccucaaguccauccucaaggucaagcgcucccucggcauguucgucuccgacacccccggcgagcgcaaccccuacgagaacauccucuacaagaucugccucuccggcgacggcuggcccuacaucgccucccgcaccuccaucgucggccgcgccugggagaacaccaccgucgaccucgaguccgacggcaagccccagaaggucggcgucgccggcuccaacaagucccuccaguccgccggcuuccccaccggccucaccuacucccagcucaugacccucaaggacuccaugaugcagcucgaccccuccgccaagaccuggaucgacaucgagggccgccccgaggaccccgucgagaucgcccucuaccagcccauguccggcugcuacauccacuucuuccgcgagcccaccgaccucaagcaguucaagcaggacgccaaguucucccacggcaucgacgucgccgaccucuuccccgcccagcccggccucaccuccgccgucaucgaggcccucccccgcaacaugguccucaccugccagggcuccgacgacaucaagcgccuccucgacucccagggccgccgcgacaucaagcucaucgacaucgcccucuccaaggccgacucccgccgcuucgagaacgccgucugggaccagugcaaggaccucugccacaugcacaccggcgucgucgucgagaagaagaagcgcggcggcaaggaggagaucaccccccacugcgcccucauggacugcaucauguacgacgccgccgucuccggcggccucaacauccccguccuccgcgccguccucccccgcgacauggucuuccgcaccuccucccccaaggucguccucuga

SEQ ID NO: 8397 - RNA, 1710 nt, Artificial Sequence
  derived and/or modified CDS sequence (opt2) from LASV(Lassa virus/H.sapiens-wt/NGA/2018/ISTH_0664;Clade II)__AVV65096__NP
auguccgccuccaaggaggucaaguccuuccucuggacccagucccuccgccgcgagcucuccggcuacugcuccuccaucaagcuccaggucgucaaggacgcccaggcccuccuccacggccucgacuucuccgaggucuccaacguccagcgccucaugcgcaagcagaagcgcgacgacuccgaccucaagcgccuccgcgaccucaaccaggccgucaacaaccucgucgagcucaaguccacccagcagaaguccauccuccgcgucggcacccucaccuccgacgaccuccucacccucgccgccgaccucgagaagcucaaguccaaggucauccgcaccgagcgcccccucuccuccggcgucuacaugggcaaccucuccacccagcagcucgagcagcgccgcgcccuccucaacaugaucggcauggucggcggcacccagggcacccagcccggccgcgacggcgucguccgcgucugggacgucaagaaccccgaccuccucaacaaccaguucggcaccaugcccucccucacccucgccugccucaccaagcagggccaggucgaccucaacgacgccguccucgcccucaccgaccucggccucaucuacaccgccaaguaccccaacuccuccgaccucgaccgccucucccagucccaccccauccucaacauggucgacaccaagaaguccucccucaacaucuccggcuacaacuucucccucggcgccgccgucaaggccggcgccugcaugcucgacggcggcaacaugcucgagaccaucaaggucaccccccagaccauggacggcauccucaaguccauccucaaggucaagaagucccucggcauguucgucuccgacacccccggcgagcgcaaccccuacgagaacauccucuacaagaucugccucuccggcgacggcuggcccuacaucgccucccgcaccuccaucgucggccgcgccugggagaacaccaccgucgaccucgagcccgacggcaagcuccagaaggucggcaccgucggcuccaacaagucccuccaguccgccggcuuccccaccggccucaccuacucccagcucaugacccucaaggacuccaugaugcagcucgaccccuccgccaagaccuggaucgacaucgagggccgccccgaggaccccgucgagaucgcccucuaccagcccauguccggcugcuacauccacuucuuccgcgagcccaccgaccucaagcaguucaagcaggacgccaaguacucccacggcaucgacgucgccgaccucuuccccgcccagcccggccucaccuccgccgucaucgaggcccucccccgcaacaugguccucaccugccagggcuccgacgacaucaagcgccuccucgacucccagggccgccgcgacaucaagcucaucgacaucucccucuccaaggccgacucccgccgcuucgagaacgccgucugggaccagugcaaggaccucugccacaugcacaccggcgucgucgucgagaagaagaagcgcggcggcaaggaggagaucaccccccacugcgcccucauggacugcaucauguacgacgccgccgucuccggcggccucaacauccccguccuccgcgccguccucccccgcgacauggucuuccgcaccuccucccccaaggucguccucuga

SEQ ID NO: 8398 - RNA, 1710 nt, Artificial Sequence
  derived and/or modified CDS sequence (opt2) from LASV(Lassa virus/H.sapiens-wt/NGA/2018/ISTH_0959;Clade II)__AVV65100__NP
auguccgccuccaaggaggucaaguccuuccucuggacccagucccuccgccgcgagcucuccggcuacugcuccaacaucaagcuccaggucgucaaggacgcccaggcccuccuccacggccucgacuucuccgaggucuccaacguccagcgccucaugcgcaagcagaagcgcgacgacuccgaccucaagcgccuccgcgaccucaaccaggccgucaacaaccucgucgagcucaaguccacccagcagaaguccauccuccgcgucggcacccucaccuccgacgaccuccucacccucgccgccgaccucgagaagcucaaguccaaggucauccgcaccgagcgcccccucuccuccggcgucuacaugggcaaccucuccacccagcagcucgagcagcgccgcgcccuccucaaccucaucggcauggucggcggcgcccagggcacccagcccggccgcgacggcgucguccgcgucugggacgucaagaaccccgaccuccucaacaaccaguucggcaccaugcccucccucacccucgccugccucaccaagcagggccaggucgaccucaacgacgucguccucgcccucaccgaccucggccucaucuacaccgccaaguaccccaacuccuccgaccucgaccgccucucccagucccaccccauccucaacauggucgacaccaagaaguccucccucaacaucuccggcuucaacuucucccucggcgccgccgucaaggccggcgccugcaugcucgacggcggcaacaugcucgagaccaucaaggucaccccccagaccauggacggcauccucaaguccauccucaaggucaagaagucccucggcauguucgucuccgacacccccggcgagcgcaaccccuacgagaacauccucuacaagaucugccucuccggcgacggcuggcccuacaucgccucccgcaccuccaucgucggccgcgccugggagaacaccaccgucgaccucgaguccgacggcaagccccacaaggucggcaccgccggcuccaacaagucccuccaguccgccggcuuccccaccggccucaccuacucccagcucaugacccucaaggacuccaugaugcagcucgaccccuccgccaagaccuggaucgacaucgagggccgccccgaggaccccgucgagaucgcccucuaccagcccauguccggcugcuacauccacuucuuccgcgagcccaccgaccucaagcaguucaagcaggacgccaaguacucccacggcaucgacgucgccgaccucuuccccgcccagcccggccucaccuccgccgucaucgaggcccucccccgcaacaugguccucaccugccagggcuccgacgacaucaagcgccuccucgacucccagggccgcaaggacaucaagcucaucgacaucgcccucuccaagaccgacucccgccgcuucgagaacgccgucugggaccagugcaaggaccucugccacaugcacaccggcgucgucgucgagaagaagaagcgcggcggcaaggaggagaucaccccccacugcgcccucauggacugcaucauguacgacgccgccgucuccggcggccucaacauccccguccuccgcgccguccucccccgcgacauggucuuccgcaccuccucccccaaggucguccucuga

SEQ ID NO: 8399 - RNA, 1710 nt, Artificial Sequence
  derived and/or modified CDS sequence (opt2) from LASV(Lassa virus/H.sapiens-wt/NGA/2018/ISTH_1024;Clade II)__AVV65106__NP
auguccgccuccaaggaggucaaguccuuccucuggacccagucccuccgccgcgagcucuccggcuacugcuccuccaucaagcuccaggucgucaaggacgcccaggcccuccuccacggccucgacuucuccgaggucuccaacguccagcgccucaugcgcaagcagaagcgcgacgacuccgaccucaagcgccuccgcgaccucaaccaggccgucaacaaccucgucgagcucaaguccacccagcagaaguccguccuccgcgucggcacccucuccuccgacgaccuccucacccucgccgccgaccucgagaagcucaaguccaaggucauccgcaccgagcgcccccucuccuccggcgucuacaugggcaaccucuccacccagcagcucgagcagcgccgcgcccuccucaacaugaucggcauggucggcggcgcccagggcacccagcccggccgcgacggcgucguccgcgucugggacgucaagaaccccgaccuccucaacaaccaguucggcaccaugcccucccucacccucgccugccucaccaagcagggccaggucgaccucaacgacgccguccucgcccucaccgaccucggccucaucuacaccgccaaguaccccaacuccuccgaccucgaccgccucucccagucccaccccauccucaacauggucgacaccaagaaguccucccucaacaucuccggcuacaacuucucccucggcgccgccgucaaggccggcgccugcaugcucgacggcggcaacaugcucgagaccaucaaggucaccccccagaccaucgacggcauccucaaguccauccucaaggucaagaagucccucggcauguucgucuccgacacccccggcgagcgcaaccccuacgagaacauccucuacaagaucugccucuccggcgacggcuggcccuacaucgccucccgcaccuccaucgucggccgcgccugggagaacaccaccgucgaccucgaguccgacggcaagccccagaaggucggcaccgccggcuccaacaagucccuccaguccgccggcuuccccaccggccucaccuacucccagcucaugacccucaaggacuccaugaugcagcucgaccccuccgccaagaccuggaucgacaucgagggccgccccgaggaccccgucgagaucgcccucuaccagcccauguccggcugcuacauccacuucuuccgcgagcccaccgaccucaagcaguucaagcaggacgccaaguacucccacggcaucgacgucgucgaccucuuccccgcccagcccggccucaccuccgccgucaucgaggcccucccccgcaacaugguccucaccugccagggcuccgacgacaucaagcgccuccucgacucccagggccgccgcgacaucaagcucaucgacaucgcccucuccaaggccgacucccgccgcuucgagaacgccgucugggaccagugcaaggaccucugccacaugcacaccggcgucgucgucgagaagaagaagcgcggcggcaaggaggagaucaccccccacugcgcccucauggacugcaucauguacgacgccgccgucuccggcggccucaacauccccguccuccgcgccguccucccccgcgacauggucuuccgcaccuccucccccaaggucguccucuga

SEQ ID NO: 8400 - RNA, 1710 nt, Artificial Sequence
  derived and/or modified CDS sequence (opt2) from LASV(Lassa virus/H.sapiens-wt/NGA/2018/ISTH_1079;Clade II)__AVV65108__NP
auguccgccuccaaggaggucaaguccuuccucuggacccagucccuccgccgcgagcucuccggcuacugcuccaacaucaagcuccaggucgucaaggacgcccaggcccuccuccacggccucgacuucuccgaggucuccaacguccagcgccucaugcgcaagcagaagcgcgacgacuccgaccucaagcgccuccgcgaccucaaccaggccgucaacaaccucgucgagcucaaguccacccagcagaaguccauccuccgcgucggcacccucaccuccgacgaccuccucacccucgccgccgaccucgagaagcucaaguccaaggucauccgcaccgagcgcccccucuccuccggcgucuacaugggcaaccucuccacccagcagcucgagcagcgccgcgcccuccucaacaugaucggcauggucggcggcacccagggcacccagcccggccgcgacggcgucguccgcgucugggacgucaagaaccccgaccuccucaacaaccaguucggcaccaugcccucccucacccucgccugccucaccaagcagggccaggucgaccucaacgacgccguccucgcccucaccgaccucggccucaucuacaccgccaaguaccccaacuccuccgaccucgaccgccucucccagucccaccccauccucaacauggucgacaccaagaaguccucccucaacaucuccggcuacaacuucucccucggcgccgccgucaaggccggcgccugcaugcucgacggcggcaacaugcucgagaccaucaaggucaccccccagaccauggacggcauccucaaguccauccucaaggucaagaagucccucggcauguucgucuccgacacccccggcgagcgcaaccccuacgagaacauccucuacaagaucugccucuccggcgacggcuggcccuacaucgccucccgcaccuccaucgucggccgcgccugggagaacaccaccgucgaccucgaguccgacggcaagccccagaaggucggcaccgccggcuccaacaagucccuccaguccgccggcuuccccaccggccucaccuacucccagcucaugacccucaaggacuccaugaugcagcucgaccccuccgccaagaccuggaucgacaucgagggccgccccgaggaccccgucgagaucgcccucuaccagcccaucuccggcugcuacauccacuucuuccgcgagcccaccgaccucaagcaguucaagcaggacgccaaguacucccacggcaucgacgucgccgaccucuuccccgcccagcccggccucaccuccgccgucaucgaggcccucccccgcaacaugguccucaccugccagggcuccgacgacaucaagcgccuccucgacucccagggccgccgcgacaucaagcucaucgacaucucccucuccaaggccgacucccgccgcuucgagaacgccgucugggaccagugcaaggaccucugccacaugcacaccggcgucgucgucgagaagaagaagcgcggcggcaaggaggagaucaccccccacugcgcccucauggacugcaucauguacgacgccgccgucuccggcggccucaacauccccguccuccgcgccguccucccccgcgacauggucuuccgcaccuccucccccaaggucguccucuga

SEQ ID NO: 8401 - RNA, 1710 nt, Artificial Sequence
  derived and/or modified CDS sequence (opt2) from LASV(Lassa virus/H.sapiens-wt/NGA/2018/ISTH_1375;Clade II)__AVV65116__NP
auguccgccuccaaggaggucaaguccuuccucuggacccagucccuccgccgcgagcucuccggcuacugcuccaacaucaagcuccaggucgucaaggacgcccaggcccuccuccacggccucgacuucuccgaggucuccaacguccagcgccucaugcgcaagcagaagcgcgacgacuccgaccucaagcgccuccgcgaccucaaccaggccgucaacaaccucgucgagcucaaguccacccagcagaaguccauccuccgcgucggcacccucaccuccgacgaccuccucauccucgccgccgaccucgagaagcucaaguccaaggucauccgcaccgagcgcccccucuccuccggcgucuacaugggcaaccucuccacccagcagcucgagcagcgccgcgcccuccucaaccucaucggcauggucggcggcgcccagggcacccagcccggccgcgacggcgucguccgcgucugggacgucaagaaccccgaccuccucaacaaccaguucggcaccaugcccucccucacccucgccugccucaccaagcagggccaggucgaccucaacgacgccguccucgcccucaccgaccucggccucaucuacaccgccaaguaccccaacuccuccgaccucgaccgccucucccagucccaccccauccucaacauggucgacaccaagaaguccucccucaacaucuccggcuucaacuucucccucggcgccgccgucaaggccggcgccugcaugcucgacggcggcaacaugcucgagaccauccgcaucaccccccagaccauggacggcauccucaaguccauccucaaggucaagaagucccucggcauguucgucuccgacacccccggcgagcgcaaccccuacgagaacauccucuacaagaucugccucuccggcgacggcuggcccuacaucgccucccgcaccuccaucgucggccgcgccugggagaacaccaccgucgaccucgaguccgacggcaagccccacaaggucggcaccgccggcuccaacaagucccuccaguccgccggcuuccccaccggccucaccuacucccagcucaugacccucaaggacuccaugaugcagcucgaccccuccgccaagaccuggaucgacaucgagggccgccccgaggaccccgucgagaucgcccucuaccagcccauguccggcugcuacauccacuucuuccgcgagcccaccgaccucaagcaguucaagcaggacgccaaguacucccacggcaucgacgucgccgaccucuuccccgcccagcccggccucaccuccgccgucaucgaggcccucccccgcaacaugguccucaccugccagggcuccgacgacaucaagcgccuccucgacucccagggccgccgcgacaucaagcucaucgacaucgcccucuccaaggccgacucccgccgcuucgagaacgccgucugggaccagugcaaggaccucugccacaugcacaccggcgucgucgucgagaagaagaagcgcggcggcaaggaggagaucaccccccacugcgcccucauggacugcaucauguacgacgccgccgucuccggcggccucaacauccccguccuccgcgccguccucccccgcgacauggucuuccgcaccuccucccccaaggucguccucuga

SEQ ID NO: 8402 - RNA, 1710 nt, Artificial Sequence
  derived and/or modified CDS sequence (opt2) from LASV(Lassa virus/H.sapiens-wt/NGA/2018/ISTH_1381;Clade II)__AVV65112__NP
auguccgucuccaaggaggucaaguccuuccucuggacccagucccuccgccgcgagcucuccggcuacugcuccuccaucaagcuccaggucgucaaggacgcccaggcccuccuccacggccucgacuucuccgaggucuccaacguccagcgccucaugcgcaagcagaagcgcgacgacuccgaccucaagcgccuccgcgaccucaaccaggccgucaacaaccucgucgagcucaaguccacccagcagaaguccauccuccgcgucggcacccucaccuccgacgaccuccucacccucgccgccgaccucgagaagcucaaguccaaggucauccgcaccgagcgcccccucuccuccggcgucuacaugggcaaccucuccacccagcagcucgagcagcgccgcgcccuccucaacaugaucggcauggccggcggcgcccagggcacccagcccggccgcgacggcgucguccgcgucugggacgucaagaaccccgaccuccucaacaaccaguucggcaccaugcccucccucacccucgccugccucaccaagcagggccaggucgaccucaacgacgccguccucgcccucaccgaccucggccucaucuacaccgccaaguaccccaacuccuccgaccucgaccgccucucccagucccaccccauccucaacauggucgacaccaagaaguccucccucaacaucuccggcuacaacuucucccucggcgccgccgucaaggccggcgccugcaugcucgacggcggcaacaugcucgagaccaucaaggucaccccccagaccauggacggcauccucaaguccauccucaaggucaagcgcucccucggcauguucgucuccgacacccccggcgagcgcaaccccuacgagaacauccucuacaagaucugccucuccggcgacggcuggcccuacaucgccucccgcaccuccaucgucggccgcgccugggagaacaccaccgucgaccucgaguccgacggcaagccccagaagaucggcaacaccggcuccaacaagucccuccaguccgccggcuuccccaccggccucaccuacucccagcucaugacccucaaggacuccaugaugcagcucgaccccuccgccaagaccuggaucgacaucgagggccgccccgaggaccccgucgagaucgcccucuaccagcccauguccggcugcuacauccacuucuuccgcgagcccaccgaccucaagcaguucaagcaggacgccaaguacucccacggcaucgacgucgccgaccucuuccccgcccagcccggccucaccuccgccgucaucgaggcccucccccgcaacaugguccucaccugccagggcuccgacgacaucaagcgccuccucgagucccagggccgccgcgacaucaagcucaucgacaucgcccucuccaaggccgacucccgccgcuucgagaacgccgucugggaccagugcaaggaccucugccacaugcacaccggcgucgucgucgagaagaagaagcgcggcggcaaggaggagaucaccccccacugcgcccucauggacugcaucauguacgacgccgccgucuccggcggccucaacauccccguccuccgcgccguccucccccgcgacauggucuuccgcaccuccucccccaaggucguccucuga

SEQ ID NO: 8403 - RNA, 1710 nt, Artificial Sequence
  derived and/or modified CDS sequence (opt2) from LASV(LASV003-NIG-2008;Clade II)__AIT17581__NP
auguccgccuccaaggaggucaaguccuuccucuggacccagucccuccgccgcgagcucuccggcuacugcuccuccaucaagcuccaggucgucaaggacgcccaggcccuccuccacggccucgacuucuccgaggucuccaacguccagcgccucaugcgcaagcagaagcgcgacgacuccgaccucaagcgccuccgcgaccucaaccaggccgucaacaaccucgucgagcucaaguccacccagcagaaguccguccuccgcgucggcacccucaccuccgacgaccuccucacccucgccgccgaccucgagaagcucaaguccaaggucauccgcaccgagcgcccccucuccuccggcgucuacaugggcaaccucuccgcccagcagcucgagcagcgccgcacccuccucaacaugaucggcauggucggcggcgcccagggcacccagcccggccgcgacggcgucguccgcgucugggacgucaagaaccccgaccuccucaacaaccaguucggcaccaugcccucccucacccucgccugccucaccaagcagggccaggucgaccucaacgacgucguccucgcccucaccgaccucggccucaucuacaccgccaaguaccccaacuccuccgaccucgaccgccucucccagucccaccccauccucuccauggucgacaccaagaaguccucccucaacaucuccggcuacaacuucucccucggcgccgccgucaaggccggcgccugcaugcucgacggcggcaacaugcucgagaccaucaaggucaccccccagaccauggacggcauccucaaguccauccucaaggucaagaagucccucggcauguucgucuccgacacccccggcgagcgcaaccccuacgagaacauccucuacaagaucugccucuccggcgacggcuggcccuacaucgccucccgcaccuccaucgucggccgcgccugggagaacaccaccgucgaccucgaguccgacggcaagccccagaaggucggcaccgccggcuccaacaagucccuccaguccgccggcuuccccaccggccucaccuacucccagcucaugacccucaaggacuccaugaugcagcucgaccccuccgccaagaccuggaucgacaucgagggccgccccgaggaccccgucgagaucgcccucuaccagcccauguccggcugcuacauccacuucuuccgcgagcccaccgaccucaagcaguucaagcaggacgccaaguacucccacggcaucgacgucaccgaccucuuccccgcccagcccggccucaccuccgccgucaucgaggcccucccccgcaacaugguccucaccugccagggcuccgacgacaucaagcgccuccucgacucccagggccgccgcgacaucaagcucaucgacaucgcccucuccaaggccgacucccgccgcuucgagaacgccgucugggaccagugcaaggaccucugccacaugcacaccggcgucgucgucgagaagaagaagcgcggcggcaaggaggagaucaccccccacugcgcccucauggacugcaucauguacgacgccgccgucuccggcggccucaacauccccguccuccgcgccguccucccccgcgacauggucuuccgcaccuccucccccaaggucguccucuga

SEQ ID NO: 8404 - RNA, 1710 nt, Artificial Sequence
  derived and/or modified CDS sequence (opt2) from LASV(LASV035-NIG-2009;Clade II)__AIT17589__NP
auguccgccuccaaggaggucaaguccuuccucuggacccagucccuccgccgcgagcucuccggcuacugcuccuccaucaagcuccaggucgucaaggacgcccaggcccuccuccacggccucgacuucuccgaggucuccaacguccagcgccucaugcgcaagcagaagcgcgacgacuccgaccucaagcgccuccgcgaccucaaccaggccgucaacaaccucgucgagcucaaguccacccagcagaaguccauccuccgcgucggcacccucaccuccgacgaccuccucacccucgccgccgaccucgagaagcucaaguccaaggucauccgcaccgagcgcccccucuccuccggcgucuacaugggcaaccucuccgcccagcagcucgagcagcgccgcgcccuccucaacaugaucggcauggucggcggcgcccagggcacccagcccggccgcgacggcgucguccgcgucugggacgucaagaaccccgaccuccucaacaaccaguucggcaccaugcccucccucacccucgccugccucaccaagcagggccaggucgaccucaacgacgccguccucgcccucaccgaccucggccucaucuacaccgccaaguaccccaacuccuccgaccucgaccgccucucccagucccaccccauccucaacauggucgacaccaagaaguccucccucaacaucuccggcuacaacuucucccucggcgccgccgucaaggccggcgccugcaugcucgacggcggcaacaugcucgagaccaucaaggucaccccccagaccauggacggcauccucaaguccauccucaaggucaagcgcucccucggcauguucgucuccgacacccccggcgagcgcaaccccuacgagaacauccucuacaagaucugccucuccggcgacggcuggcccuacaucgccucccgcaccuccaucgucggccgcgccugggagaacaccaccgucgaccucgaguccgacggcaagccccagaaggucggcaccaccggcuccaacaagucccuccaguccgccggcuuccccaccggccucaccuacucccagcucaugacccucaaggacuccaugaugcagcucgaccccuccgccaagaccuggaucgacaucgagggccgccccgaggaccccgucgagaucgcccucuaccagcccauguccggcugcuacauccacuucuuccgcgagcccaccgaccucaagcaguucaagcaggacgccaaguacucccacggcaucgacgucgccgaccucuuccccgcccagcccggccucaccuccgccgucaucgaggcccucccccgcaacaugguccucaccugccagggcuccgacgacaucaagaagcuccucgacucccagggccgccgcgacaucaagcucaucgacaucgcccucuccaaggccgacucccgcaaguucgagaacgccgucugggaccagugcaaggaccucugccacaugcacaccggcgucgucgucgagaagaagaagcgcggcggcaaggaggagaucaccccccacugcgcccucauggacugcaucauguacgacgccgccgucuccggcggccucaacauccccguccuccgcgccguccucccccgcgacauggucuuccgcaccuccucccccaaggucguccucuga

SEQ ID NO: 8405 - RNA, 1710 nt, Artificial Sequence
  derived and/or modified CDS sequence (opt2) from LASV(LASV042-NIG-2009;Clade II)__AIT17593__NP
auguccgccuccaaggaggucaaguccuuccucuggacccagucccuccgccgcgagcucuccggcuacugcuccuccaucaagcuccaggucgucaaggacgcccaggcccuccuccacggccucgacuucuccgaggucuccaacguccagcgccucaugcgcaagcagaagcgcgacgacggcgaccucaagcgccuccgcgaccucaaccaggccgucaacaaccucgucgagcucaaguccacccagcagaaguccauccuccgcgucggcacccucaccuccgacgaccuccucacccucgccgccgaccucgagaagcucaaguccaaggucauccgcaccgagcgcccccucuccuccggcgucuacaugggcaaccucuccucccagcagcucgagcagcgccgcgcccuccucaacaugaucggcauggucggcggcgcccagggcacccagcccggccgcgacggcgucguccgcgucugggacgucaagaaccccgaccuccucaacaaccaguucggcaccaugcccucccucacccucgccugccucaccaagcagggccaggucgaccucaacgacgccguccucgcccucaccgaccucggccucaucuacaccgccaaguaccccaacuccuccgaccucgaccgccucucccagucccaccccauccucaacauggucgacaccaagaaguccucccucaacaucuccggcuacaacuucucccucggcgccgccgucaaggccggcgccugcaugcucgacggcggcaacaugcucgagaccaucaaggucaccccccagaccauggacggcauccucaaguccauccucaaggucaagcgcucccucggcauguucgucuccgacacccccggcgagcgcaaccccuacgagaacauccucuacaagaucugccucuccggcgacggcuggcccuacaucgccucccgcaccuccaucgucggccgcgccugggagaacaccaccgucgaccucgaguccgacggcaagccccagaaggucggcgccgccggcuccaccaagucccuccaguccgccggcuuccccaccggccucaccuacucccagcucaugacccucaaggacuccaugaugcagcucgaccccuccgccaagaccuggaucgacaucgagggccgccccgaggaccccgucgagaucgcccucuaccagcccauguccggcugcuacauccacuucuuccgcgagcccaccgaccucaagcaguucaagcaggacgccaaguacucccacggcaucgacgucgccgaccucuuccccgcccagcccggccucaccuccgccgucaucgaggcccucccccgcaacaugguccucaccugccagggcuccgacgacaucaagcgccuccucgacucccagggccgccgcgacaucaagcucaucgacaucgcccucuccaaggucgacucccgccgcuucgagaacgccgucugggaccagugcaaggaccucugccacaugcacaccggcgucgucgucgagaagaagaagcgcggcggcaaggaggagaucaccccccacugcgcccucauggacugcaucauguacgacgccgccgucuccggcggccucaacauccccguccuccgcgccguccucccccgcgacauggucuuccgcaccuccucccccaaggucguccucuga

SEQ ID NO: 8406 - RNA, 1710 nt, Artificial Sequence
  derived and/or modified CDS sequence (opt2) from LASV(LASV049-NIG-2009;Clade II)__AIT17605__NP
auguccgccuccaaggaggucaaguccuuccucuggacccagucccuccgccgcgagcucuccggcuacugcuccuccaucaagcuccaggucgucaaggacgcccaggcccuccuccacggccucgacuucuccgaggucuccaacguccagcgccucaugcgcaagcagaagcgcgacgacuccgaccucaagcgccuccgcgaccucaaccaggccgucaacaaccucgucgagcucaaguccacccagcagaaguccauccuccgcgucggcacccucaccuccgacgaccuccucacccucgccgccgaccucgagaagcucaaguccaaggucauccgcaccgagcgcccccucuccuccggcgucuacaugggcaaccucuccacccagcagcucgagcagcgccgcgcccuccucaacaugaucggcauggccggcggcgcccagggcacccagcccggccgcgacggcgucguccgcgucugggacgucaagaaccccgaccuccucaacaaccaguucggcaccaugcccucccucacccucgccugccucaccaagcagggccaggucgaccucaacgacgccguccucgcccucaccgaccucggccucaucuacaccgccaaguaccccaacuccuccgaccucgaccgccucucccagucccaccccauccucaacauggucgacaccaagaaguccucccucaacaucuccggcuacaacuucucccucggcgccgccgucaaggccggcgccugcaugcucgacggcggcaacaugcucgagaccaucaaggucaccccccagaccauggacggcauccucaaguccauccucaaggucaagaagucccucggcauguucgucuccgacacccccggcgagcgcaaccccuacgagaacauccucuacaagaucugccucuccggcgacggcuggcccuacaucgccucccgcaccuccaucgucggccgcgccugggagaacaccaccgucgaccucgaguccgacggcaagccccagaaggucggcaccgccggcuccaacaagucccuccaguccgccggcuuccccaccggccucaccuacucccagcucaugacccucaaggacuccaugaugcagcucgaccccuccgccaagaccuggaucgacaucgagggccgccccgaggaccccgucgagaucgcccucuaccagcccauguccggcugcuacauccacuucuuccgcgagcccaccgaccucaagcaguucaagcaggacgccaaguacucccacggcaucgacgucgccgaccucuucuccgcccagcccggccucaccuccgccgucaucgaggcccucccccgcaacaugguccucaccugccagggcuccgacgacaucaagcgccuccucgacucccagggccgccgcgacaucaagcucaucgacaucgcccucuccaaggccgacucccgccgcuucgagaacgccgucugggaccagugcaaggaccucugccacaugcacaccggcgucgucgucgagaagaagaagcgcggcggcaaggaggagaucaccccccacugcgcccucauggacugcaucauguacgacgccgccgucuccggcggccucaacauccccguccuccgcgccguccucccccgcgacauggucuuccgcaccuccucccccaaggucguccucuga

SEQ ID NO: 8407 - RNA, 1710 nt, Artificial Sequence
  derived and/or modified CDS sequence (opt2) from LASV(LASV052-NIG-2008;Clade II)__AIT17609__NP
auguccgccuccaaggaggucaaguccuuccucuggacccagucccuccgccgcgagcucuccggcuacugcuccuccaucaagcuccaggucgucaaggacgcccaggcccuccuccacggccucgacuucuccgaggucuccaacguccagcgccucaugcgcaagcagaagcgcgacgacuccgaccucaagcgccuccgcgaccucaaccaggccgucaacaaccucgucgagcucaaguccacccagcagaaguccauccuccgcgucggcacccucaccuccgacgaccuccucacccucgccgccgaccucgagaagcucaaguccaaggucauccgcaccgagcgcccccucuccuccggcgucuacaugggcaaccucuccacccagcagcucgagcagcgccgcgcccuccucaacaugaucggcauggccggcggcgcccagggcacccagcccggccgcgacggcgucguccgcgucugggacgucaagaaccccgaccuccucaacaaccaguucggcaccaugcccucccucacccucgccugccucaccaagcagggccaggucgaccucaacgacgccguccucgcccucaccgaccucggccucaucuacaccgccaaguaccccaacuccuccgaccucgaccgccucucccagucccaccccauccucaacauggucgacaccaagaaguccucccucaacaucuccggcuacaacuucucccucggcgccgccgucaaggccggcgccugcaugcucgacggcggcaacaugcucgagaccaucaaggucaccccccagaccauggacggcauccucaaguccauccucaaggucaagcgcucccucggcauguucgucuccgacacccccggcgagcgcaaccccuacgagaacauccucuacaagaucugccucuccggcgacggcuggcccuacaucgccucccgcaccuccaucgucggccgcgccugggagaacaccaccgucgaccucgaguccgacggcaagccccagaaggucggcgccgccggcuccaacaagucccuccaguccgccggcuuccccaccggccucaccuacucccagcucaugacccucaaggacuccaugaugcagcucgaccccuccgccaagaccuggaucgacaucgagggccgccccgaggaccccgucgagaucgcccucuaccagcccauguccggcugcuacauccacuucuuccgcgagcccaccgaccucaagcaguucaagcaggacgccaaguacucccacggcaucgacgucgccgaccucuuccccgcccagcccggccucaccuccgccgucaucgaggcccucccccgcaacaugguccucaccugccagggcuccgacgacaucaagcgccuccucgacucccagggccgccgcgacaucaagcucaucgacaucgcccucuccaaggccgacucccgccgcuucgagaacgccgucugggaccagugcaaggaccucugccacaugcacaccggcgucgucgucgagaagaagaagcgcggcggcaaggaggagaucaccccccacugcgcccucauggacugcaucauguacgacgccgccgucuccggcggccucaacauccccguccuccgcgccguccucccccgcgacauggucuuccgcaccuccucccccaaggucguccucuga

SEQ ID NO: 8408 - RNA, 1710 nt, Artificial Sequence
  derived and/or modified CDS sequence (opt2) from LASV(LASV056-NIG-2008;Clade II)__AIT17613__NP
auguccgccuccaaggaggucaaguccuuccucuggacccagucccuccgccgcgagcucuccggcuacugcuccaacaucaagcuccaggucgucaaggacgcccaggcccuccuccacggccucgacuucuccgaggucuccaacguccagcgccucaugcgcaagcagaagcgcgacgacuccgaccucaagcgccuccgcgaccucaaccaggccgucaacaaccucgucgagcucaaguccacccagcagaaguccauccuccgcgucggcacccucaccuccgacgaccuccucacccucgccgccgaccucgagaagcucaaguccaaggucauccgcaccgagcgcccccucuccuccggcgucuacaugggcaaccucuccacccagcagcucgagcagcgccgcgcccuccucaacaugaucggcauggucggcggcgcccagggcacccagcccggccgcgacggcgucguccgcgucugggacgucaagaaccccgaccuccucaacaaccaguucggcaccaugcccucccucacccucgccugccucaccaagcagggccaggucgaccucaacgacgccguccucgcccucaccgaccucggccucaucuacaccgccaaguaccccaacuccuccgaccucgaccgccucucccagucccaccccauccucaacauggucgacaccaagaaguccucccucaacaucuccggcuacaacuucucccucggcgccgccgucaaggccggcgccugcaugcucgacggcggcaacaugcucgagaccaucaaggucaccccccagaccauggacggcauccucaaguccauccucaaggucaagcgcucccucggcauguucgucuccgacacccccggcgagcgcaaccccuacgagaacauccucuacaagaucugccucuccggcgacggcuggcccuacaucgccucccgcaccuccaucgucggccgcgccugggagaacaccaccgucgaccucgaguccgacggcaagccccagaaggucggcaccgccggcuccaacaagucccuccaguccgccggcuuccccaccggccucaccuacucccagcucaugacccucaaggacuccaugaugcagcucgaccccuccgccaagaccuggaucgacaucgagggccgccccgaggaccccgucgagaucgcccucuaccagcccauguccggcugcuacauccacuucuuccgcgagcccaccgaccucaagcaguucaagcaggacgccaaguacucccacggcaucgacgucgccgaccucuuccccgcccagcccggccucaccuccgccgucaucgaggcccucccccgcaacaugguccucaccugccagggcuccgacgacaucaagcgccuccucgacucccagggccgccgcgacaucaagcucaucgacaucgcccucuccaagaccgacucccgccgcuucgagaacgccgucugggaccagugcaaggaccucugccacaugcacaccggcgucgucgucgagaagaagaagcgcggcggcaaggaggagaucaccccccacugcgcccucauggacugcaucauguacgacgccgccgucuccggcggccucaacauccccguccuccgcgccguccucccccgcgacauggucuuccgcaccuccucccccaaggucguccucuga

SEQ ID NO: 8409 - RNA, 1710 nt, Artificial Sequence
  derived and/or modified CDS sequence (opt2) from LASV(LASV058-NIG-2008;Clade II)__AIT17617__NP
auguccgccuccaaggaggucaaguccuuccucuggacccagucccuccgccgcgagcucuccggcuacugcuccuccaucaagcuccaggucgucaaggacgcccaggcccuccuccacggccucgacuucuccgaggucuccaacguccagcgccucaugcgcaagcagaagcgcgacgacuccgaccucaagcgccuccgcgaccucaaccaggccgucaacaaccucgucgagcucaaguccacccagcagaaguccauccuccgcgucggcacccucaccuccgacgaccuccucacccucgccgccgaccucgagaagcucaaguccaaggucauccgcaccgagcgcccccucuccuccggcgucuacaugggcaaccucuccgcccagcagcucgagcagcgccgcgcccuccucaacaugaucggcauggucggcggcgcccagggcacccagcccggccgcgacggcgucguccgcgucugggacgucaagaaccccgaccuccucaacaaccaguucggcaccaugcccucccucacccucgccugccucaccaagcagggccaggucgaccucaacgacgccguccucgcccucaccgaccucggccucaucuacaccgccaaguaccccaacuccuccgaccucgaccgccucucccagucccaccccauccucaacauggucgacaccaagaaguccucccucaacaucuccggcuucaacuucucccucggcgccgccgucaaggccggcgccugcaugcucgacggcggcaacaugcucgagaccaucaaggucaccccccagaccauggacggcauccucaaguccauccucaaggucaagcgcucccucggcauguucgucuccgacacccccggcgagcgcaaccccuacgagaacauccucuacaagaucugccucuccggcgacggcuggcccuacaucgccucccgcaccuccaucgucggccgcgccugggagaacaccaccgucgaccucgaguccgacggcaagccccagaaggucggcaccgccggcuccaacaagucccuccaguccgccggcuuccccaccggccucaccuacucccagcucaugacccucaaggacuccaugaugcagcucgaccccuccgccaagaccuggaucgacaucgagggccgccccgaggaccccgucgagaucgcccucuaccagcccauguccggcugcuacauccacuucuuccgcgagcccaccgaccucaagcaguucaagcaggacgccaaguacucccacggcaucgacgucgccgaccucuuccccgcccagcccggccucaccuccgccgucaucgaggcccucccccgcaacaugguccucaccugccagggcuccgacgacaucaagcgccuccucgacucccagggccgccgcgacaucaagcucaucgacaucgcccucuccaaggccgacucccgccgcuucgagaacgccgucugggaccagugcaaggaccucugccacaugcacaccggcgucgucgucgagaagaagaagcgcggcggcaaggaggagaucaccccccacugcgcccucauggacugcaucauguacgacgccgccgucuccggcggccucaacauccccguccuccgcgccguccucccccgcgacauggucuuccgcaccuccucccccaaggucguccucuga

SEQ ID NO: 8410 - RNA, 1710 nt, Artificial Sequence
  derived and/or modified CDS sequence (opt2) from LASV(LASV063-NIG-2009;Clade II)__AIT17621__NP
auguccgccuccaaggaggucaaguccuuccucuggacccagucccuccgccgcgagcucuccggcuacugcuccuccaucaagcuccaggucgucaaggacgcccaggcccuccuccacggccucgacuucuccgaggucaccaacguccagcgccucaugcgcaagcagaagcgcgacgacuccgaccucaagcgccuccgcgaccucaaccaggccgucaacaaccucgucgagcucaaguccacccagcagaaguccauccuccgcgucggcacccucaccuccgacgaccuccucacccucgccgccgaccucgagaagcucaaguccaaggucauccgcaccgagcgcccccucuccuccggcgucuacaugggcaaccucuccacccagcagcucgagcagcgccgcgcccuccucaacaugaucggcauggucggcggcgcccagggcacccagcccggccgcgacggcgucguccgcgucugggacgucaagaaccccgaccuccucaacaaccaguucggcaccaugcccucccucacccucgccugccucaccaagcagggccaggucgaccucaacgacgccguccucgcccucaccgaccucggccucaucuacaccgccaaguaccccaacuccuccgaccucgaccgccucucccagucccaccccauccucaacauggucgacaccaagaaguccucccucaacaucuccggcuacaacuucucccucggcgccgccgucaaggccggcgccugcaugcucgacggcggcaacaugcucgagaccaucaaggucaccccccagaccauggacggcauccucaaguccauccucaaggucaagcgcucccucggcauguucgucuccgacacccccggcgagcgcaaccccuacgagaacauccucuacaagaucugccucuccggcgacggcuggcccuacaucgccucccgcaccuccaucgucggccgcgccugggagaacaccaccgucgaccucgaguccgacggcaagccccagaaggucggcaucgccggcuccaacaagucccuccaguccgccggcuuccccaccggccucaccuacucccagcucaugacccucaaggacuccaugaugcagcucgaccccuccgccaagaccuggaucgacaucgagggccgccccgaggaccccgucgagaucgcccucuaccagcccauguccggcugcuacauccacuucuuccgcgagcccaccgaccucaagcaguucaagcaggacgccaaguacucccacggcaucgacgucgccgaccucuuccccgcccagcccggccucaccuccgccgucaucgaggcccucccccgcaacaugguccucaccugccagggcuccgacgacaucaagcgccuccucgacucccagggccgccgcgacaucaagcucaucgacaucgcccucuccaaggccgacucccgcaaguucgagaacgccgucugggaccagugcaaggaccucugccacaugcacaccggcgucgucgucgagaagaagaagcgcggcggcaaggaggagaucaccccccacugcgcccucauggacugcaucauguacgacgccgccgucuccggcggccucaacauccccguccuccgcgccguccucccccgcgacauggucuuccgcaccuccucccccaaggucguccucuga

SEQ ID NO: 8411 - RNA, 1710 nt, Artificial Sequence
  derived and/or modified CDS sequence (opt2) from LASV(LASV1000-NIG-2009;Clade II)__AIT17783__NP
auguccgccuccaaggaggucaaguccuuccucuggacccagucccuccgccgcgagcucuccggcuacugcuccaacaucaagcuccaggucgucaaggacgcccaggcccuccuccacggccucgacuucuccgaggucuccaacguccagcgccucaugcgcaagcagaagcgcgacgacuccgaccucaagcgccuccgcgaccucaaccaggccgucaacaaccucgucgagcucaaguccacccagcagaaguccauccuccgcgucggcacccucaccuccgacgaccuccucacccucgccgccgaccucgagaagcucaaguccaaggucauccgcaccgagcgcccccucuccuccggcgucuacaugggcaaccucuccacccagcagcucgagcagcgccgcgcccuccucaacaugaucggcauggucggcggcgcccagggcacccagcccggccgcgacggcgucguccgcgucugggacgucaagaaccccgaccuccucaacaaccaguucggcaccaugcccucccucacccucgccugccucaccaagcagggccaggucgaccucaacgacgucguccucgcccucaccgaccucggccucaucuacaccgccaaguaccccaacuccuccgaccucgaccgccucucccagucccaccccauccucaacauggucgacaccaagaaguccucccucaacaucuccggcuacaacuucucccucggcgccgccgucaaggccggcgccugcaugcucgacggcggcaacaugcucgagaccaucaaggucaccccccagaccauggacggcauccucaaguccauccucaaggucaagaagucccucggcauguucgucuccgacacccccggcgagcgcaaccccuacgagaacauccucuacaagaucugccucuccggcgacggcuggcccuacaucgccucccgcaccuccaucgucggccgcgccugggagaacaccaccgucgaccucgaguccgacggcaagccccagaaggucggcaccgccggcuccaacaagucccuccaguccgccggcuuccccaccggccucaccuacucccagcucaugacccucaaggacuccaugaugcagcucgaccccuccgccaagaccuggaucgacaucgagggccgccccgaggaccccgucgagaucgcccucuaccagcccgucuccggcugcuacauccacuucuuccgcgagcccaccgaccucaagcaguucaagcaggacgccaaguacucccacggcaucgacgucgccgaccucuuccccgcccagcccggccucaccuccgccgucaucgaggcccucccccgcaacaugguccucaccugccagggcuccgacgacaucaagcgccuccucgacucccagggccgccgcgacaucaagcucaucgacaucgcccucuccaaggccgacucccgccgcuucgagaacgccgucugggaccagugcaaggaccucugccacaugcacaccggcgucgucgucgagaagaagaagcgcggcggcaaggaggagaucaccccccacugcgcccucauggacugcaucauguacgacgccgccgucuccggcggccucaacauccccguccuccgcgccguccucccccgcgacauggucuuccgcaccuccucccccaaggucguccucuga

SEQ ID NO: 8412 - RNA, 1710 nt, Artificial Sequence
  derived and/or modified CDS sequence (opt2) from LASV(LASV1008-NIG-2009;Clade II)__AIT17787__NP
auguccgccuccaaggaggucaaguccuuccucuggacccagucccuccgccgcgagcucuccggcuacugcuccaacaucaagcuccaggucgucaaggacgcccaggcccuccuccacggccucgacuucuccgaggucuccaacguccagcgccucaugcgcaagcagaagcgcgacgacggcgaccucaagcgccuccgcgaccucaaccaggccgucaacaaccucgucgagcucaaguccacccagcagaaguccauccuccgcgucggcacccucaccuccgacgaccuccucacccucgccgccgaccucgagaagcucaaguccaaggucauccgcaccgagcgcccccucuccuccggcgucuacaugggcaaccucuccacccagcagcucgagcagcgccgcgcccuccucaacaugaucggcauggucggcggcgcccagggcacccagcccggccgcgacggcgucguccgcgucugggacgucaagaaccccgaccuccucaacaaccaguucggcaccaugcccucccucacccucgccugccucaccaagcagggccaggucgaccucaacgacgccguccucgcccucaccgaccucggccucaucuacaccgccaaguaccccaacuccuccgaccucgaccgccucucccagucccaccccauccucaacauggucgacaccaagaaguccucccucaacaucuccggcuacaacuucucccucggcgccgccgucaaggccggcgccugcaugcucgacggcggcaacaugcucgagaccaucaaggucaccccccagaccauggacggcauccucaaguccauccucaaggucaagaagucccucggcauguucgucuccgacacccccggcgagcgcaaccccuacgagaacauccucuacaagaucugccucuccggcgacggcuggcccuacaucgccucccgcaccuccaucgucggccgcgccugggagaacaccaccgucgaccucgaguccgacggcaagccccagaaggucggcaccgccggcuccaacaagucccuccaguccgccggcuuccccaccggccucaccuacucccagcucaugacccucaaggacuccaugaugcagcucgaccccuccgccaagaccuggaucgacaucgagggccgccccgaggaccccgucgagaucgcccucuaccagcccauguccggcugcuacauccacuucuuccgcgagcccaccgaccucaagcaguucaagcaggacgccaaguacucccacggcaucgacgucaccgaccucuucuccgcccagcccggccucaccuccgccgucaucgaggcccucccccgcaacaugguccucaccugccagggcuccgacgacaucaagcgccuccucgacucccagggccgccgcgacaucaagcucaucgacaucgcccucuccaaggucgacucccgccgcuucgagaacgccgucugggaccagugcaaggaccucugccacaugcacaccggcgucgucgucgagaagaagaagcgcggcggcaaggaggagaucaccccccacugcgcccucauggacugcaucauguacgacgccgccgucuccggcggccucaacauccccguccuccgcgccguccucccccgcgacauggucuuccgcaccuccucccccaaggucguccucuga

SEQ ID NO: 8413 - RNA, 1710 nt, Artificial Sequence
  derived and/or modified CDS sequence (opt2) from LASV(LASV1015-NIG-2009;Clade II)__AIT17795__NP
auguccgccuccaaggaggucaaguccuuccucuggacccagucccuccgccgcgagcucuccggcuacugcuccuccaucaagcuccaggucgucaaggacgcccaggcccuccuccacggccucgacuucuccgaggucuccaacguccagcgccucaugcgcaagcagaagcgcgacgacuccgaccucaagcgccuccgcgaccucaaccaggccgucaacaaccucgucgagcucaaguccacccagcagaaguccauccuccgcgucggcacccucaccuccgacgaccuccucacccucgccgccgaccucgagaagcucaaguccaaggucauccgcaccgagcgcccccucuccuccggcgucuacaugggcaaccucuccacccagcagcucgagcagcgccgcgcccuccucaacaugaucggcauggucggcggcgcccagggcacccagcccggccgcgacggcgucguccgcgucugggacgucaagaaccccgaccuccucaacaaccaguucggcaccaugcccucccucacccucgccugccucaccaagcagggccaggucgaccucaacgacgccguccucgcccucaccgaccucggccucaucuacaccgccaaguaccccaacuccuccgaccucgaccgccucucccagucccaccccauccucaacauggucgacaccaagaaguccucccucaacaucuccggcuacaacuucucccucggcgccgccgucaaggccggcgccugcaugcucgacggcggcaacaugcucgagaccaucaaggucaccccccagaccauggacggcauccucaaguccauccucaaggucaagcgcucccucggcauguucgucuccgacacccccggcgagcgcaaccccuacgagaacauccucuacaagaucugccucuccggcgacggcuggcccuacaucgccucccgcaccuccaucgucggccgcgccugggagaacaccaccgucgaccucgaguccgacggcaagccccagaaggucggcaccgccggcuccaacaagucccuccaguccgccggcuuccccaccggccucaccuacucccagcucaugacccucaaggacuccaugaugcagcucgaccccuccgccaagaccuggaucgacaucgagggccgccccgaggaccccgucgagaucgcccucuaccagcccauguccggcugcuacauccacuucuuccgcgagcccaccgaccucaagcaguucaagcaggacgccaaguacucccacggcaucgacgucgccgaccucuuccccgcccagcccggccucaccuccgccgucaucgaggcccucccccgcaacaugguccucaccugccagggcuccgacgacaucaagaagcuccucgacucccagggccgccgcgacaucaagcucaucgacaucgcccucuccaaggccgacucccgccgcuucgagaacgccgucugggaccagugcaaggaccucugccacaugcacaccggcgucgucgucgagaagaagaagcgcggcggcaaggaggagaucaccccccacugcgcccucauggacugcaucauguacgacgccgccgucuccggcggccucaacauccccguccuccgcgccguccucccccgcgacauggucuuccgcaccuccucccccaaggucguccucuga

SEQ ID NO: 8414 - RNA, 1710 nt, Artificial Sequence
  derived and/or modified CDS sequence (opt2) from LASV(LASV1016-NIG-2009;Clade II)__AIT17799__NP
auguccgccuccaaggaggucaaguccuuccucuggacccagucccuccgccgcgagcucuccggcuacugcuccaacaucaagcuccaggucgucaaggacgcccaggcccuccuccacggccucgacuucuccgaggucuccaacguccagcgccucaugcgcaagcagaagcgcgacgacuccgaccucaagcgccuccgcgaccucaaccaggccgucaacaaccucgucgagcucaaguccacccagcagaaguccauccuccgcgucggcacccucaccuccgacgaccuccucacccucgccgccgaccucgagaagcucaaguccaaggucauccgcaccgagcgcccccucuccuccggcgucuacaugggcaaccucuccgcccagcagcucgagcagcgccgcgcccuccucaacaugaucggcauggucggcggcgcccagggcacccagcccggccgcgacggcgucguccgcgucugggacgucaagaaccccgaccuccucaacaaccaguucggcaccaugcccucccucacccucgccugccucaccaagcagggccaggucgaccucaacgacgccguccucgcccucaccgaccucggccucaucuacaccgccaaguaccccaacuccuccgaccucgaccgccucucccagucccaccccauccucaacauggucgacaccaagaaguccucccucaacaucuccggcuacaacuucucccucggcgccgccgucaaggccggcgccugcaugcucgacggcggcaacaugcucgagaccaucaaggucaccccccagaccauggacggcauccucaaguccauccucaaggucaagaagucccucggcauguucgucuccgacacccccggcgagcgcaaccccuacgagaacauccucuacaagaucugccucuccggcgacggcuggcccuacaucgccucccgcaccuccaucgucggccgcgccugggagaacaccaccgucgaccucgaguccgacggcaagccccagaaggucggcaccgccggcuccaacaagucccuccaguccgccggcuuccccaccggccucaccuacucccagcucaugacccucaaggacuccaugaugcagcucgaccccuccgccaagaccuggaucgacaucgagggccgccccgaggaccccgucgagaucgcccucuaccagcccauguccggcugcuacauccacuucuuccgcgagcccaccgaccucaagcaguucaagcaggacgccaaguacucccacggcaucgacgucgccgaccucuuccccgcccagcccggccucaccuccgccgucaucgaggcccucccccgcaacaugguccucaccugccagggcuccgacgacaucaagcgccuccucgacucccagggccgccgcgacaucaagcucaucgacaucgcccucuccaaggccgacucccgccgcuucgagaacgccgucugggaccagugcaaggaccucugccacaugcacaccggcgucgucgucgagaagaagaagcgcggcggcaaggaggagaucaccccccacugcgcccucauggacugcaucauguacgacgccgccgucuccggcggccucaacauccccguccuccgcgccguccucccccgcgacauggucuuccgcaccuccucccccaaggucguccucuga

SEQ ID NO: 8415 - RNA, 1710 nt, Artificial Sequence
  derived and/or modified CDS sequence (opt2) from LASV(LASV221-NIG-2010;Clade II)__AIT17625__NP
auguccgccuccaaggaggucaaguccuuccucuggacccagucccuccgccgcgagcucuccggcuacugcuccuccaucaagcuccaggucgucaaggacgcccaggcccuccuccacggccucgacuucuccgaggucuccaacguccagcgccucaugcgcaagcagcgccgcgacgacuccgaccucaagcgccuccgcgaccucaaccaggccgucaacaaccucgucgagcucaaguccacccagcagaaguccauccuccgcgucggcacccucaccuccgacgaccuccucacccucgccgccgaccucgagaagcucaaguccaaggucauccgcaccgagcgcccccucuccuccggcgucuacaugggcaaccucuccacccagcagcucgagcagcgccgcgcccuccucaacaugaucggcauggucggcggcgcccagggcacccagcccggccgcgacggcgucguccgcgucugggacgucaagaaccccgaccuccucaacaaccaguucggcaccaugcccucccucacccucgccugccucaccaagcagggccaggucgaccucaacgacgccguccucgcccucaccgaccucggccucaucuacaccgccaaguaccccaacuccuccgaccucgaccgccucucccagucccaccccauccucaacauggucgacaccaagaaguccucccucaacaucuccggcuacaacuucucccucggcgccgccgucaaggccggcgccugcaugcucgacggcggcaacaugcucgagaccaucaaggucaccccccagaccgucgacggcauccucaaguccauccucaaggucaagcgcucccucggcauguucgucuccgacacccccggcgagcgcaaccccuacgagaacauccucuacaagaucugccucuccggcgacggcuggcccuacaucgccucccgcaccuccaucgucggccgcgccugggagaacaccaccgucgaccucgaguccgacggcaagccccagaaggucggcaccgccggcuccaacaagucccuccaguccgccggcuuccccaccggccucaccuacucccagcucaugacccucaaggacuccaugaugcagcucgaccccuccgccaagaccuggaucgacaucgagggccgccccgaggaccccgucgagaucgcccucuaccagcccauguccggcugcuacauccacuucuuccgcgagcccaccgaccucaagcaguucaagcaggacgccaaguacucccacggcaucgacgucgccgaccucuuccccgcccagcccggccucaccuccgccgucaucgaggcccucccccgcaacaugguccucaccugccagggcuccgacgacaucaagcgccuccucgacucccagggccgccgcgacaucaagcucaucgacaucgcccucuccaaggccgacucccgcaaguucgagaacgccgucugggaccagugcaaggaccucugccacaugcacaccggcgucgucgucgagaagaagaagcgcggcggcaaggaggagaucaccccccacugcgcccucauggacugcaucauguacgacgccgccgucuccggcggccucaacauccccguccuccgcgccguccucccccgcgacauggucuuccgcaccuccucccccaaggucguccucuga

SEQ ID NO: 8416 - RNA, 1710 nt, Artificial Sequence
  derived and/or modified CDS sequence (opt2) from LASV(LASV224-NIG-2010;Clade II)__AIT17627__NP
auguccgccuccaaggaggucaaguccuuccucuggacccagucccuccgccgcgagcucuccggcuacugcuccuccaucaagcuccaggucgucaaggacgcccaggcccuccuccacggccucgacuucuccgaggucuccaacguccagcgccucaugcgcaagcagaagcgcgacgacuccgaccucaagcgccuccgcgaccucaaccaggccgucaacaaccucgucgagcucaaguccacccagcagaaguccauccuccgcgucggcacccucaccuccgacgaccuccucacccucgccgccgaccucgagaagcucaaguccaaggucauccgcaccgagcgcccccucuccuccggcgucuacaugggcaaccucuccucccagcagcucgagcagcgccgcgcccuccucaacaugaucggcauggucggcggcgcccagggcacccagcccggccgcgacggcgucguccgcgucugggacgucaagaaccccgaccuccucaacaaccaguucggcaccaugcccucccucacccucgccugccucaccaagcagggccaggucgaccucaacgacgccguccucgcccucaccgaccucggccucaucuacaccgccaaguaccccaacuccuccgaccucgaccgccucucccagucccaccccauccucaacauggucgacaccaagaaguccucccucaacaucuccggcuacaacuucucccucggcgccgccgucaaggccggcgccugcaugcucgacggcggcaacaugcucgagaccaucaaggucaccccccagaccauggacggcauccucaaguccauccucaaggucaagcgcucccucggcauguucgucuccgacacccccggcgagcgcaaccccuacgagaacauccucuacaagaucugccucuccggcgacggcuggcccuacaucgccucccgcaccuccaucgucggccgcgccugggagaacaccaccgucgaccucgaguccgacggcaagccccagaaggucggcuccgccggcuccaacaagucccuccaguccgccggcuuccccaccggccucaccuacucccagcucaugacccucaaggacuccaugaugcagcucgaccccuccgccaagaccuggaucgacaucgagggccgccccgaggaccccgucgagaucgcccucuaccagcccauguccggcugcuacauccacuucuuccgcgagcccaccgaccucaagcaguucaagcaggacgccaaguacucccacggcaucgacgucgccgaccucuuccccgcccagcccggccucaccuccgccgucaucgaggcccucccccgcaacaugguccucaccugccagggcuccgacgacaucaagcgccuccucgacucccagggccgccgcgacaucaagcucaucgacaucgcccucuccaaggccgacucccgccgcuucgagaacgccgucugggaccagugcaaggaccucugccacaugcacaccggcgucgucgucgagaagaagaagcgcggcggcaaggaggagaucaccccccacugcgcccucauggacugcaucauguacgacgccgccgucuccggcggccucaacauccccguccuccgcgccguccucccccgcgacauggucuuccgcaccuccucccccaaggucguccucuga

SEQ ID NO: 8417 - RNA, 1710 nt, Artificial Sequence
  derived and/or modified CDS sequence (opt2) from LASV(LASV225-NIG-2010;Clade II)__AIT17631__NP
auguccgccuccaaggagaucaaguccuuccucuggacccagucccuccgccgcgagcucuccggcuacugcuccuccaucaagcuccaggucgucaaggacgcccaggcccuccuccacggccucgacuucuccgaggucuccaacguccagcgccucaugcgcaagcagaagcgcgacgacuccgaccucaagcgccuccgcgaccucaaccaggccgucaacaaccucgucgagcucaaguccacccagcagaaguccauccuccgcgucggcacccucaccuccgacgaccuccucacccucgccgccgaccucgagaagcucaaguccaaggucauccgcaccgagcgcccccucuccuccggcgucuacaugggcaaccucuccacccagcagcucgagcagcgccgcgcccuccucaacaugaucggcauggucggcggcgcccagggcacccagcccggccgcgacggcgucguccgcgucugggacgucaagaaccccgaccuccucaacaaccaguucggcaccaugcccucccucacccucgccugccucaccaagcagggccaggucgaccucaacgacgccguccucgcccucaccgaccucggccucaucuacaccgccaaguaccccaacuccuccgaccucgaccgccucucccagucccaccccauccucaacauggucgacaccaagaaguccucccucaacaucuccggcuacaacuucucccucggcgccgccgucaaggccggcgccugcaugcucgacggcggcaacaugcucgagaccaucaaggucaccccccagaccauggacggcauccucaaguccauccucaaggucaagcgcucccucggcauguucgucuccgacgcccccggcgagcgcaaccccuacgagaacauccucuacaagaucugccucuccggcgacggcuggcccuacaucgccucccgcaccuccaucgucggccgcgccugggagaacaccaccgucgaccucgaguccgacggcaagccccagaaggucggcaccgccggcuccaacaagucccuccaguccgccggcuuccccaccggccucaccuacucccagcucaugacccucaaggacuccaugaugcagcucgaccccuccgccaagaccuggaucgacaucgagggccgccccgaggaccccgucgagaucgcccucuaccagcccauguccggcugcuacauccacuucuuccgcgagcccaccgaccucaagcaguucaagcaggacgccaaguacucccacggcaucgacgucgccgaccucuuccccgcccagcccggccucaccuccgccgucaucgaggcccucccccgcaacaugguccucaccugccagggcuccgacgacaucaagcgccuccucgacucccagggccgccgcgacaucaagcucaucgacaucgcccucuccaaggccgacucccgccgcuucgagaacgccgucugggaccagugcaaggaccucugccacaugcacaccggcgucgucgucgagaagaagaagcgcggcggcaaggaggagaucaccccccacugcgcccucauggacugcaucauguacgacgccgccgucuccggcggccucaacauccccguccuccgcgccguccucccccgcgacauggucuuccgcaccuccucccccaaggucguccucuga

SEQ ID NO: 8418 - RNA, 1710 nt, Artificial Sequence
  derived and/or modified CDS sequence (opt2) from LASV(LASV229-NIG-2010;Clade II)__AIT17635__NP
auguccgccuccaaggaggucaaguccuuccucuggacccagucccuccgccgcgagcucuccggcuacugcuccaacaucaagcuccaggucgucaaggacgcccaggcccuccuccacggccucgacuucuccgaggucuccaacguccagcgccucaugcgcaagcagaagcgcgacgacaacgaccucaagcgccuccgcgaccucaaccaggccgucaacaaccucgucgagcucaaguccacccagcagaaguccauccuccgcgucggcacccucaccuccgacgaccuccucacccucgccgccgaccucgagaagcucaaguccaaggucauccgcaccgagcgcccccucuccuccggcgucuacaugggcaaccucaacacccagcagcucgagcagcgccgcgcccuccucaacaugaucggcauggucggcggcgcccagggcacccagcccggccgcgacggcgucguccgcgucugggacgucaagaaccccgaccuccucaacaaccaguucggcaccaugcccucccucacccucgccugccucaccaagcagggccaggucgaccucaacgacgccguccucgcccucaccgaccucggccucaucuacaccgccaaguaccccaacuccuccgaccucgaccgccucucccagucccaccccauccucaacauggucgacaccaagaaguccucccucaacaucuccggcuacaacuucucccucggcgccgccgucaaggccggcgccugcaugcucgacggcggcaacaugcucgagaccaucaaggucaccccccagaccauggacggcauccucaaguccauccucaaggucaagaagucccucggcauguucgucuccgacacccccggcgagcgcaaccccuacgagaacauccucuacaagaucugccucuccggcgacggcuggcccuacaucgccucccgcaccuccaucgucggccgcgccugggagaacaccaccgucgaccucgaguccgacggcaagccccagaaggucggcaccgccggcuccaacaagucccuccaguccgccggcuuccccaccggccucaccuacucccagcucaugacccucaaggacuccaugaugcagcucgaccccuccgccaagaccuggaucgacaucgagggccgccccgaggaccccgucgagaucgcccucuaccagcccauguccggcugcuacauccacuucuuccgcgagcccaccgaccucaagcaguucaagcaggacgccaaguacucccacggcaucgacgucgccgaccucuuccccgcccagcccggccucaccuccgccgucaucgaggcccucccccgcaacaugguccucaccugccagggcuccgacgacaucaagcgccuccucgacucccagggccgccgcgacaucaagcucaucgacaucgcccucuccaaggccgacucccgccgcuucgagaacgccgucugggaccagugcaaggaccucugccacaugcacaccggcgucgucgucgagaagaagaagcgcggcggcaaggaggagaucaccccccacugcgcccucauggacugcaucauguacgacgccgccgucuccggcggccucaacauccccguccuccgcgccguccucccccgcgacauggucuuccgcaccuccucccccaaggucguccucuga

SEQ ID NO: 8419 - RNA, 1710 nt, Artificial Sequence
  derived and/or modified CDS sequence (opt2) from LASV(LASV237-NIG-2010;Clade II)__AIT17639__NP
auguccgccuccaaggaggucaaguccuuccucuggacccagucccuccgccgcgagcucuccggcuacugcuccaacaucaagcuccaggucgucaaggacgcccaggcccuccuccacggccucgacuucuccgaggucuccaacguccagcgccucaugcgcaagcagaagcgcgacgacuccgaccucaagcgccuccgcgaccucaaccaggccgucaacaaccucgucgagcucaaguccacccagcagaaguccauccuccgcgucggcacccucaccuccgacgaccuccucacccucgccgccgaccucgagaagcucaaguccaaggucauccgcaccgagcgcccccucuccuccggcgucuacaugggcaaccucuccacccagcagcucgagcagcgccgcgcccuccucaacaugaucggcauggucggcggcgcccagggcacccagcccggccgcgacggcgucguccgcgucugggacgucaagaaccccgaccuccucaacaaccaguucggcaccaugcccucccucacccucgccugccucaccaagcagggccaggucgaccucaacgacgccguccucgcccucaccgaccucggccucaucuacaccgccaaguaccccaacuccuccgaccucgaccgccucucccagucccaccccauccucaacauggucgacaucaagaaguccucccucaacaucuccggcuacaacuucucccucggcgccgccgucaaggccggcgccugcaugcucgacggcggcaacaugcucgagaccaucaaggucaccccccagaccauggacggcauccucaaguccauccucaaggucaagcgcucccucggcauguucgucuccgacacccccggcgagcgcaaccccuacgagaacauccucuacaagaucugccucuccggcgacggcuggcccuacaucgccucccgcaccuccaucgucggccgcgccugggagaacaccaccgucgaccucgaguccgacggcaagccccagaaggucggcuccgccggcuccaacaagucccuccaguccgccggcuuccccaccggccucaccuacucccagcucaugacccucaaggacuccaugaugcagcucgaccccuccgccaagaccuggaucgacaucgagggccgccccgaggaccccgucgagaucgcccucuaccagcccauguccggcugcuacauccacuucuuccgcgagcccaccgaccucaagcaguucaagcaggacgccaaguacucccacggcaucgacgucgccgaccucuuccccgcccagcccggccucaccuccgccgucaucgaggcccucccccgcaacaugguccucaccugccagggcuccgacgacaucaagcgccuccucgacucccagggccgccgcgacaucaagcucaucgacaucgcccucuccaaggccgacucccgccgcuucgagaacgccgucugggaccagugcaaggaccucugccacaugcacaccggcgucgucgucgagaagaagaagcgcggcggcaaggaggagaucaccccccacugcgcccucauggacugcaucauguacgacgccgccgucuccggcggccucaacauccccguccuccgcgccguccucccccgcgacauggucuuccgcaccuccucccccaaggucguccucuga

SEQ ID NO: 8420 - RNA, 1710 nt, Artificial Sequence
  derived and/or modified CDS sequence (opt2) from LASV(LASV242-NIG-2010;Clade II)__AIT17651__NP
auguccgccuccaaggaggucaaguccuuccucuggacccagucccuccgccgcgagcucuccggcuacugcuccuccaucaagcuccaggucgucaaggacgcccaggcccuccuccacggccucgacuucuccgaggucuccaacguccagcgccucaugcgcaagcagaagcgcgacgacuccgaccucaagcgccuccgcgaccucaaccaggccgucaacaaccucgucgagcucaaguccacccagcagaaguccguccuccgcgucggcacccucaccuccgacgaccuccucacccucgccgccgaccucgagaagcucaaguccaaggucauccgcaccgagcgcccccucuccuccggcgucuacaugggcaaccucuccgcccagcagcucgagcagcgccgcgcccuccucaacaugaucggcauggucggcggcgcccagggcacccagcccggccgcgacggcgucguccgcgucugggacgucaagaaccccgaccuccucaacaaccaguucggcaccaugcccucccucacccucgccugccucaccaagcagggccaggucgaccucaacgacgucguccucgcccucaccgaccucggccucaucuacaccgccaaguaccccaacuccuccgaccucgaccgccucucccagucccaccccauccucaacauggucgacaccaagaaguccucccucaacaucuccggcuacaacuucucccucggcgccgccgucaaggccggcgccugcaugcucgacggcggcaacaugcucgagaccaucaaggucaccccccagaccauggacggcauccucaaguccauccucaaggucaagaagucccucggcauguucgucuccgacacccccggcgagcgcaaccccuacgagaacauccucuacaagaucugccucuccggcgacggcuggcccuacaucgccucccgcaccuccaucgucggccgcgccugggagaacaccaccgucgaccucgaguccgacggcaagccccagaaggucggcaccgccggcuccaacaagucccuccaguccgccggcuuccccaccggccucaccuacucccagcucaugacccucaaggacuccaugaugcagcucgaccccuccgccaagaccuggaucgacaucgagggccgccccgaggaccccgucgagaucgcccucuaccagcccauguccggcugcuacauccacuucuuccgcgagcccaccgaccucaagcaguucaagcaggacgccaaguacucccacggcaucgacgucaccgaccucuucuccgcccagcccggccucaccuccgccgucaucgaggcccucccccgcaacaugguccucaccugccagggcuccgacgacaucaagcgccuccucgacucccagggccgccgcgacaucaagcucaucgacaucgcccucuccaaggccgacucccgccgcuucgagaacgccgucugggaccagugcaaggaccucugccacaugcacaccggcgucgucgucgagaagaagaagcgcggcggcaaggaggagaucaccccccacugcgcccucauggacugcaucauguacgacgccgccgucuccggcggccucaacauccccguccuccgcgccguccucccccgcgacauggucuuccgcaccuccucccccaaggucguccucuga

SEQ ID NO: 8421 - RNA, 1710 nt, Artificial Sequence
  derived and/or modified CDS sequence (opt2) from LASV(LASV245-NIG-2011;Clade II)__AIT17655__NP
auguccgccuccaaggaggucaaguccuuccucuggacccagucccuccgccgcgagcucuccggcuacugcuccaacaucaagcuccaggucgucaaggacgcccaggcccuccuccacggccucgacuucuccgaggucuccaacguccagcgccucaugcgcaagcagaagcgcgacgacuccgaccucaagcgccuccgcgaccucaaccaggccgucaacaaccucgucgagcucaaguccacccagcagaaguccauccuccgcgucggcacccucaccuccgacgaccuccucacccucgccgccgaccucgagaagcucaaguccaaggucauccgcaccgagaagccccucuccuccggcgucuacaugggcaaccucuccacccagcagcucgagcagcgccgcgcccuccucaacaugaucggcauggucggcggcgcccagggcacccagcccggccgcgacggcgucguccgcgucugggacgucaagaaccccgaccuccucaacaaccaguucggcaccaugcccucccucacccucgccugccucaccaagcagggccaggucgaccucaacgacgccguccucgcccucaccgaccucggccucaucuacaccgccaaguuccccaacuccuccgaccucgaccgccucucccagucccaccccauccucaacauggucgacaccaagaaguccucccucaacaucuccggcuacaacuucucccucggcgccgccgucaaggccggcgccugcaugcucgacggcggcaacaugcucgagaccaucaaggucaccccccagaccauggacggcauccucaaguccauccucaaggucaagaagucccucggcauguucgucuccgacacccccggcgagcgcaaccccuacgagaacauccucuacaagaucugccucuccggcgacggcuggcccuacaucgccucccgcaccuccaucgucggccgcgccugggagaacaccaccgucgaccucgaguccgacggcaagccccagaaggucggcaccaccggcuccaacaagucccuccaguccgccggcuuccccaccggccucaccuacucccagcucaugacccucaaggacuccaugaugcagcucgaccccuccgccaagaccuggaucgacaucgagggccgccccgaggaccccgucgagaucgcccucuaccagcccauguccggcugcuacauccacuucuuccgcgagcccaccgaccucaagcaguucaagcaggacgccaaguacucccacggcaucgacgucgccgaccucuuccccgcccagcccggccucaccuccgccgucaucgaggcccucccccgcaacaugguccucaccugccagggcuccgacgacaucaagcgccuccucgacucccagggccgccgcgacaucaagcucaucgacaucgcccucuccaaggccgacucccgccgcuucgagaacgccgucugggaccagugcaaggaccucugccacaugcacaccggcgucgucgucgagaagaagaagcgcggcggcaaggaggagaucaccccccacugcgcccucauggacugcaucauguacgacgccgccgucuccggcggccucaacauccccguccuccgcgccguccucccccgcgacauggucuuccgcaccuccucccccaaggucguccucuga

SEQ ID NO: 8422 - RNA, 1710 nt, Artificial Sequence
  derived and/or modified CDS sequence (opt2) from LASV(LASV246-NIG-2010;Clade II)__AIT17659__NP
auguccgccuccaaggaggucaaguccuuccucuggacccagucccuccgccgcgagcucuccggcuacugcuccuccaucaagcuccaggucgucaaggacgcccaggcccuccuccacggccucgacuucuccgaggucuccaacguccagcgccucaugcgcaagcagaagcgcgacgacuccgaccucaagcgccuccgcgaccucaaccaggccgucaacaaccucgucgagcucaaguccacccagcagaaguccguccuccgcgucggcacccucaccuccgacgaccuccucacccucgccgccgaccucgagaagcucaaguccaaggucauccgcaccgagcgcccccucuccuccggcgucuacaugggcaaccucuccacccagcagcucgagcagcgccgcgcccuccucuccaugaucggcauggucggcggcgcccagggcacccagcccggccgcgacggcgucguccgcgucugggacgucaagaaccccgaccuccucaacaaccaguucggcaccaugcccucccucacccucgccugccucaccaagcagggccaggucgaccucaacgacgccguccucgcccucaccgaccucggccucaucuacaccgccaaguaccccaacuccuccgaccucgaccgccucucccagucccaccccauccucaacauggucgacaccaagaaguccucccucaacaucuccggcuacaacuucucccucggcgccgccgucaaggccggcgccugcaugcucgacggcggcaacaugcucgagaccaucaaggucaccccccagaccauggacggcauccucaaguccauccucaaggucaagcgcucccucggcauguucgucuccgacacccccggcgagcgcaaccccuacgagaacauccucuacaagaucugccucuccggcgacggcuggcccuacaucgccucccgcaccuccaucgucggccgcgccugggagaacaccaccgucgaccucgaguccgacggcaagccccagaaggucggcaccgccggcuccaacaagucccuccaguccgccggcuuccccaccggccucaccuacucccagcucaugacccucaaggacuccaugaugcagcucgaccccuccgccaagaccuggaucgacaucgagggccgccccgaggaccccgucgagaucgcccucuaccagcccauguccggcugcuacauccacuucuuccgcgagcccaccgaccucaagcaguucaagcaggacgccaaguacucccacggcaucgacgucgccgaccucuuccccgcccagcccggccucaccuccgccgucaucgaggcccucccccgcaacaugguccucaccugccagggcuccgacgacaucaagcgccuccucgacucccagggccgccgcgacaucaagcucaucgacaucgcccucaacaaggccgacucccgccgcuucgagaacgccgucugggaccagugcaaggaccucugccacaugcacaccggcgucgucgucgagaagaagaagcgcggcggcaaggaggagaucaccccccacugcgcccucauggacugcaucauguacgacgccgccgucuccggcggccucaacauccccguccuccgcgccguccucccccgcgacauggucuuccgcaccuccucccccaaggucguccucuga

SEQ ID NO: 8423 - RNA, 1710 nt, Artificial Sequence
  derived and/or modified CDS sequence (opt2) from LASV(LASV251-NIG-2010;Clade II)__AIT17667__NP
auguccgccuccaaggaggucaaguccuuccucuggacccagucccuccgccgcgagcucuccggcuacugcuccuccaucaagcuccaggucgucaaggacgcccaggcccuccuccacggccucgacuucuccgaggucuccaacguccagcgccucaugcgcaagcagaagcgcgacgacuccgaccucaagcgccuccgcgaccucaaccaggccgucaacaaccucgucgagcucaaguccacccagcagaaguccauccuccgcgucggcacccucaccuccgacgaccuccucacccucgccgccgaccucgagaagcucaaguccaaggucauccgcaccgagcgcccccucuccuccggcgucuacaugggcaaccucuccacccagcagcucgagcagcgccgcgcccuccucaacaugaucggcauggucggcggcgcccagggcacccagcccggccgcgacggcgucguccgcgucugggacgucaagaaccccgaccuccucaacaaccaguucggcaccaugcccucccucacccucgccugccucaccaagcagggccaggucgaccucaacgacgccguccucgcccucaccgaccucggccucaucuacaccgccaaguaccccaacuccuccgaccucgaccgccucucccagucccaccccauccucaacauggucgacaccaagaaguccucccucaacaucuccggcuacaacuucucccucggcgccgccgucaaggccggcgccugcaugcucgacggcggcaacaugcucgagaccaucaaggucaccccccagaccaucgacggcauccucaaguccauccucaaggucaagaagucccucggcauguucgucuccgacacccccggcgagcgcaaccccuacgagaacauccucuacaagaucugccucuccggcgacggcuggcccuacaucgccucccgcaccuccaucgucggccgcgccugggagaacaccaccgucgaccucgaguccgacggcaagccccagaaggucggcaccaccggcuccaacaagucccuccaguccgccggcuuccccaccggccucaccuacucccagcucaugacccucaaggacuccaugaugcagcucgaccccuccgccaagaccuggaucgacaucgagggccgccccgaggaccccgucgagaucgcccucuaccagcccauguccggcugcuacauccacuucuuccgcgagcccaccgaccucaagcaguucaagcaggacgccaaguacucccacggcaucgacgucaccgaccucuuccccgcccagcccggccucaccuccgccgucaucgaggcccucccccgcaacaugguccucaccugccagggcuccgaggacaucaagcgccuccucgacucccagggccgccgcgacaucaagcucaucgacaucgcccucuccaaggccgacucccgccgcuucgagaacgccgucugggaccagugcaaggaccucugccacaugcacaccggcgucgucgucgagaagaagaagcgcggcggcaaggaggagaucaccccccacugcgcccucauggacugcaucauguacgacgccgccgucuccggcggccucaacauccccguccuccgcgccguccucccccgcgacauggucuuccgcaccuccucccccaaggucguccucuga

SEQ ID NO: 8424 - RNA, 1710 nt, Artificial Sequence
  derived and/or modified CDS sequence (opt2) from LASV(LASV253-NIG-2011;Clade II)__AIT17671__NP
auguccgccuccaaggaggucaaguccuuccucuggacccagucccuccgccgcgagcucuccggcuacugcuccuccaucaagcuccaggucgucaaggacgcccaggcccuccuccacggccucgacuucuccgaggucuccaacguccagcgccucaugcgcaagcagaagcgcgacgacuccgaccucaagcgccuccgcgaccucaaccaggccgucaacaaccucgucgagcucaaguccacccagcagaaguccguccuccgcgucggcacccucaccuccgacgaccuccucacccucgccgccgaccucgagaagcucaaguccaaggucauccgcaccgagcgcccccucuccuccggcgucuacaugggcaaccucuccacccagcagcucgagcagcgccgcgcccuccucaacaugaucggcauggucggcggcgcccagggcacccagcccggccgcgacggcgucguccgcgucugggacgucaagaaccccgaccuccucaacaaccaguucggcaccaugcccucccucacccucgccugccucaccaagcagggccaggucgaccucaacgacgucguccucgcccucaccgaccucggccucaucuacaccgccaaguaccccaacuccuccgaccucgaccgccucucccagucccaccccauccucaacauggucgacaccaagaaguccucccucaacaucuccggcuacaacuucucccucggcgccgccgucaaggccggcgccugcaugcucgacggcggcaacaugcucgagaccaucaaggucaccccccagaccauggacggcauccucaaguccauccucaaggucaagaagucccucggcauguucgucuccgacacccccggcgagcgcaaccccuacgagaacauccucuacaagaucugccucuccggcgacggcuggcccuacaucgccucccgcaccuccaucgucggccgcgccugggagaacaccaccgucgaccucgaguccgacggcaagccccagaaggucggcaccgccggcuccaacaagucccuccaguccgccggcuuccccaccggccucaccuacucccagcucaugacccucaaggacuccaugaugcagcucgaccccuccgccaagaccuggaucgacaucgagggccgccccgaggaccccgucgagaucgcccucuaccagcccauguccggcugcuacauccacuucuuccgcgagcccaccgaccucaagcaguucaagcaggacgccaaguacucccacggcaucgacgucaccgaccucuuccccgcccagcccggccucaccuccgccgucaucgaggcccucccccgcaacaugguccucaccugccagggcuccgacgacaucaagcgccuccucgacucccagggccgccgcgacaucaagcucaucgacaucgcccucuccaaggccgacucccgccgcuucgagaacgccgucugggaccagugcaaggaccucugccacaugcacaccggcgucgucgucgagaagaagaagcgcggcggcaaggaggagaucaccccccacugcgcccucauggacugcaucauguacgacgccgccgucuccggcggccucaacauccccguccuccgcgccguccucccccgcgacauggucuuccgcaccuccucccccaaggucguccucuga

SEQ ID NO: 8425 - RNA, 1710 nt, Artificial Sequence
  derived and/or modified CDS sequence (opt2) from LASV(LASV254-NIG-2011;Clade II)__AIT17675__NP
auguccgccuccaaggaggucaaguccuuccucuggacccagucccuccgccgcgagcucuccggcuacugcuccuccaucaagcuccaggucgucaaggacgcccaggcccuccuccacggccucgacuucuccgaggucuccaacguccagcgccucaugcgcaagcagaagcgcgacgacuccgaccucaagcgccuccgcgaccucaaccaggccgucaacaaccucgucgagcucaaguccacccagcagaaguccguccuccgcgucggcacccucaccuccgacgaccuccucacccucgccgccgaccucgagaagcucaaguccaaggucauccgcaccgagcgcccccucuccuccggcgucuacaugggcaaccucuccacccagcagcucgagcagcgccgcgcccuccucaacaugaucggcauggucggcggcgcccagggcacccagcccggccgcgacggcgucguccgcgucugggacgucaagaaccccgaccuccucaacaaccaguucggcaccaugcccucccucacccucgccugccucaccaagcagggccaggucgaccucaacgacgccguccucgcccucaccgaccucggccucaucuacaccgccaaguaccccaacuccuccgaccucgaccgccucucccagucccaccccauccucaacauggucgacaccaagaaguccucccucaacaucuccggcuacaacuucucccucggcgccgccgucaaggccggcgccugcaugcucgacggcggcaacaugcucgagaccaucaaggucaccccccagaccauggacggcauccucaaguccauccucaaggucaagaagucccucggcauguucgucuccgacacccccggcgagcgcaaccccuacgagaacauccucuacaagaucugccucuccggcgacggcuggcccuacaucgccucccgcaccuccaucgucggccgcgccugggagaacaccaucgucgaccucgaguccgacggcaagccccagaaggucggcaccgccggcuccaacaagucccuccaguccgccggcuuccccaccggccucaccuacucccagcucaugacccucaaggacuccaugaugcagcucgaccccuccgccaagaccuggaucgacaucgagggccgccccgaggaccccgucgagaucgcccucuaccagcccauguccggcugcuacauccacuucuuccgcgagcccaccgaccucaagcaguucaagcaggacgccaaguacucccacggcaucgacgucgccgaccucuuccccgcccagcccggccucaccuccgccgucaucgaggcccucccccgcaacaugguccucaccugccagggcuccgacgacaucaagcgccuccucgacucccagggccgccgcgacaucaagcucaucgacaucgcccucuccaaggccgacucccgccgcuucgagaacgccgucugggaccagugcaaggaccucugccacaugcacaccggcgucgucgucgagaagaagaagcgcggcggcaaggaggagaucaccccccacugcgcccucauggacugcaucauguacgacgccgccgucuccggcggccucaacauccccguccuccgcgccguccucccccgcgacauggucuuccgcaccuccucccccaaggucguccucuga

SEQ ID NO: 8426 - RNA, 1710 nt, Artificial Sequence
  derived and/or modified CDS sequence (opt2) from LASV(LASV256-NIG-2010;Clade II)__AIT17679__NP
auguccgccuccaaggaggucaaguccuuccucuggacccagucccuccgccgcgagcucuccggcuacugcuccuccaucaagcuccaggucgucaaggacgcccaggcccuccuccacggccucgacuucuccgaggucuccaacguccagcgccucaugcgcaagcagaagcgcgacgacuccgaccucaagcgccuccgcgaccucaaccaggccgucaacaaccucgucgagcucaaguccacccagcagaaguccauccuccgcgucggcacccucaccuccgacgaccuccucacccucgccgccgaccucgagaagcucaaguccaaggucauccgcaccgagcgcccccucuccuccggcgucuacaugggcaaccucuccacccagcagcucgagcagcgccgcgcccuccucaacaugaucggcauggucggcggcgcccaguccacccagcccggccgcgacggcgucguccgcgucugggacgucaagaaccccgaccuccucaacaaccaguucggcaccaugcccucccucacccucgccugccucaccaagcagggccaggucgaccucaacgacgccguccucgcccucaccgaccucggccucaucuacaccgccaaguaccccaacuccuccgaccucgaccgccucucccagucccaccccauccucaacauggucgacaccaagaaguccucccucaacaucuccggcuacaacuucucccucggcgccgccgucaaggccggcgccugcaugcucgacggcggcaacaugcucgagaccaucaaggucaccccccagaccauggacggcauccucaaguccauccucaaggucaagcgcucccucggcauguucgucuccgacacccccggcgagcgcaaccccuacgagaacauccucuacaagaucugccucuccggcgacggcuggcccuacaucgccucccgcaccuccaucgucggccgcgccugggagaacaccaccgucgaccucgaguccgacggcaagccccagaaggucggcaccgccggcuccaacaagucccuccaguccgccggcuuccccaccggccucaccuacucccagcucaugacccucaaggacuccaugaugcagcucgaccccuccgccaagaccuggaucgacaucgagggccgccccgaggaccccgucgagaucgcccucuaccagcccauguccggcugcuacauccacuucuuccgcgagcccaccgaccucaagcaguucaagcaggacgccaaguacucccacggcaucgacgucgccgaccucuuccccgcccagcccggccucaccuccgccgucaucgaggcccucccccgcaacaugguccucaccugccagggcuccgacgacaucaagcgccuccucgacucccagggccgccgcgacaucaagcucaucgacaucgcccucuccaaggccgacucccgccgcuucgagaacgccgucugggaccagugcaaggaccucugccacaugcacaccggcgucgucgucgagaagaagaagcgcggcggcaaggaggagaucaccccccacugcgcccucauggacugcaucauguacgacgccgccgucuccggcggccucaacauccccguccuccgcgccguccucccccgcgacauggucuuccgcaccuccucccccaaggucguccucuga

SEQ ID NO: 8427 - RNA, 1710 nt, Artificial Sequence
  derived and/or modified CDS sequence (opt2) from LASV(LASV263-NIG-2011;Clade II)__AIT17683__NP
auguccgccuccaaggaggucaaguccuuccucuggacccagucccuccgccgcgagcucuccggcuacugcuccaacaucaagcuccaggucgucaaggacgcccaggcccuccuccacggccucgacuucuccgaggucuccaacguccagcgccucaugcgcaagcagaagcgcgacgacuccgaccucaagcgccuccgcgaccucaaccaggccgucaacaaccucgucgagcucaaguccacccagcagaaguccauccuccgcgucggcacccucaccuccgacgaccuccucacccucgccgccgaccucgagaagcucaaguccaaggucauccgcaccgagcgcccccucuccuccggcgucuacaugggcaaccucuccacccagcagcucgagcagcgccgcgcccuccucaacaugaucggcauggucggcggcgcccagggcacccagcccggccgcgacggcgucguccgcgucugggacgucaagaaccccgaccuccucaacaaccaguucggcaccaugcccucccucacccucgccugccucaccaagcagggccaggucgaccucaacgacgccguccucgcccucaccgaccucggccucaucuacaccgccaaguaccccaacuccuccgaccucgaccgccucucccagucccaccccauccucaacauggucgacaccaagaaguccucccucaacaucuccggcuucaacuucucccucggcgccgccgucaaggccggcgccugcaugcucgacggcggcaacaugcucgagaccaucaaggucaccccccagaccauggacggcauccucaaguccauccucaaggucaagaagucccucggcauguucgucuccgacacccccggcgagcgcaaccccuacgagaacauccucuacaagaucugccucuccggcgacggcuggcccuacaucgccucccgcaccuccaucgucggccgcgccugggagaacaccaccgucgaccucgaguccgacggcaagccccagaaggucggcaccgccggcuccaacaagucccuccaguccgccggcuuccccaccggccucaccuacucccagcucaugacccucaaggacuccaugaugcagcucgaccccuccgccaagaccuggaucgacaucgagggccgccccgaggaccccgucgagaucgcccucuaccagcccauguccggcugcuacauccacuucuuccgcgagcccaccgaccucaagcaguucaagcaggacgccaaguacucccacggcaucgacgucgccgaccucuuccccgcccagcccggccucaccuccgccgucaucgaggcccucccccgcaacaugguccucaccugccagggcuccgacgacaucaagcgccuccucgacucccagggccgccgcgacaucaagcucaucgacaucgcccucuccaaggccgacucccgccgcuucgagaacgccgucugggaccagugcaaggaccucugccacaugcacaccggcgucgucgucgagaagaagaagcgcggcggcaaggaggagaucaccccccacugcgcccucauggacugcaucauguacgacgccgccgucuccggcggccucaacauccccguccuccgcgccguccucccccgcgacauggucuuccgcaccuccucccccaaggucguccucuga

SEQ ID NO: 8428 - RNA, 1710 nt, Artificial Sequence
  derived and/or modified CDS sequence (opt2) from LASV(LASV267-NIG-2010;Clade II)__AIT17687__NP
auguccgccuccaaggaggucaaguccuuccucuggacccagucccuccgccgcgagcucuccggcuacugcuccuccaucaagcuccaggucgucaaggacgcccaggcccuccuccacggccucgacuucuccgaggucuccaacguccagcgccucaugcgcaagcagaagcgcgacgacuccgaccucaagcgccuccgcgaccucaaccaggccgucaacaaccucgucgagcucaaguccacccagcagaaguccauccuccgcgucggcacccucaccuccgacgaccuccucacccucgccgccgaccucgagaagcucaaguccaaggucauccgcaccgagcgcccccucuccuccggcgucuacaugggcaaccucuccgcccagcagcucgagcagcgccgcgcccuccucaacaugaucggcauggucggcggcgcccagggcacccagcccggccgcgacggcgucguccgcgucugggacgucaagaaccccgaccuccucaacaaccaguucggcaccaugcccucccucacccucgccugccucaccaagcagggccaggucgaccucaacgacgccguccucgcccucaccgaccucggccucaucuacaccgccaaguaccccaacuccuccgaccucgaccgccucucccagucccaccccauccucaacauggucgacaccaagaaguccucccucaacaucuccggcuacaacuucucccucggcgccgccgucaaggccggcgccugcaugcucgacggcggcaacaugcucgagaccaucaaggucaccccccagaccauggacggcauccucaaguccauccucaaggucaagcgcucccucggcauguucgucuccgacacccccggcgagcgcaaccccuacgagaacauccucuacaagaucugccucuccggcgacggcuggcccuacaucgccucccgcaccuccaucgucggccgcgccugggagaacaccaccgucgaccucgaguccgacggcaagccccagaaggucggcaccgccggcuccaacaagucccuccaguccgccggcuuccccaccggccucaccuacucccagcucaugacccucaaggacuccaugaugcagcucgaccccuccgccaagaccuggaucgacaucgagggccgccccgaggaccccgucgagaucgcccucuaccagcccauguccggcugcuacauccacuucuuccgcgagcccaccgaccucaagcaguucaagcaggacgccaaguacucccacggcaucgacgucgccgaccucuuccccgcccagcccggccucaccuccgccgucaucgaggcccucccccgcaacaugguccucaccugccagggcuccgacgacaucaagcgccuccucgacucccagggccgccgcgacaucaagcucaucgacaucgcccucuccaaggccgacucccgccgcuucgagaacgccgucugggaccagugcaaggaccucugccacaugcacaccggcgucgucgucgagaagaagaagcgcggcggcaaggaggagaucaccccccacugcgcccucauggacugcaucauguacgacgccgccgucuccggcggccucaacauccccguccuccgcgccguccucccccgcgacauggucuuccgcaccuccucccccaaggucguccucuga

SEQ ID NO: 8429 - RNA, 1710 nt, Artificial Sequence
  derived and/or modified CDS sequence (opt2) from LASV(LASV274-NIG-2010;Clade II)__AIT17695__NP
auguccgccuccaaggaggucaaguccuuccucuggacccagucccuccgccgcgagcucuccggcuacugcuccaacaucaagcuccaggucgucaaggacgcccaggcccuccuccacggccucgacuucuccgaggucuccaacguccagcgccucaugcgcaagcagaagcgcgacgacuccgaccucaagcgccuccgcgaccucaaccaggccgucaacaaccucgucgagcucaaguccacccagcagaaguccauccuccgcgucggcacccucaccuccgacgaccuccucacccucgccgccgaccucgagaagcucaaguccaaggucauccgcaccgagcgcccccucuccuccggcgucuacaugggcaaccucuccacccagcagcucgagcagcgccgcgcccuccucaaccucaucggcauggucggcggcgcccagggcacccagcccggccgcgacggcgucguccgcgucugggacgucaagaaccccgaccuccucaacaaccaguucggcaccaugcccucccucacccucgccugccucaccaagcagggccaggucgaccucaacgacgucguccucgcccucaccgaccucggccucaucuacaccgccaaguaccccaacuccuccgaccucgaccgccucucccagucccaccccauccucaacauggucgacaccaagaaguccucccucaacaucuccggcuucaacuucucccucggcgccgccgucaaggccggcgccugcaugcucgacggcggcaacaugcucgagaccaucaaggucaccccccacaccauggacggcauccucaaguccauccucaaggucaagaagucccucggcauguucgucuccgacacccccggcgagcgcaaccccuacgagaacauccucuacaagaucugccucuccggcgacggcuggcccuacaucgccucccgcaccuccaucgucggccgcgccugggagaacaccaccgucgaccucgaguccgacggcaagccccacaaggucggcaccgccggcuccaacaagucccuccaguccgccggcuuccccaccggccucaccuacucccagcucaugacccucaaggacuccaugaugcagcucgaccccuccgccaagaccuggaucgacaucgagggccgccccgaggaccccgucgagaucgcccucuaccagcccauguccggcugcuacauccacuucuuccgcgagcccaccgaccucaagcaguucaagcaggacgccaaguacucccacggcaucgacgucgccgaccucuuccccgcccagcccggccucaccuccgccgucaucgaggcccucccccgcaacaugguccucaccugccagggcuccgacgacaucaagcgccuccucgacucccagggccgccgcgacaucaagcucaucgacaucgcccucuccaaggccgacucccgccgcuucgagaacgccgucugggaccagugcaaggaccucugccacaugcacaccggcgucgucgucgagaagaagaagcgcggcggcaaggaggagaucaccccccacugcgcccucauggacugcaucauguacgacgccgccgucuccggcggccucaacauccccguccuccgcgccguccucccccgcgacauggucuuccgcaccuccucccccaaggucguccucuga

SEQ ID NO: 8430 - RNA, 1710 nt, Artificial Sequence
  derived and/or modified CDS sequence (opt2) from LASV(LASV719-NIG-2009;Clade II)__AIT17705__NP
auguccgccuccaaggaggucaaguccuuccucuggacccagucccuccgccgcgagcucuccggcuacugcuccaacaucaagcuccaggucgucaaggacgcccaggcccuccuccacggccucgacuucuccgaggucuccaacguccagcgccucaugcgcaagcagaagcgcgacgacuccgaccucaagcgccuccgcgaccucaaccaggccgucaacaaccucgucgagcucaaguccacccagcagaaguccauccuccgcgucggcacccucaccuccgacgaccuccucacccucgccgccgaccucgagaagcucaaguccaaggucauccgcaccgagcgcccccucuccuccggcgucuacaugggcaaccucuccacccagcagcucgagcagcgccgcgcccuccucaaccucaucggcauggucggcggcgcccagggcacccagcccggccgcgacggcgucguccgcgucugggacgucaagaaccccgaccuccucaacaaccaguucggcaccaugcccucccucacccucgccugccucaccaagcagggccaggucgaccucaacgacgccguccucgcccucaccgaccucggccucaucuacaccgccaaguaccccaacuccuccgaccucgaccgccucucccagucccaccccauccucaacauggucgacaccaagaaguccucccucaacaucuccggcuucaacuucucccucggcgccgccgucaaggccggcgccugcaugcucgacggcggcaacaugcucgagaccaucaaggucaccccccagaccauggacggcauccucaaguccauccucaaggucaagaagucccucggcauguucgucuccgacacccccggcgagcgcaaccccuacgagaacauccucuacaagaucugccucuccggcgacggcuggcccuacaucgccucccgcaccuccaucgucggccgcgccugggagaacaccaccgucgaccucgaguccgacggcaagccccacaaggucggcaccgccggcuccaaccgcucccuccaguccgccggcuuccccaccggccucaccuacucccagcucaugacccucaaggacuccaugaugcagcucgaccccuccgccaagaccuggaucgacaucgagggccgccccgaggaccccgucgagaucgcccucuaccagcccauguccggcugcuacauccacuucuuccgcgagcccaccgaccucaagcaguucaagcaggacgccaaguacucccacggcaucgacgucgccgaccucuuccccgcccagcccggccucaccuccgccgucaucgaggcccucccccgcaacaugguccucaccugccagggcuccgacgacaucaagcgccuccucgacucccagggccgccgcgacaucaagcucaucgacaucgcccucuccaaggccgacucccgccgcuucgagaacgccgucugggaccagugcaaggaccucugccacaugcacaccggcgucgucgucgagaagaagaagcgcggcggcaaggaggagaucaccccccacugcgcccucauggacugcaucauguacgacgccgccgucuccggcggccucaacauccccguccuccgcgccguccucccccgcgacauggucuuccgcaccuccucccccaaggucguccucuga

SEQ ID NO: 8431 - RNA, 1710 nt, Artificial Sequence
  derived and/or modified CDS sequence (opt2) from LASV(LASV737-NIG-2009;Clade II)__AIT17711__NP
auguccgccuccaaggaggucaaguccuuccucuggacccagucccuccgccgcgagcucuccggcuacugcuccaacaucaagcuccaggucgucaaggacgcccaggcccuccuccacggccucgacuucuccgaggucuccaacguccagcgccucaugcgcaagcagaagcgcgacgacuccgaccucaagcgccuccgcgaccucaaccaggccgucaacaaccucgucgagcucaaguccacccagcagaaguccauccuccgcgucggcacccucaccuccgacgaccuccucacccucgccgccgaccucgagaagcucaaguccaaggucauccgcaccgagcgcccccucuccuccggcgucuacaugggcaaccucuccacccagcagcucgagcagcgccgcgcccuccucaaccucaucggcauggucggcggcgcccagggcacccagcccggccgcgacggcgucguccgcgucugggacgucaagaaccccgaccuccucaacaaccaguucggcaccaugcccucccucacccucgccugccucaccaagcagggccaggucgaccucaacgacgccguccucgcccucaccgaccucggccucaucuacaccgccaaguaccccaacuccuccgaccucgaccgccucucccagucccaccccauccucaacauggucgacaccaagaaguccucccucaacaucuccggcuucaacuucucccucggcgccgccgucaaggccggcgccugcaugcucgacggcggcaacaugcucgagaccaucaaggucaccccccagaccauggacggcauccucaaguccauccucaaggucaagaagucccucggcauguucgucuccgacacccccggcgagcgcaaccccuacgagaacauccucuacaagaucugccucuccggcgacggcuggcccuacaucgccucccgcaccuccaucgucggccgcgccugggagaacaccaccgucgaccucgaguccgacggcaagccccacaaggucggcaccgccggcuccuccaagucccuccaguccgccggcuuccccaccggccucaccuacucccagcucaugacccucaaggacuccaugaugcagcucgaccccuccgccaagaccuggaucgacaucgagggccgccccgaggaccccgucgagaucgcccucuaccagcccauguccggcugcuacauccacuucuuccgcgagcccaccgaccucaagcaguucaagcaggacgccaaguacucccacggcaucgacgucgccgaccucuuccccgcccagcccggccucaccuccgccgucaucgaggcccucccccgcaacaugguccucaccugccagggcuccgacgacaucaagcgccuccucgacucccagggccgccgcgacaucaagcucaucgacaucgcccucuccaaggccgacucccgccgcuucgagaacgccgucugggaccagugcaaggaccucugccacaugcacaccggcgucgucgucgagaagaagaagcgcggcggcaaggaggagaucaccccccacugcgcccucauggacugcaucauguacgacgccgccgucuccggcggccucaacauccccguccuccgcgccguccucccccgcgacauggucuuccgcaccuccucccccaaggucguccucuga

SEQ ID NO: 8432 - RNA, 1710 nt, Artificial Sequence
  derived and/or modified CDS sequence (opt2) from LASV(LASV738-NIG-2009;Clade II)__AIT17713__NP
auguccgccuccaaggaggucaaguccuuccucuggacccagucccuccgccgcgagcucuccggcuacugcuccaacaucaagcuccaggucgucaaggacgcccaggcccuccuccacggccucgacuucuccgaggucuccaacguccagcgccucaugcgcaagcagaagcgcgacgacuccgaccucaagcgccuccgcgaccucaaccaggccgucaacaaccucgucgagcucaaguccacccagcagaaguccauccuccgcgucggcacccucaccuccgacgaccuccucacccucgccgccgaccucgagaagcucaaguccaaggucauccgcaccgagcgcccccucuccuccggcgucuacaugggcaaccucuccacccagcagcucgagcagcgccgcgcccuccucaacaugaucggcauggucggcggcgcccagggcacccagcccggccgcgacggcgucguccgcgucugggacgucaagaaccccgaccuccucaacaaccaguucggcaccaugcccucccucacccucgccugccucaccaagcagggccaggucgaccucaacgacgccguccucgcccucaccgaccucggccucaucuacaccgccaaguaccccaacuccuccgaccucgaccgccucucccagucccaccccauccucaacauggucgacaucaagaaguccucccucaacaucuccggcuacaacuucucccucggcgccgccgucaaggccggcgccugcaugcucgacggcggcaacaugcucgagaccaucaaggucaccccccagaccauggacggcauccucaaguccauccucaaggucaagaagucccucggcauguucgucuccgacacccccggcgagcgcaaccccuacgagaacauccucuacaagaucugccucuccggcgacggcuggcccuacaucgccucccgcaccuccaucgucggccgcgccugggagaacaccaccgucgaccucgaguccgacggcaagccccagaaggucggcaccgccggcuccaacaagucccuccaguccgccggcuuccccaccggccucaccuacucccagcucaugacccucaaggacuccaugaugcagcucgaccccuccgccaagaccuggaucgacaucgagggccgccccgaggaccccgucgagaucgcccucuaccagcccauguccggcugcuacauccacuucuuccgcgagcccaccgaccucaagcaguucaagcaggacgccaaguacucccacggcaucgacgucgccgaccucuuccccgcccagcccggccucaccuccgccgucaucgaggcccucccccgcaacaugguccucaccugccagggcuccgacgacaucaagcgccuccucgacucccagggccgccgcgacaucaagcucaucgacaucgcccucaacaaggccgacucccgccgcuucgagaacgccgucugggaccagugcaaggaccucugccacaugcacaccggcgucgucgucgagaagaagaagcgcggcggcaaggaggagaucaccccccacugcgcccucauggacugcaucauguacgacgccgccgucuccggcggccucaacauccccguccuccgcgccguccucccccgcgacauggucuuccgcaccuccucccccaaggucguccucuga

SEQ ID NO: 8433 - RNA, 1710 nt, Artificial Sequence
  derived and/or modified CDS sequence (opt2) from LASV(LASV966-NIG-2009;Clade II)__AIT17719__NP
auguccgccuccaaggaggucaaguccuuccucuggacccagucccuccgccgcgagcucuccggcuacugcuccuccaucaagcuccaggucgucaaggacgcccaggcccuccuccacggccucgacuucuccgaggucuccaacguccagcgccucaugcgcaagcagaagcgcgacgacuccgaccucaagcgccuccgcgaccucaaccaggccgucaacaaccucgucgagcucaaguccacccagcagaaguccauccuccgcgucggcacccucaccuccgacgaccuccucacccucgccgccgaccucgagaagcucaaguccaaggucauccgcaccgagcgcccccucuccuccggcgucuacaugggcaaccucuccacccagcagcucgagcagcgccgcgcccuccucaacaugaucggcauggucuccggcgcccagggcacccagcccggccgcgacggcgucguccgcgucugggacgucaagaaccccgagcuccucaacaaccaguucggcaccaugcccucccucacccucgccugccucaccaagcagggccaggucgaccucaacgacgccguccucgcccucaccgaccucggccucaucuacaccgccaaguaccccaacuccuccgaccucgaccgccucucccagucccaccccauccucaacauggucgacaccaagaaguccucccucaacaucuccggcuacaacuucucccucggcgccgccgucaaggccggcgccugcaugcucgacggcggcaacaugcucgagaccaucaaggucaccccccagaccauggacggcauccucaaguccauccucaaggucaagaagucccucggcauguucgucuccgacacccccggcgagcgcaaccccuacgagaacauccucuacaagaucugccucuccggcgacggcuggcccuacaucgccucccgcaccuccaucgucggccgcgccugggagaacaccaccgucgaccucgaguccgacggcaagccccagaaggucggcaccgccggcuccaacaagucccuccaguccgccggcuuccccaccggccucaccuacucccagcucaugacccucaaggacuccaugaugcagcucgaccccuccgccaagaccuggaucgacaucgagggccgccccgaggaccccgucgagaucgcccucuaccagcccauguccggcugcuacauccacuucuuccgcgagcccaccgaccucaagcaguucaagcaggacgccaaguacucccacggcaucgacgucgccgaccucuuccccgcccagcccggccucaccuccgccgucaucgaggcccucccccgcaacaugguccucaccugccagggcuccgacgacaucaagcgccuccucgacucccagggccgccgcgacaucaagcucaucgacaucucccucuccaaggccgacucccgccgcuucgagaacgccgucugggaccagugcaaggaccucugccacaugcacaccggcgucgucgucgagaagaagaagcgcggcggcaaggaggagaucaccccccacugcgcccucauggacugcaucauguacgacgccgccgucuccggcggccucaacauccccguccuccgcgccguccucccccgcgacauggucuuccgcaccuccucccccaaggucguccucuga

SEQ ID NO: 8434 - RNA, 1710 nt, Artificial Sequence
  derived and/or modified CDS sequence (opt2) from LASV(LASV969-NIG-2009;Clade II)__AIT17725__NP
auguccgccuccaaggaggucaaguccuuccucuggacccagucccuccgccgcgagcucuccggcuacugcuccaacaucaagcuccaggucgucaaggacgcccaggcccuccuccacggccucgacuucuccgaggucuccaacguccagcgccucaugcgcaagcagaagcgcgacgacuccgaccucaagcgccuccgcgaccucaaccaggccgucaacaaccucgucgagcucaaguccacccagcagaaguccauccuccgcgucggcacccucaccuccgacgaccuccucacccucgccgccgaccucgagaagcucaaguccaaggucauccgcaccgagcgcccccucuccuccggcgucuacaugggcaaccucuccgcccagcagcucgagcagcgccgcgcccuccucaacaugaucggcauggucggcggcgcccagggcacccagcucggccgcgacggcgucguccgcgucugggacgucaagaaccccgaccuccucaacaaccaguucggcaccaugcccucccucacccucgccugccucaccaagcagggccaggucgaccucaacgacgccguccucgcccucaccgaccucggccucaucuacaccgccaaguaccccaacuccuccgaccucgaccgccucucccagucccaccccauccucaacauggucgacaccaagaaguccucccucaacaucuccggcuacaacuucucccucggcgccgccgucaaggccggcgccugcaugcucgacggcggcaacaugcucgagaccaucaaggucaccccccagaccauggacggcauccucaaguccauccucaaggucaagaagucccucggcauguucgucuccgacacccccggcgagcgcaaccccuacgagaacauccucuacaagaucugccucuccggcgacggcuggcccuacaucgccucccgcaccuccaucgucggccgcgccugggagaacaccaccgucgaccucgaguccgacggcaagccccagaaggucggcaccgccggcuccaacaagucccuccaguccgccggcuuccccaccggccucaccuacucccagcucaugacccucaaggacuccaugaugcagcucgaccccuccgccaagaccuggaucgacaucgagggccgccccgaggaccccgucgagaucgcccucuaccagcccauguccggcugcuacauccacuucuuccgcgagcccaccgaccucaagcaguucaagcaggacgccaaguacucccacggcaucgacgucgccgaccucuuccccgcccagcccggccucaccuccgccgucaucgaggcccucccccgcaacaugguccucaccugccagggcuccgaggacaucaagcgccuccucgacucccagggccgccgcgacaucaagcucaucgacaucgcccucuccaaggccgacucccgccgcuucgagaacgccgucugggaccagugcaaggaccucugccacaugcacaccggcgucgucgucgagaagaagaagcgcggcggcaaggaggagaucaccccccacugcgcccucauggacugcaucauguacgacgccgccgucuccggcggccucaacauccccguccuccgcgccguccucccccgcgacauggucuuccgcaccuccucccccaaggucguccucuga

SEQ ID NO: 8435 - RNA, 1710 nt, Artificial Sequence
  derived and/or modified CDS sequence (opt2) from LASV(LASV971-NIG-2009;Clade II)__AIT17729__NP
auguccgccuccaaggaggucaaguccuuccucuggacccagucccuccgccgcgagcucuccggcuacugcuccuccaucaagcuccaggucgucaaggacgcccaggcccuccuccacggccucgacuucuccgaggucuccaacguccagcgccucaugcgcaagcagcgccgcgacgacuccgaccucaagcgccuccgcgaccucaaccaggccgucaacaaccucgucgagcucaaguccacccagcagaaguccauccuccgcgucggcacccucaccuccgacgaccuccucacccucgccgccgaccucgagaagcucaaguccaaggucauccgcaccgagcgcccccucuccuccggcgucuacaugggcaaccucuccacccagcagcucgagcagcgccgcgcccuccucaacaugaucggcauggucggcggcacccagggcacccagcccggccgcgacggcgucguccgcgucugggacgucaagaaccccgaccuccucaacaaccaguucggcaccaugcccucccucacccucgccugccucaccaagcagggccaggucgaccucaacgacgccguccucgcccucaccgaccucggccucaucuacaccgccaaguaccccaacuccuccgaccucgaccgccucucccagucccaccccauccucaacauggucgacaccaagaaguccucccucaacaucuccggcuacaacuucucccucggcgccgccgucaaggccggcgccugcaugcucgacggcggcaacaugcucgagaccaucaaggucaccccccagaccauggacggcauccucaaguccauccucaaggucaagcgcucccucggcauguucgucuccgacacccccggcgagcgcaaccccuacgagaacauccucuacaagaucugccucuccggcgacggcuggcccuacaucgccucccgcaccuccaucgucggccgcgccugggagaacaccaccgucgaccucgaguccgacggcaagccccagaaggucggcaccgccggcuccaacaagucccuccaguccgccggcuuccccaccggccucaccuacucccagcucaugacccucaaggacuccaugaugcagcucgaccccuccgccaagaccuggaucgacaucgagggccgccccgaggaccccgucgagaucgcccucuaccagcccauguccggcugcuacauccacuucuuccgcgagcccaccgaccucaagcaguucaagcaggacgccaaguacucccacggcaucgacgucgccgaccucuuccccgcccagcccggccucaccuccgccgucaucgaggcccucccccgcaacaugguccucaccugccagggcuccgacgacaucaagcgccuccucgacucccagggccgccgcgacaucaagcucaucgacaucgcccucuccaaggccgacucccgcaaguucgagaacgccgucugggaccagugcaaggaccucugccacaugcacaccggcgucgucgucgagaagaagaagcgcggcggcaaggaggagaucaccccccacugcgcccucauggacugcaucauguacgacgccgccgucuccggcggccucaacauccccguccuccgcgccguccucccccgcgacauggucuuccgcaccuccucccccaaggucguccucuga

SEQ ID NO: 8436 - RNA, 1710 nt, Artificial Sequence
  derived and/or modified CDS sequence (opt2) from LASV(LASV975-NIG-2009;Clade II)__AIT17733__NP
auguccgccuccaaggaggucaaguccuuccucuggacccagucccuccgccgcgagcucuccggcuacugcuccaacaucaagcuccaggucgucaaggacgcccaggcccuccuccacggccucgacuucuccgaggucuccaacguccagcgccucaugcgcaagcagaagcgcgacgacuccgaccucaagcgccuccgcgaccucaaccaggccgucaacaaccucgucgagcucaaguccacccagcagaaguccauccuccgcgucggcacccucaccuccgacgaccuccucauccucgccgccgaccucgagaagcucaaguccaaggucauccgcaccgagcgcccccucuccuccggcgucuacaugggcaaccucuccacccagcagcucgagcagcgccgcgcccuccucaacaugaucggcauggucggcggcgcccagggcacccagcccggccgcgacggcgucguccgcgucugggacgucaagaaccccgaccuccucaacaaccaguucggcaccaugcccucccucacccucgccugccucaccaagcagggccaggucgaccucaacgacgccguccucgcccucaccgaccucggccucaucuacaccgccaaguaccccaacuccuccgaccucgaccgccucucccagucccaccccauccucaacauggucgacaccaagaaguccucccucaacaucuccggcuacaacuucucccucggcgccgccgucaaggccggcgccugcaugcucgacggcggcaacaugcucgagaccaucaaggucaccccccagaccauggacggcauccucaaguccauccucaaggucaagaagucccucggcauguucgucuccgacacccccggcgagcgcaaccccuacgagaacauccucuacaagaucugccucuccggcgacggcuggcccuacaucgccucccgcaccuccaucgucggccgcgccugggagaacaccaccgucgaccucgaguccgacggcaagccccagaaggucggcaccgccggcuccaacaagucccuccaguccgccggcuuccccaccggccucaccuacucccagcucaugacccucaaggacuccaugaugcagcucgaccccuccgccaagaccuggaucgacaucgagggccgccccgaggaccccgucgagaucgcccucuaccagcccauguccggcugcuacauccacuucuuccgcgagcccaccgaccucaagcaguucaagcaggacgccaaguacucccacggcaucgacgucgccgaccucuuccccgcccagcccggccucaccuccgccgucaucgaggcccucccccgcaacaugguccucaccugccagggcuccgacgacaucaagcgccuccucgacucccagggccgccgcgacaucaagcucaucgacaucgcccucuccaaggccgacucccgccgcuucgagaacgccgucugggaccagugcaaggaccucugccacaugcacaccggcgucgucgucgagaagaagaagcgcggcggcaaggaggagaucaccccccacugcgcccucauggacugcaucauguacgacgccgccgucuccggcggccucaacauccccguccuccgcgccguccucccccgcgacauggucuuccgcaccuccucccccaaggucguccucuga

SEQ ID NO: 8437 - RNA, 1710 nt, Artificial Sequence
  derived and/or modified CDS sequence (opt2) from LASV(LASV978-NIG-2009;Clade II)__AIT17745__NP
auguccgccuccaaggagaucaaguccuuccucuggacccagucccuccgccgcgagcucuccggcuacugcuccuccaucaagcuccaggucgucaaggacgcccaggcccuccuccacggccucgacuucuccgaggucuccaacguccagcgccucaugcgcaagcagaagcgcgacgacuccgaccucaagcgccuccgcgaccucaaccaggccgucaacaaccucgucgagcucaaguccacccagcagaaguccauccuccgcgucggcacccucaccuccgacgaccuccucacccucgccgccgaccucgagaagcucaaguccaaggucauccgcaccgagcgcccccucuccuccggcgucuacaugggcaaccucuccacccagcagcucgagcagcgccgcgcccuccucaacaugaucggcauggucggcggcgcccagggcacccagcccggccgcgacggcgucguccgcgucugggacgucaagaaccccgaccuccucaacaaccaguucggcaccaugcccucccucacccucgccugccucaccaagcagggccaggucgaccucaacgacgccguccucgcccucaccgaccucggccucaucuacaccgccaaguaccccaacuccuccgaccucgaccgccucucccagucccaccccauccucaacauggucgacaccaagaaguccucccucaacaucuccggcuacaacuucucccucggcgccgccgucaaggccggcgccugcaugcucgacggcggcaacaugcucgagaccaucaaggucaccccccagaccauggacggcauccucaaguccauccucaaggucaagcgcucccucggcauguucgucuccgacgcccccggcgagcgcaaccccuacgagaacauccucuacaagaucugccucuccggcgacggcuggcccuacaucgccucccgcaccuccaucgucggccgcgccugggagaacaccaccgucgaccucgaguccgacggcaagccccagaaggucggcaccgccggcuccaacaagucccuccaguccgccggcuuccccaccggccucaccuacucccagcucaugacccucaaggacuccaugaugcagcucgaccccuccgccaagaccuggaucgacaucgagggccgccccgaggaccccgucgagaucgcccucuaccagcccauguccggcugcuacauccacuucuuccgcgagcccaccgaccucaagcaguucaagcaggacgccaaguacucccacggcaucgacgucgccgaccucuuccccgcccagcccggccucaccuccgccgucaucgaggcccucccccgcaacaugguccucaccugccagggcuccgacgacaucaagcgccuccucgacucccagggccgccgcgacaucaagcucaucgacaucgcccucuccaaggucgacucccgccgcuucgagaacgccgucugggaccagugcaaggaccucugccacaugcacaccggcgucgucgucgagaagaagaagcgcggcggcaaggaggagaucaccccccacugcgcccucauggacugcaucauguacgacgccgccgucuccggcggccucaacauccccguccuccgcgccguccucccccgcgacauggucuuccgcaccuccucccccaaggucguccucuga

SEQ ID NO: 8438 - RNA, 1710 nt, Artificial Sequence
  derived and/or modified CDS sequence (opt2) from LASV(LASV981-NIG-2009;Clade II)__AIT17753__NP
auguccgccuccaaggaggucaaguccuuccucuggacccagucccuccgccgcgagcucuccggcuacugcuccuccaucaagcuccaggucgucaaggacgcccaggcccuccuccacggccucgacuucuccgaggucuccaacguccagcgccucaugcgcaagcagaagcgcgacgacuccgaccucaagcgccuccgcgaccucaaccaggccgucaacaaccucgucgagcucaaguccacccagcagaaguccauccuccgcgucggcacccucaccuccgacgaccuccucacccucgccgccgaccucgagaagcucaaguccaaggucauccgcaccgagcgcccccucuccuccggcgucuacaugggcaaccucuccacccagcagcucgagcagcgccgcgcccuccucaacaugaucggcauggucggcggcgcccagggcacccagcccggccgcgacggcgucguccgcgucugggacgucaagaaccccgaccuccucaacaaccaguucggcaccaugcccucccucacccucgccugccucaccaagcagggccaggucgaccucaacgacgccguccucgcccucaccgaccucggccucaucuacaccgccaaguaccccaacuccuccgaccucgaccgccucucccagucccaccccauccucaacauggucgacaccaagaaguccucccucaacaucuccggcuacaacuucucccucggcgccgccgucaaggccggcgccugcaugcucgacggcggcaacaugcucgagaccaucaaggucaccccccagaccauggacggcauccucaaguccauccucaaggucaagcgcucccucggcauguucgucuccgacacccccggcgagcgcaaccccuacgagaacauccucuacaagaucugccucuccggcgacggcuggcccuacaucgccucccgcaccuccaucgucggccgcgccugggagaacaccaccgucgaccucgaguccgacggcaagccccagaaggucggcaccaccggcuccaacaagucccuccaguccgccggcuuccccaccggccucaccuacucccagcucaugacccucaaggacuccaugaugcagcucgaccccuccgccaagaccuggaucgacaucgagggccgccccgaggaccccgucgagaucgcccucuaccagcccauguccggcugcuacauccacuucuuccgcgagcccaccgaccucaagcaguucaagcaggacgccaaguacucccacggcaucgacgucgccgaccucuuccccgcccagcccggccucaccuccgccgucaucgaggcccucccccgcaacaugguccucaccugccagggcuccgacgacaucaagcgccuccucgacucccagggccgccgcgacaucaagcucaucgacaucgcccucuccaaggccgacucccgccgcuucgagaacgccgucugggaccagugcaaggaccucugccacaugcacaccggcgucgucgucgagaagaagaagcgcggcggcaaggaggagaucaccccccacugcgcccucauggacugcaucauguacgacgccgccgucuccggcggccucaacauccccguccuccgcgccguccucccccgcgacauggucuuccgcaccuccucccccaaggucguccucuga

SEQ ID NO: 8439 - RNA, 1710 nt, Artificial Sequence
  derived and/or modified CDS sequence (opt2) from LASV(LASV988-NIG-2009;Clade II)__AIT17759__NP
auguccgccuccaaggaggucaaguccuuccucuggacccagucccuccgccgcgagcucuccggcuacugcuccaacaucaagcuccaggucgucaaggacgcccaggcccuccuccacggccucgacuucuccgaggucuccaacguccagcgccucaugcgcaagcagaagcgcgacgacuccgaccucaagcgccuccgcgaccucaaccaggccgucaacaaccucgucgagcucaaguccacccagcagaaguccauccuccgcgucggcacccucaccuccgacgaccuccucacccucgccgccgaccucgagaagcucaaguccaaggucauccgcaccgagcgcccccucuccuccggcgucuacaugggcaaccucaacacccagcagcucgagcagcgccgcgcccuccucaacaugaucggcauggccggcggcgcccagggcacccagcccggccgcgacggcgucguccgcgucugggacgucaagaaccccgaccuccucaacaaccaguucggcaccaugcccucccucacccucgccugccucaccaagcagggccaggucgaccucaacgacgccguccucgcccucaccgaccucggccucaucuacaccgccaaguaccccaacuccuccgaccucgaccgccucucccagucccaccccauccucaacauggucgacaccaagaaguccucccucaacaucuccggcuacaacuucucccucggcgccgccgucaaggccggcgccugcaugcucgacggcggcaacaugcucgagaccaucaaggucaccccccagaccauggacggcauccucaaguccauccucaaggucaagaagucccucggcauguucgucuccgacacccccggcgagcgcaaccccuacgagaacauccucuacaagaucugccucuccggcgacggcuggcccuacaucgccucccgcaccuccaucgucggccgcgccugggagaacaccaccgucgaccucgaguccgacggcaagccccagaaggucggcaccgccggcuccaacaagucccuccaguccgccggcuuccccaccggccucaccuacucccagcucaugacccucaaggacuccaugaugcagcucgaccccuccgccaagaccuggaucgacaucgagggccgccccgaggaccccgucgagaucgcccucuaccagcccauguccggcugcuacauccacuucuuccgcgagcccaccgaccucaagcaguucaagcaggacgccaaguacucccacggcaucgacgucgccgaccucuuccccgcccagcccggccucaccuccgccgucaucgaggcccucccccgcaacaugguccucaccugccagggcuccgacgacaucaagcgccuccucgacucccagggccgccgcgacaucaagcucaucgacaucgcccucuccaaggccgacucccgccgcuucgagaacgccgucugggaccagugcaaggaccucugccacaugcacaccggcgucgucgucgagaagaagaagcgcggcggcaaggaggagaucaccccccacugcgcccucauggacugcaucauguacgacgccgccgucuccggcggccucaacauccccguccuccgcgccguccucccccgcgacauggucuuccgcaccuccucccccaaggucguccucuga

SEQ ID NO: 8440 - RNA, 1710 nt, Artificial Sequence
  derived and/or modified CDS sequence (opt2) from LASV(LASV989-NIG-2009;Clade II)__AIT17763__NP
auguccgccuccaaggaggucaaguccuuccucuggacccagucccuccgccgcgagcucuccggcuacugcuccuccaucaagcuccaggucgucaaggacgcccaggcccuccuccacggccucgacuucuccgaggucuccaacguccagcgccucaugcgcaagcagaagcgcgacgacuccgaccucaagcgccuccgcgaccucaaccaggccgucaacaaccucgucgagcucaaguccacccagcagaaguccauccuccgcgucggcacccucaccuccgacgaccuccucacccucgccgccgaccucgagaagcucaaguccaaggucauccgcaccgagcgcccccucuccuccggcgucuacaugggcaaccucuccacccagcagcucgagcagcgccgcgcccuccucaacaugaucggcauggucggcggcgcccagggcacccagcccggccgcgacggcgucguccgcgucugggacgucaagaaccccgaccuccucaacaaccaguucggcaccaugcccucccucacccucgccugccucaccaagcagggccaggucgaccucaacgacgccguccucgcccucaccgaccucggccucaucuacaccgccaaguaccccaacuccuccgaccucgaccgccucucccagucccaccccauccucaacauggucgacaccaagaaguccucccucaacaucuccggcuacaacuucucccucggcgccgccgucaaggccggcgccugcaugcucgacggcggcaacaugcucgagaccaucaaggucaccccccagaccgucgacggcauccucaaguccauccucaaggucaagcgcucccucggcauguucgucuccgacacccccggcgagcgcaaccccuacgagaacauccucuacaagaucugccucuccggcgacggcuggcccuacaucgccucccgcaccuccaucgucggccgcgccugggagaacaccaccgucgaccucgaguccgacgagaagccccagaaggucggcgccgccggcuccaacaagucccuccaguccgccggcuuccccaccggccucaccuacucccagcucaugacccucaaggacuccaugaugcagcucgaccccuccgccaagaccuggaucgacaucgagggccgccccgaggaccccgucgagaucgcccucuaccagcccauguccggcugcuacauccacuucuuccgcgagcccaccgaccucaagcaguucaagcaggacgccaaguacucccacggcaucgacgucaccgaccucuuccccgcccagcccggccucaccuccgccgucaucgaggcccucccccgcaacaugguccucaccugccagggcuccgacgacaucaagcgccuccucgacucccagggccgccgcgacaucaagcucaucgacaucgcccucuccaaggccgacucccgccgcuucgagaacgccgucugggaccagugcaaggaccucugccacaugcacaccggcgucgucgucgagaagaagaagcgcggcggcaaggaggagaucaccccccacugcgcccucauggacugcaucauguacgacgccgccgucuccggcggccucaacauccccguccuccgcgccguccucccccgcgacauggucuuccgcaccuccucccccaaggucguccucuga

SEQ ID NO: 8441 - RNA, 1710 nt, Artificial Sequence
  derived and/or modified CDS sequence (opt2) from LASV(LASV991-NIG-2009;Clade II)__AIT17771__NP
auguccgccuccaaggaggucaaguccuuccucuggacccagucccuccgccgcgagcucuccggcuacugcuccuccaucaagcuccaggucgucaaggacgcccaggcccuccuccacggccucgacuucuccgaggucuccaacguccagcgccucaugcgcaagcagaagcgcgacgacuccgaccucaagcgccuccgcgaccucaaccaggccgucaacaaccucgucgagcucaaguccacccagcagaaguccauccuccgcgucggcacccucaccuccgacgaccuccucacccucgccgccgaccucgagaagcucaaguccaaggucauccgcaccgagcgcccccucuccuccggcgucuacaugggcaaccucuccacccagcagcucgagcagcgccgcgcccuccucaacaugaucggcauggucggcggcgcccagggcacccagcccggccgcgacggcgucguccgcgucugggacgucaagaaccccgaccuccucaacaaccaguucggcaccaugcccucccucacccucgccugccucaccaagcagggccaggucgaccucaacgacgccguccucgcccucaccgaccucggccucaucuacaccgccaaguaccccaacuccuccgaccucgaccgccucucccagucccaccccauccucaacauggucgacaccaagaaguccucccucaacaucuccggcuacaacuucucccucggcgccgccgucaaggccggcgccugcaugcucgacggcggcaacaugcucgagaccaucaaggucaccccccagaccauggacggcauccucaaguccauccucaaggucaagcgcucccucggcauguucgucuccgacacccccggcgagcgcaaccccuacgagaacauccucuacaagaucugccucuccggcgacggcuggcccuacaucgccucccgcaccuccaucgucggccgcgccugggagaacaccaccgucgaccucgaguccgacggcaagacccagaaggucuccaccgccggcuccaacaagucccuccaguccgccggcuuccccaccggccucaccuacucccagcucaugacccucaaggacuccaugaugcagcucgaccccuccgccaagaccuggaucgacaucgagggccgccccgaggaccccgucgagaucgcccucuaccagcccauguccggcugcuacauccacuucuuccgcgagcccaccgaccucaagcaguucaagcaggacgccaaguacucccacggcaucgacgucaccgaccucuuccccgcccagcccggccucaccuccgccgucaucgaggcccucccccgcaacaugguccucaccugccagggcuccgacgacaucaagcgccuccucgacucccagggccgccgcgacaucaagcucaucgacaucgcccucuccaaggccgacucccgccgcuucgagaacgccgucugggaccagugcaaggaccucugccacaugcacaccggcgucgucgucgagaagaagaagcgcggcggcaaggaggagaucaccccccacugcgcccucauggacugcaucauguacgacgccgccgucuccggcggccucaacauccccguccuccgcgccguccucccccgcgacauggucuuccgcaccuccucccccaaggucguccucuga

SEQ ID NO: 8442 - RNA, 1710 nt, Artificial Sequence
  derived and/or modified CDS sequence (opt2) from LASV(LASV993-NIG-2009;Clade II)__AIT17779__NP
auguccgccuccaaggaggucaaguccuuccucuggacccagucccuccgccgcgagcucuccggcuacugcuccaacaucaagcuccaggucgucaaggacgcccaggcccuccuccacggccucgacuucuccgaggucuccaacguccagcgccucaugcgcaagcagaagcgcgacgacggcgaccucaagcgccuccgcgaccucaaccaggccgucaacaaccucgucgagcucaaguccacccagcagaaguccauccuccgcgucggcacccucaccuccgacgaccuccucacccucgccgccgaccucgagaagcucaaguccaaggucauccgcaccgagcgcccccucuccuccggcgucuacaugggcaaccucuccacccagcagcucgagcagcgccgcgcccuccucaacaugaucggcauggucggcggcgcccagggcacccagcccggccgcgacggcgucguccgcgucugggacgucaagaaccccgaccuccucaacaaccaguucggcaccaugcccucccucacccucgccugccucaccaagcagggccaggucgaccucaacgacgccguccucgcccucaccgaccucggccucaucuacaccgccaaguaccccaacuccuccgaccucgaccgccucucccagucccaccccauccucaacauggucgacaccaagaaguccucccucaacaucuccggcuacaacuucucccucggcgccgccgucaaggccggcgccugcaugcucgacggcggcaacaugcucgagaccaucaaggucaccccccagaccauggacggcauccucaaguccauccucaaggucaagaagucccucggcauguucgucuccgacacccccggcgagcgcaaccccuacgagaacauccucuacaagaucugccucuccggcgacggcuggcccuacaucgccucccgcaccuccaucgucggccgcgccugggagaacaccaccgucgaccucgaguccgacggcaagccccagaaggucggcaccgccggcuccaacaagucccuccaguccgccggcuuccccaccggccucaccuacucccagcucaugacccucaaggacuccaugaugcagcucgaccccuccgccaagaccuggaucgacaucgagggccgccccgaggaccccgucgagaucgcccucuaccagcccauguccggcugcuacauccacuucuuccgcgagcccaccgaccucaagcaguucaagcaggacgccaaguacucccacggcaucgacgucaccgaccucuucuccgcccagcccggccucaccuccgccgucaucgaggcccucccccgcaacaugguccucaccugccagggcuccgacgacaucaagcgccuccucgacucccagggccgccgcgacaucaagcucaucgacaucgcccucuccaagaccgacucccgccgcuucgagaacgccgucugggaccagugcaaggaccucugccacaugcacaccggcgucgucgucgagaagaagaagcgcggcggcaaggaggagaucaccccccacugcgcccucauggacugcaucauguacgacgccgccgucuccggcggccucaacauccccguccuccgcgccguccucccccgcgacauggucuuccgcaccuccucccccaaggucguccucuga

SEQ ID NO: 8443 - RNA, 1710 nt, Artificial Sequence
  derived and/or modified CDS sequence (opt2) from LASV(Nig08-04;Clade II)__ADU56611__NP
auguccgccuccaaggaggucaaguccuuccucuggacccagucccuccgccgcgagcucuccggcuacugcuccaacaucaagcuccaggucgucaaggacgcccaggcccuccuccacggccucgacuucuccgaggucuccaacguccagcgccucaugcgcaagcagaagcgcgacgacggcgaccucaagcgccuccgcgaccucaaccaggccgucaacaaccucgucgagcucaaguccacccagcagaaguccguccuccgcgucggcacccucaccuccgacgaccuccucacccucgccgccgaccucgagaagcucaaguccaaggucauccgcaccgagcgcccccucuccuccggcgucuacaugggcaaccucuccacccagcagcucgagcagcgcaaggcccuccucuccaugaucggcauggucggcggcgcccagggcacccagcccggccgcgacggcgucguccgcgucugggacgucaagaaccccgaccuccucaacaaccaguucggcaccaugcccucccucacccucgccugccucaccaagcagggccaggucgaccucaacgacgccguccucgcccucaccgaccucggccucaucuacaccgccaaguaccccaacuccuccgaccucgaccgccucucccagucccaccccauccucaacauggucgacaccaagaaguccucccucaacaucuccggcuacaacuucucccucggcgccgccgucaaggccggcgccugcaugcucgacggcggcaacaugcucgagaccaucaaggucaccccccagaccauggacggcauccucaaguccauccucaaggucaagcgcucccucggcauguucgucuccgacacccccggcgagcgcaaccccuacgagaacauccucuacaagaucugccucuccggcgacggcuggcccuacaucgccucccgcaccuccaucgucggccgcgccugggagaacaccaccgucgaccucgaguccgacggcaagccccagaaggucggcaccgccggcuccaacaagucccuccaguccgccggcuuccccaccggccucaccuacucccagcucaugacccucaaggacuccaugaugcagcucgaccccuccgccaagaccuggaucgacaucgagggccgccccgaggaccccgucgagaucgcccucuaccagcccauguccggcugcuacauccacuucuuccgcgagcccaccgaccucaagcaguucaagcaggacgccaaguacucccacggcaucgacgucaccgaccucuucuccgcccagcccggccucaccuccgccgucaucgaggcccucccccgcaacaugguccucaccugccagggcuccgacgacaucaagaagcuccucgacucccagggccgccgcgacaucaagcucaucgacaucucccucaacaaggccgacucccgccgcuucgagaacgccgucugggaccagugcaaggaccucugccacaugcacaccggcgucgucgucgagaagaagaagcgcggcggcaaggaggagaucaccccccacugcgcccucauggacugcaucauguucgacgccgccgucuccggcggccucaacauccccauccuccgcgccguccucccccgcgacauggucuuccgcaccuccucccccaaggucguccucuga

SEQ ID NO: 8444 - RNA, 1710 nt, Artificial Sequence
  derived and/or modified CDS sequence (opt2) from LASV(Nig08-A47;Clade II)__ADU56631__NP
auguccgccuccaaggaggucaaguccuuccucuggacccagucccuccgccgcgagcucuccggcuacugcuccaacaucaagcuccaggucgucaaggacgcccaggcccuccuccacggccucgacuucuccgaggucuccaacguccagcgccucaugcgcaagcagaagcgcgacgacuccgaccucaagcgccuccgcgaccucaaccaggccgucaacaaccucgucgagcucaaguccacccagcagaaguccauccuccgcgucggcacccucaccuccgacgaccuccucacccucgccgccgaccucgagaagcucaaguccaaggucauccgcaccgagcgcccccucuccuccggcgucuacaugggcaaccucuccacccagcagcucgagcagcgccgcgcccuccucaacaugaucggcauggucggcggcgcccagggcacccagcccggccgcgacggcgucguccgcgucugggacgucaagaaccccgaccuccucaacaaccaguucggcaccaugcccucccucacccucgccugccucaccaagcagggccaggucgaccucaacgacgccguccucgcccucaccgaccucggccucaucuacaccgccaaguaccccaacuccuccgaccucgaccgccucucccagucccaccccauccucaacauggucgacaccaagaaguccucccucaacaucuccggcuacaacuucucccucggcgccgccgucaaggccggcgccugcaugcucgacggcggcaacaugcucgagaccaucaaggucaccccccagaccauggacggcauccucaaguccauccucaaggucaagaagucccucggcauguucgucuccgacacccccggcgagcgcaaccccuacgagaacauccucuacaagaucugccucuccggcgacggcuggcccuacaucgccucccgcaccuccaucgucggccgcgccugggagaacaccaccgucgaccucgaguccgacggcaagccccagaaggucggcaccgccggcuccaacaagucccuccaguccgccggcuuccccaccggccucaccuacucccagcucaugacccucaaggacuccaugaugcagcucgaccccuccgccaagaccuggaucgacaucgagggccgccccgaggaccccgucgagaucgcccucuaccagcccauguccggcugcuacauccacuucuuccgcgagcccaccgaccucaagcaguucaagcaggacgccaaguacucccacggcaucgacgucaccgaccucuuccccgcccagcccggccucaccuccgccgucaucgaggcccucccccgcaacaugguccucaccugccagggcuccgacgacaucaagcgccuccucgacucccagggccgccgcgacaucaagcucaucgacaucgcccucuccaaggccgacucccgccgcuucgagaacgccgucugggaccagugcaaggaccucugccacaugcacaccggcgucgucgucgagaagaagaagcgcggcggcaaggaggagaucaccccccacugcgcccucauggacugcaucauguacgacgccgccgucuccggcggccucaacauccccguccuccgcgccguccucccccgcgacauggucuuccgcaccuccucccccaaggucguccucuga

SEQ ID NO: 8445 - RNA, 1713 nt, Artificial Sequence
  derived and/or modified CDS sequence (opt2) from LASV(GA391;Clade III)__AAA46284__NP
auguccgccuccaaggagguccgcuccugccucuggacccagucccuccgccgcgagcucuccggcuacugcuccaacaucaagcuccaggucgucaaggacgcccaggcccuccuccacggccucgacuucuccgaggucuccaacguccagcgccucaugcgcaagcagaagcgcgacgacggcgaccucaagcgccuccgcgaccucaaccaggccgucaacaaccucgucgagcucaaguccacccagcagaaguccguccuccgcgucggcacccucuccuccgacgaccuccucauccucgccgccgaccucgagaagcucaaguccaaggucacccgcaccgagcgcccccucuccuccggcgucuacaugggcaaccucuccucccagcagcucgaccagcgccgcgcccuccucaacaugaucggcaugaccggcgucuccggcggcggcaagggcgccuccaacggcaucguccgcgucugggacgucaagaacgccgagcuccucaacaaccaguucggcaccaugcccucccucacccucgccugccucaccaagcagggccaggucgaccucaacgacgccguccaggcccucaccgaccucggccucaucuacaccgccaaguaccccaacuccuccgaccucgaccgccucucccagucccaccccauccucaacaugaucgacaccaagaaguccucccucaacaucuccggcuacaacuucucccucggcgccgccgucaaggccggcgccugcaugcucgacggcggcaacaugcucgagaccaucaaggucuccccccagaccauggacggcauccucaaguccauccucaaggucaagaagucccucggcauguucgucuccgacacccccggcgagcgcaaccccuacgagaacauccucuacaagaucugccucuccggcgacggcugguccuacaucgccucccgcaccuccaucgucggccgcgccugggagaacaccgucgucgaccucgagcaggacaacaagccccagaagaucggcaacggcggcuccaacaagucccuccaguccgccggcuucgccgccggccucaucuacucccagcucaugacccucaaggacuucaagugcuucaaccucauccccaacgccaagaccuggauggacaucgagggccgccccgaggaccccgucgagaucgcccucuaccagcccuccuccggcugcuacguccacuucuuccgcgagcccaccgaccucaagcaguucaagcaggacgccaaguacucccacggccgcgacgucaccgaccucuucgccgcccagcccggccucaccuccgccgucaucgaggcccucccccgcaacauggucaucaccugccagggcuccgaggacauccgcaagcuccucgagucccagggccgccgcgacaucaagcucaucgacaucacccucuccaaggccgacucccgcaaguucgagaacgccgucugggaccaguucaaggaccucugccacaugcacaccggcgucgucgucgagaagaagaagcgcggcggcaaggaggagaucaccccccacugcgcccucauggacugcaucauguucgacgccgccgucuccggcggccucgacgccaagguccuccgcgucguccucccccgcgacauggucuuccgcaccuccacccccaaggucguccucuga

SEQ ID NO: 8446 - RNA, 1710 nt, Artificial Sequence
  derived and/or modified CDS sequence (opt2) from LASV(ISTH2121-NIG-2012;Clade III)__AIT17541__NP
auguccgccuccaaggaggucaaguccuuccucuggacccagucccuccgccgcgagcucuccggcuacugcuccaacaucaagcuccaggucgucaaggacgcccaggcccuccuccacggccucgacuucuccgaggucuccaacguccagcgccucaugcgcaagcagaagcgcgacgacggcgaccucaagcgccuccgcgaccucaaccaggccgucaacaaccucgucgagcucaaguccacccagcagaaguccguccuccgcgucggcacccucuccuccgacgaccuccucacccucgccgccgaccucgagaagcucaaguccaaggucauccgcaccgagcgcccccucuccuccggcgucuacaugggcaaccucuccucccagcagcucgaccagcgccgcgcccuccucaacaugaucggcaugaccuccgaccgccagggcgccuccaccggccgcgacggcaucguccgcgucugggacgucaagaacgccgagcuccucaacaaccaguucggcaccguccccucccucacccucgccugccucaccaagcagggccaggucgaccucaacgacgccguccaggcccucaccgaccucggccucaucuacaccgccaaguaccccaacuccuccgaccucgaccgccucucccagucccaccccauccucaacaugaucgacaccaagaaguccucccucaacaucuccggcuacaacuucucccucggcgccgccgucaaggccggcgccugcaugcucgacggcggcaacaugcucgagaccaucaaggucuccccccagaccauggacggcauccucaaguccauccucaaggucaagcgcucccucggcauguucgucuccgacauccccggcgagcgcaaccccuacgagaacauccucuacaagaucugccucuccggcgacggcuggcccuacaucgccucccgcaccuccaucaccggccgcgccugggagaacaccaucgucgaccucgaguccgacuccaagccccagaagcccggcaacuccggcuccaaccgcucccuccaguccgccggcuuccccgccggccucaccuacucccagcucaugacccucaaggacuccaugcuccagcucgaccccaacgccaagaccuggauggacaucgagggccgccccgacgaccccgucgagaucgcccucuaccagcccuccuccggcugcuacauccacuucuuccgcgagcccaccgaccucaagcaguucaagcaggacgccaaguacucccacggcaucgacgucggcgaccucuucgccgcccagcccggccucaccuccgccgucaucgaggcccucccccgcaacauggucaucaccugccagggcuccgaggacaucaagaagcuccucgagucccagggccgcaaggacaucaagcucgucgacaucuccauguccaagcccgacucccgcaaguucgagaacgccgucugggaccaguacaaggaccucugccacaugcacaccggcaucgucgucgagaagaagaagcgcggcggcaaggaggagaucaccccccacugcgcccucauggacugcaucauguucgacgccgccgucgucggcggccucgacgcccgcauccuccgcgccguccucccccgcgacauggucuuccgcaccuccacccccaaggucguccucuga

SEQ ID NO: 8447 - RNA, 1710 nt, Artificial Sequence
  derived and/or modified CDS sequence (opt2) from LASV(Nig08-A18;Clade III)__ADU56615__NP
auguccgccuccaaggaggucaaguccuuccucuggacccagucccuccgccgcgagcucuccggcuacugcuccaacaucaagcuccaggucgucaaggacgcccaggcccuccuccacggccucgacuucuccgaggucuccaacguccagcgccucaugcgcaagcagaagcgcgacgacuccgaccucaagcgccuccgcgaccucaaccaggccgucaacaaccucgucgagcucaaguccacccagcagaaguccguccuccgcaucggcacccucuccuccgacgaccuccucauccucgccgccgaccucgagaagcucaaguccaaggucguccgcaccgagcgcccccucuccuccggcaucuacaugggcaaccucuccucccagcagcucgaccagcgcaaggcccuccucaacaugaucggcaugaccggcggcaacggcggccgcaacgccaccuccgacggcaucguccgcgucugggacgucaagaacgccgagcuccucaacaaccaguucggcaccaugcccucccucacccucgccugccucaccaagcagggccaggucgaccucaacgacgccguccaggcccucaccgaccucggccucaucuacaccgccaaguaccccaacuccuccgaccucgaccgccucgcccagucccaccccauccucaacaugaucgacaccaagaaguccucccucaacaucuccggcuacaacuucucccucggcgccgccgucaaggccggcgccugcaugcucgacggcggcaacaugcucgagaccaucaaggucuccccccagaccauggacggcauccucaaguccauccucaaggucaagcgcucccucggcauguucaucuccgacacccccggcgagcgcaaccccuacgagaacauccucuacaagaucugccucuccggcgacggcuggcccuacaucgccucccgcaccuccaucgucggccgcgccugggagaacaccgucgucgaccucgagaccgacaacaagccccagaagaccggcaacggcggcuccaacaagucccuccaguccgccggcuucgccgccggccucaccuacucccagcucaugacccucaaggacuccaugcuccagcucgaccccaacgccaagaccuggauggacaucgagggccgccccgaggaccccgucgagaucgcccucuaccagcccgucuccggcugcuacauccacuucuuccgcgagcccaccgaccucaagcaguucaagcaggacgccaaguacucccacggcaucgacgucaccgaccucuucgccgcccagcccggccucaccuccgccgucaucgaggcccucccccgcaacauggucaucaccugccagggcuccgaggacauccgcaagcuccucgagucccagggccgccgcgacaucaagcucaucgacaucucccucuccaaggucgacucccgcaaguucgagaacgccgucugggaccaguucaaggaccucugccacaugcacaccggcaucgucgucgagaagaagaagcgcggcggcaaggaggagaucaccccccacugcgcccucauggacugcaucauguucgacgccgccgucuccggcggcgucgacgccaagguccuccgcgccguccucccccgcgacauggucuuccgcaccuccacccccaaggucguccucuga

SEQ ID NO: 8448 - RNA, 1710 nt, Artificial Sequence
  derived and/or modified CDS sequence (opt2) from LASV(Nig08-A19;Clade III)__ADU56619__NP
auguccgccuccaaggaggucaaguccuuccucuggacccagucccuccgccgcgagcucuccggcuacugcuccaacaucaagcuccaggucgucaaggacgcccaggcccuccuccacggccucgacuucuccgaggucuccaacguccagcgccucaugcgcaagcagaagcgcgacgacggcgaccucaagcgccuccgcgaccucaaccaggccgucaacaaccucgucgagcucaaguccacccagcagaaguccguccuccgcgucggcacccucuccuccgacgaccuccucguccucgccgccgaccucgagaagcucaaguccaaggucguccgcaccgagcgcccccucuccuccggcaucuacaugggcaaccucuccucccagcagcucgaccagcgcaaggcccuccucaacaugaucggcaugaccggcggcaacggcggccgcaacaccaccuccgacggcaucguccgcgucugggacgucaagaacgccgagcuccucaacaaccaguucggcaccaugcccucccucacccucgccugccucaccaagcagggccaggucgaccucaacgacgccguccaggcccucaccgaccucggccucaucuacaccgccaaguaccccaacuccuccgaccucgaccgccucgcccagucccaccccauccucaacaugaucgacaccaagaaguccucccucaacaucuccggcuacaacuucucccucggcgccgccgucaaggccggcgccugcaugcucgacggcggcaacaugcucgagaccaucaaggucuccccccagaccauggacggcauccucaaguccauccucaaggucaagcgcucccucggcauguucaucuccgacacccccggcgagcgcaaccccuacgagaacauccucuacaagaucugccucuccggcgacggcuggcccuacaucgccucccgcaccuccaucgucggccgcgccugggagaacaccgucgucgaccucgaguccgacaacaagccccagaagaccggcaacggcggcuccaacaagucccuccaguccgccggcuucgccgccggccucaccuacucccagcucaugacccucaaggacuccaugcuccagcucgaccccaacgccaagaccuggauggacaucgagggccgccccgaggaccccgucgagaucgcccucuaccagcccuccuccggcugcuacauccacuucuuccgcgagcccaccgaccucaagcaguucaagcaggacgccaaguacucccacggcaucgacgucaccgaccucuucgccgcccagcccggccucaccuccgccgucaucgaggcccucccccgcaacauggucaucaccugccagggcuccgaggacauccgcaagcuccucgagucccagggccgccgcgacaucaagcucaucgacaucucccucuccaaggucgacucccgcaaguucgagaacgccgucugggaccaguucaaggaccucugccacaugcacaccggcaucgucgucgagaagaagaagcgcggcggcaaggaggagaucaccccccacugcgcccucauggacugcaucauguucgacgccgccgucuccggcggcgucgacgccaagguccuccgcgccguccucccccgcgacauggucuuccgcaccuccacccccaaggucguccucuga

SEQ ID NO: 8449 - RNA, 1710 nt, Artificial Sequence
  derived and/or modified CDS sequence (opt2) from LASV(ONM-299;Clade III)__ANH09735__NP
auguccgccuccaaggaggucaaguccuuccucuggacccagucccuccgccgcgagcucuccggcuacugcuccaacaucaagcuccaggucgucaaggacgcccaggcccuccuccacggccucgacuucuccgaggucuccaacauccagcgccucaugcgcaaggagcgccgcgacgacuccgaccucaagcgccuccgcgaccucaaccaggccgucaacaaccucgucgagcucaaguccacccagcagaaguccguccuccgcgucggcacccucuccuccgacgaccuccucacccucgccgccgaccucgagaagcucaaguccaaggucauccgcaccgagcgcccccucuccuccggcgucuacaugggcaaccucuccacccagcagcucgaccagcgccgcgcccuccucaacaugaucggcaugaccaacggcggccagggcgccaacgccggccgcgacggcaucguccgcgucugggacgucaagaacgccgagcuccucaacaaccaguucggcaccaugcccucccucacccucgccugccucaccaagcagggccaggucgaccucaacgacgccguccaggcccucaccgaccucggccucaucuacaccgccaaguaccccaacuccuccgaccucgaccgccucucccagaaccaccccauccucaacaugaucgacaccaagaaguccucccucaacaucuccggcuacaacuucucccucggcgccgccgucaaggccggcgccugcaugcucgacggcggcaacaugcucgagaccaucaaggucuccccccagaccauggacggcauccucaaguccauccucaaggucaagcgcucccucggcauguucgucuccgacacccccggcgagcgcaaccccuacgagaacauccucuacaagaucugccucuccggcgacggcuggcccuacgucgccucccgcaccuccaucaucggccgcgccugggagaacaccgucgucgaccucgaguccgacuccaagccccagcgccccggcuccaaggaguccaaccgcucccuccagaccgccggcuuccccgccggccucaccuacucccagcucaugacccucaaggacuccaugcuccagcucgaccccaacgccaagaccuggauggacaucgagggccgccccgacgaccccgucgagaucgcccucuaccagcccuccuccggcugcuacauccacuucuuccgcgagcccaccgaccucaagcaguucaagcaggacgccaaguacucccacggcaucgacaucggcgaccucuucgccgcccagcccggccucaccuccgccgucaucgaggcccucccccgcaacauggucaucaccugccagggcuccgaggacaucaagcgccuccucgagucccagggccgcaaggacauccgccucgucgacaucucccucuccaaggccgacucccgcaaguucgagaacgccgucugggaccaguucaaggaccucugcaacaugcacaccggcgucgucgucgagaagaagaagaagggcggcaaggaggagaucaccccccacugcgcccucauggacugcaucauguucgacgccgccgucaugggcggccucgacgccaagguccuccgcgccguccuccccaaggacauggucuuccgcaccuccaccccccgcgucguccucuga

SEQ ID NO: 8450 - RNA, 1710 nt, Artificial Sequence
  derived and/or modified CDS sequence (opt2) from LASV(ONM-314;Clade III)__ANH09737__NP
auguccgccuccaaggaggucaaguccuuccucuggacccagucccuccgccgcgagcucuccggcuacugcuccaacaucaagcuccaggucgucaaggacgcccaggcccuccuccacggccucgacuucuccgaggucuccaacauccagcgccucaugcgcaaggagcgccgcgacgacuccgaccucaagcgccuccgcgaccucaaccaggccgucaacaaccucgucgagcucaaguccacccagcagaaguccguccuccgcgucggcacccucuccuccgacgaccuccucacccucgccgccgaccucgagaagcucaaguccaaggucauccgcaccgagcgcccccucuccuccggcgucuacaugggcaaccucuccacccagcagcucgaccagcgccgcgcccuccucaacaugaucggcaugaccaacggcggccagggcgccaacgccggccgcgacggcaucguccgcgucugggacgucaagaacgccgagcuccucaacaaccaguucggcaccaugcccucccucacccucgccugccucaccaagcagggccaggucgaccucaacgacgccguccaggcccucaccgaccucggccucaucuacaccgccaaguaccccaacuccuccgaccucgaccgccucucccagaaccaccccauccucaacaugaucgacaccaagaaguccucccucaacaucuccggcuacaacuucucccucggcgccgccgucaaggccggcgccugcaugcucgacggcggcaacaugcucgagaccaucaaggucuccccccagaccauggacggcauccucaaguccauccucaaggucaagcgcucccucggcauguucgucuccgacacccccggcgagcgcaaccccuacgagaacauccucuacaagaucugccucuccggcgacggcuggcccuacgucgccucccgcaccuccaucaucggccgcgccugggagaacaccgucgucgaccucgaguccgacuccaagccccagcgccccggcuccaaggaguccaaccgcucccuccagaccgccggcuuccccgccggccucaccuacucccagcucaugacccucaaggacuccaugcuccagcucgaccccaacgccaagaccuggauggacaucgagggccgccccgacgaccccgucgagaucgcccucuaccagcccuccuccggcugcuacauccacuucuuccgcgagcccaccgaccucaagcaguucaagcaggacgccaaguacucccacggcaucgacaugggcgaccucuucgccgcccagcccggccucaccuccgccgucaucgaggcccucccccgcaacauggucaucaccugccagggcuccgaggacaucaagcgccuccucgagucccagggccgccgcgacauccgccucgucgacaucucccucuccaaggccgacucccgcaaguucgagaacgccgucugggaccaguucaaggaccucugcaacaugcacaccggcgucgucgucgagaagaagaagaagggcggcaaggaggagaucaccccccacugcgcccucauggacugcaucauguucgacgccgccgucaugggcggccucgacgccaagguccuccgcgccguccuccccaaggacauggucuuccgcaccuccaccccccgcgucguccucuga

SEQ ID NO: 8451 - RNA, 1710 nt, Artificial Sequence
  derived and/or modified CDS sequence (opt2) from LASV(ONM-700;Clade III)__ANH09739__NP
auguccgccuccaaggaggucaaguccuuccucuggacccagucccuccgccgcgagcucuccggcuacugcuccaacaucaagcuccaggucgucaaggacgcccaggcccuccuccacggccucgacuucuccgaggucuccaacauccagcgccucaugcgcaaggagcgccgcgacgacuccgaccucaagcgccuccgcgaccucaaccaggccgucaacaaccucgucgagcucaaguccacccagcagaaguccguccuccgcgucggcacccucuccuccgacgaccuccucacccucgccgccgaccucgagaagcucaaguccaaggucauccgcaccgagcgcccccucuccuccggcgucuacaugggcaaccucuccacccagcagcucgaccagcgccgcgcccuccucaacaugaucggcaugaccuccggcggccagggcgccaacgccggccgcgacggcaucguccgcgucugggacgucaagaacgccgagcuccucaacaaccaguucggcaccaugcccucccucacccucgccugccucaccaagcagggccaggucgaccucaacgacgccguccaggcccucaccgaccucggccucaucuacaccgccaaguaccccaacuccuccgaccucgaccgccucucccagaaccaccccauccucaacaugaucgacaccaagaaguccucccucaacaucuccggcuacaacuucucccucggcgccgccgucaaggccggcgccugcaugcucgacggcggcaacaugcucgagaccaucaaggucuccccccagaccauggacggcauccucaaguccauccucaaggucaagcgcucccucggcauguucgucuccgacacccccggcgagcgcaaccccuacgagaacauccucuacaagaucugccucuccggcgacggcuggcccuacgucgccucccgcaccuccaucaucggccgcgccugggagaacaccgucgucgaccucgaguccgacuccaagccccagcgccccggcuccaaggaguccaaccgcucccuccagaccgccggcuuccccgccggccucaccuacucccagcucaugacccucaaggacuccaugcuccagcucgaccccaacgccaagaccuggauggacaucgagggccgccccgacgaccccgucgagaucgcccucuaccagcccuccuccggcugcuacauccacuucuuccgcgagcccaccgaccucaagcaguucaagcaggacgccaaguacucccacggcaucgacaucggcgaccucuucgccgcccagcccggccucaccuccgccgucaucgaggcccucccccgcaacauggucaucaccugccagggcuccgaggacaucaagcgccuccucgagucccagggccgccgcgacauccgccucgucgacaucucccucuccaaggccgacucccgcaaguucgagaacgccgucugggaccaguucaaggaccucugcaacaugcacaccggcgucgucgucgagaagaagaagaagggcggcaaggaggagaucaccccccacugcgcccucauggacugcaucauguucgacgccgccgucaugggcggccucgacgccaagguccuccgcgccguccuccccaaggacauggucuuccgcaccuccaccccccgcgucguccucuga

SEQ ID NO: 8452 - RNA, 1710 nt, Artificial Sequence
  derived and/or modified CDS sequence (opt2) from LASV(Weller;Clade III)__AAT49009__NP
auguccgccuccaaggaggucaaguccuuccucuggacccagucccuccgccgcgagcucuccggcuacugcuccaacaucaagcuccaggucgucaaggacgcccaggcccuccuccacggccucgacuucuccgaggucuccaacguccagcgccucaugcgcaagcagcgccgcgacgacggcgaccucaagcgccuccgcgaccucaaccaggccgucaacaaccucgucgagcucaaguccacccagcagaaguccguccuccgcgucggcacccucaacuccgacgaccuccucguccucgccgccgaccucgagaagcucaaguccaaggucauccgcaccgagcgcccccucuccuccggcaucuacaugggcaaccucuccucccagcagcucgaccagcgccgcgcccuccucaacaugaucggcaugaccggcggcaaccgcggcggcggcaccuccuccgacggcaucguccgcgucugggacgucaagaacgccgagcuccucaacaaccaguucggcaccaugcccucccucacccucgccugccucaccaagcagggccaggucgaccucaacgacgccguccaggcccucaccgaccucggccucaucuacaccgccaaguaccccaacuccuccgaccucgaccgccucgcccagucccaccccauccucaacaugaucgacaccaagaaguccucccucaacaucuccggcuacaacuucucccucggcgccgccgucaaggccggcgccugcaugcucgacggcggcaacaugcucgagaccaucaaggucuccccccagaccaucgacggcauccucaagaccauccucaaggucaagaagucccucggcauguucaucuccgacguccccggcgagcgcaaccccuacgagaacauccucuacaagaucugccucuccggcgacggcuggcccuacaucgccucccgcaccuccaucgucggccgcgccugggagaacaccgucgucgaccucgaguccgacaacaagccccagaagaccggcaacggcggcuccaacaagucccuccaguccgccggcuucgccgccggccucaccuacucccagcucaugacccucaaggacuccaugcuccagcucgaccccaacuccaagaccuggauggacaucgagggccgccccgaggaccccgucgagaucgcccucuaccagcccaacuccggcugcuacauccacuucuuccgcgagcccaccgaccucaagcaguucaagcaggacgccaaguacucccacggcaucgacgucaccgaccucuucgccgcccagcccggccucaccuccgccgucaucgaggcccucccccgcaacauggucaucaccugccagggcuccgaggacauccgcaagcuccucgagucccagggccgccgcgacaucaagcucaucgacaucucccucaacaaggccgacucccgcaaguucgagaacgccgucugggaccaguucaaggaccucugccacaugcacaccggcgucgucgucgagaagaagaagcgcggcggcaaggaggagaucaccccccacugcgcccucauggacugcaucauguucgacgccgccgucuccggcggccucgacgccaagguccuccgcgccguccucccccgcgacauggucuuccgcaccuccacccccaaggucguccucuga

SEQ ID NO: 8453 - RNA, 1710 nt, Artificial Sequence
  derived and/or modified CDS sequence (opt2) from LASV(BA366;Clade IV)__ADI39452__NP
auguccgucuccaaggaggucaaguccuuccucuggacccagucccuccgccgcgagcucuccggcuacugcuccaacaucaagcuccaggucgucaaggacgcccaggcccuccuccacggccucgacuucuccgaggucuccaacguccagcgccucaugcgcaagcagcgccgcgacgacaacgaccucaagcgccuccgcgaccucaaccaggccgucaacaaccucgucgagcucaaguccacccagcagaaguccguccuccgcgucggcacccucaccuccgacgaccuccucauccucgccgccgaccucgagaagcucaagaccaaggucacccgcaccgagcgcccccucuccgccggcgucuacaugggcaaccucuccucccagcagcucgagcagcgccgcgcccuccucaacaugaucggcaugaacggcggcaaccagggcguccaggccggccgcgacggcgucguccgcgucugggacgucaagaacgccgagcuccucaacaaccaguucggcaccaugcccucccucacccucgccugccucaccaagcagggccaggucgaccucaacgacgccguccaggcccucaccgaccucggccucaucuacaccgccaaguaccccaacaccuccgaccucgaccgccucgcccagucccaccccauccucaacaugaucgacaccaagaaguccucccucaacaucuccggcuacaacuucucccucggcgccgccgucaaggccggcgccugcaugcucgacggcggcaacaugcucgagaccaucaaggucuccccccagaccauggacggcauccucaaguccauccucaaggucaagcgcacccucggcauguucgucuccgacacccccggcgagcgcaaccccuacgagaacauccucuacaagaucugccucuccggcgacggcuggcccuacaucgccucccgcaccuccaucaccggccgcgccugggagaacaccaucgucgaccucgaguccgacggcaagccccagaaggucggcaacaacggcuccaacaagucccuccaguccgccggcuucaccgccggccucaccuacucccagcucaugacccucaaggacgccaugcuccagcucgaccccaacgccaagaccuggauggacaucgagggccgccccgaggaccccgucgaggucgcccucuaccagcccuccuccggcugcuacauccacuucuuccgcgagcccaccgaccucaagcaguucaagcaggacgccaaguacucccacggcaucgacgucaccgaccucuucgccgcccagcccggccucaccuccgccgucaucgaggcccucccccgcaacauggucaucaccugccagggcuccgaggacguccgcaagcuccucgagucccagggccgcaaggacaucaagcucaucgacaucgcccucuccaaggccgacucccgcaaguacgagaacgccgucugggaccaguacaaggaccucugccacaugcacaccggcgucgucgucgagaagaagaagcgcggcggcaaggaggagaugaccccccacugcgcccucauggacugcaucauguucgacgccgccgucuccggcggccucuccacccagguccuccgcgccguccucccccgcgacauggucuuccgcaccuccacccccaaggucguccucuga

SEQ ID NO: 8454 - RNA, 1710 nt, Artificial Sequence
  derived and/or modified CDS sequence (opt2) from LASV(G1180-SLE-2010;Clade IV)__AIT17169__NP
auguccgccuccaaggagaucaaguccuuccucuggacccagucccuccgccgcgagcucuccggcuacugcuccaacaucaagcuccaggucgucaaggacgcccaggcccuccuccacggccucgacuucuccgaggucuccaacguccagcgccucaugcgcaaggagcgccgcgacgacaacgaccucaagcgccuccgcgaccucaaccaggccgucaacaaccucgucgagcucaaguccacccagcagaaguccauccuccgcgucggcacccucaccuccgacgaccuccucauccucgccgccgaccucgagaagcucaaguccaaggucauccgcaccgagcgcccccucuccgccggcgucuacaugggcaaccucuccucccagcagcucgaccagcgccgcgcccuccucuccaugaucggcauguccuccggcaaccagcgcgcccaggccggccgcgacggcgucguccgcgucugggacgucaagaacgucgagcuccucaacaaccaguucggcaccaugcccucccucacccucgccugccucaccaagcagggccaggucgaccucaacgacgccguccaggcccucaccgaccucggccucaucuacaccgccaaguaccccaacaccuccgaccucgaccgccucacccagucccaccccauccucaacaugaucgacaccaagaaguccucccucaacaucuccggcuacaacuucucccucggcgccgccgucaaggccggcgccugcaugcucgacggcggcaacaugcucgagaccaucaaggucuccccccagaccauggacggcauccucaaguccauccucaaggucaagaaggcccucggcauguucaucuccgacacccccggcgagcgcaaccccuacgagaacauccucuacaagaucugccucuccggcgacggcuggcccuacaucgccucccgcaccuccaucaccggccgcgccugggagaacaccgucgucgaccucgaguccgacggcaagccccagaaggccggcuccaacaacuccaacaagucccuccaguccgucggcuucaccgccggccucaccuacucccagcucaugacccucaaggacgccaugcuccagcucgaccccaacgccaagaccuggauggacaucgagggccgccccgaggaccccgucgagaucgcccucuaccagcccuccuccggcugcuacauccacuucuuccgcgagcccaccgaccucaagcaguucaagcaggacgccaaguacucccacggcaucgacgucaccgaccucuucgccgcccagcccggccucaccuccgccgucaucgacgcccucccccgcaacauggucaucaccugccagggcuccgacgacauccgcaagcuccucgagucccagggccgcaaggacaucaagcucaucgacaucgcccucuccaagaccgacucccgcaaguacgagaacgccgucugggaccaguacaaggaccucugccacaugcacaccggcgucgucgucgagaagaagaagcgcggcggcaaggaggagaucaccccccacugcgcccucauggacugcaucauguucgacgccgccgucuccggcggccucaacaccuccguccuccgcgccguccucccccgcgacauggucuuccgcaccuccaccccccgcgucguccucuga

SEQ ID NO: 8455 - RNA, 1710 nt, Artificial Sequence
  derived and/or modified CDS sequence (opt2) from LASV(G1190-SLE-2010;Clade IV)__AIT17173__NP
auguccgccuccaaggagaucaaguccuuccucuggacccagucccuccgccgcgagcucuccggcuacugcuccaacaucaagcuccaggucgucaaggacgcccaggcccuccuccacggccucgacuucuccgaggucuccaacguccagcgccucaugcgcaaggagcgccgcgacgacaacgaccucaagcgccuccgcgaccucaaccaggccgucaacaaccucgucgagcucaaguccacccagcagaaguccauccuccgcgucggcacccucaccuccgacgaccuccucauccucgccgccgaccucgagaagcucaaguccaaggucacccgcaccgagcgcccccucuccgccggcgucuacaugggcaaccucuccucccagcagcucgaccagcgccgcgcccuccucaacaugaucggcauguccggcuccaaccagggcgcccgcgccggccgcgacggcgucguccgcgucugggacgucaagaacgccgagcuccucaacaaccaguucggcaccaugcccucccucacccucgccugccucaccaagcagggccaggucgaccucaacgacgccguccaggcccucaccgaccucggccucaucuacaccgccaaguaccccaacaccuccgaccucgaccgccucacccagucccaccccauccucaacaugaucgacaccaagaaguccucccucaacaucuccggcuacaacuucucccucggcgccgccgucaaggccggcgccugcaugcucgacggcggcaacaugcucgagaccaucaaggucuccccccagaccauggacggcauccucaaguccauccucaaggucaagaaggcccucggcauguucaucuccgacgcccccggcgagcgcaaccccuacgagaacauccucuacaagaucugccucuccggcgacggcuggcccuacaucgccucccgcaccuccaucaccggccgcgccugggagaacaccgucgucgaccucgaguccgacggcaagccccagaaggccggcuccaacggcuccaacaagucccuccaguccgccggcuucaccgccggccucaccuacucccagcucaugacccucaaggacgccaugcuccagcucgaccccaacgccaagaccuggauggacaucgagggccgccccgaggaccccgucgagaucgcccucuaccagcccuccuccggcugcuacauccacuucuuccgcgagcccaccgaccucaagcaguucaagcaggacgccaaguacucccacggcaucgacgucaccgaccucuucgccgcccagcccggccucaccuccgccgucaucgacgcccucccccgcaacauggucaucaccugccagggcuccgacgacauccgcaagcucuucgagucccagggccgcaaggacaucaagcucaucgacaucgcccucuccaagaccgacucccgcaaguacgagaacgccgucugggaccaguacaaggaccucugccacaugcacaccggcaucgucgucgagaagaagaagcgcggcggcaaggaggagaucaccccccacugcgcccucauggacugcaucauguucgacgccgccgucuccggcggccucaacaccuccguccuccgcgccguccucccccgcgacauggucuuccgcaccuccaccccccgcgucguccucuga

SEQ ID NO: 8456 - RNA, 1710 nt, Artificial Sequence
  derived and/or modified CDS sequence (opt2) from LASV(G1200-LIB-2010;Clade IV)__AIT17177__NP
auguccgccuccaaggagaucaaguccuuccucuggacccagucccuccgccgcgagcucuccggcuacugcuccaacaucaagcuccaggucgucaaggacgcccaggcccuccuccacggccucgacuucuccgaggucuccaacguccagcgccucaugcgcaagcagcgccgcgacgacaacgaccucaagcgccuccgcgaccucaaccaggccgucaacaaccucgucgagcucaaguccacccagcagaaguccguccuccgcgucggcacccucaccuccgacgaccuccucguccucgccgccgaccucgagaagcucaaguccaaggucauccgcaccgagcgcccccucuccgccggcaucuacaugggcaaccucuccucccagcagcucgaccagcgccgcgcccuccucaacaugaucggcauguccggcggcaaccagggcgcccgcgccggccgcgacggcgucguccgcgucugggacgucaagaacgccgaccuccucaacaaccaguucggcaccaugcccucccucacccucgccugccucaccaagcagggccaggucgaccucaacgacgucguccaggcccucaccgaccucggccucaucuacaccgccaaguaccccaacaccuccgaccucgaccgccucacccagucccaccccauccucaagaugaucgacgccaacaaguccucccucaacaucuccggcuacaacuucucccucggcgccgccgucaaggccggcgccugcaugcucgacggcggcaacaugcucgagaccaucaaggucuccccccagaccauggacggcauccucaaguccauccucaaggucaagaagucccucggcauguucaucuccgacacccccggcgagcgcaaccccuacgagaacauccucuacaagaucugccucuccggcgacggcuggcccuacaucgccucccgcaccuccaucaucggccgcgccugggagaacaccgucgucgaccucgaguccgacggcaagccccagaagaccggcuccaacaacuccuccaagucccuccaguccgccggcuucgccgccggccucaccuacucccagcucaugacccucaaggacgccaugcuccagcucgaccccaacgccaagaccuggauggacaucgagggccgccccgaggaccccgucgagaucgcccucuaccagcccuccuccggcugcuacauccacuucuuccgcgagcccaccgaccucaagcaguucaagcaggacgccaaguacucccacggcaucgacgucaccgaccucuucgccgcccagcccggccucaccuccgccgucaucgaggcccucccccgcaacauggucaucaccugccagggcuccgacgacauccgcaagcuccucgagucccagggccgcaaggacaucaagcucaucgacaucgcccucuccaagaccgacucccgcaaguacgagaacgccgucugggaccaguacaaggaccucugccacaugcacaccggcaucgucgucgagaagaagaagcgcggcggcaaggaggagaucaccccccacugcgcccucauggacugcaucauguucgacgccgccgucuccggcggccucaacacccucguccuccgcgccguccucccccgcgacauggucuuccgcaccuccacccccaaggucguccucuga

SEQ ID NO: 8457 - RNA, 1710 nt, Artificial Sequence
  derived and/or modified CDS sequence (opt2) from LASV(G1442-SLE-2011;Clade IV)__AIT17181__NP
auguccgccuccaaggaggucaaguccuuccucuggacccagucccuccgccgcgagcucuccggcuacugcuccaacaucaagcuccaggucgucaaggacgcccaggcccuccuccacggccucgacuucuccgaggucuccaacguccagcgccucaugcgcaagcagcgccgcgacgacaacgaccucaagcgccuccgcgaccucaaccaggccgucaacaaccucgucgagcucaaguccacccagcagaaguccguccuccgcgucggcacccucaccuccgacgaccuccucguccucgccgccgaccucgagaagcucaaguccaaggucauccgcaccgagcgcccccucuccgccggcgucuacaugggcaaccucuccucccagcagcucgaccagcgccgcgcccuccucaacaugaucggcauguccggcggcauccagggcacccgcaccggccgcgacggcgucguccgcgucugggacgucaagaacgccgaccuccucaacaaccaguucggcaccaugcccucccucacccucgccugccucaccaagcagggccaggucgaccucaacgacgucguccaggcccucaccgaccucggccucaucuacaccgccaaguaccccaacgccuccgaccucgaccgccucacccagucccaccccauccucaacaugaucgacaccaagaaguccucccucaacaucuccggcuacaacuucucccucggcgccgccgucaaggccggcgccugcaugcucgacggcggcaacaugcucgagaccaucaaggucuccccccagaccauggacggcauccucaaguccauccucaaggucaagaagacccucggcauguucaucuccgacacccccggcgagcgcaaccccuacgagaacauccucuacaagaucugccucuccggcgacggcuggcccuacaucgccucccgcaccuccaucaccggccgcgccugggagaacaccgucgucgaccucgaguccgacggcaagccccagaaggccggcuccaacaacuccaacaagucccuccaguccgccggcuucgccgccggccucaccuacucccagcucaugacccucaaggacgccaugcuccagcucgaccccaacgccaagaccuggauggacaucgagggccgccccgaggaccccgucgagaucgcccucuaccagcccuccuccggcugcuacauccacuucuuccgcgagcccaccgaccucaagcaguucaagcaggacgccaaguacucccacggcaucgacgucaccgaccucuucgccgcccagcccggccucaccuccgccgucaucgaggcccucccccgcaacauggucaucaccugccagggcuccgacgacaucaagaagcuccucgagucccagggccgcaaggacaucaagcucaucgacaucgcccucuccaagaccgacucccgcaaguacgagaacgccgucugggaccaguacaaggaccucugccacaugcacaccggcgucgucgucgagaagaagaagcgcggcggcaaggaggagaucaccccccacugcgcccucauggacugcaucauguucgacgccgccgucuccggcggccucaacacccucguccuccgcgccguccucccccgcgacauggucuuccgcaccuccaccccccgcgucguccucuga

SEQ ID NO: 8458 - RNA, 1710 nt, Artificial Sequence
  derived and/or modified CDS sequence (opt2) from LASV(G1529-SLE-2011;Clade IV)__AIT17185__NP
auguccgccuccaaggagaucaaguccuuccucuggacccagucccuccgccgcgagcucuccggcuacugcuccaacaucaagcuccaggucgucaaggacgcccaggcccuccuccacggccucgacuucuccgaggucuccaacguccagcgccucaugcgcaagcagcgccgcgacgacggcgaccucaagcgccuccgcgaccucaaccaggccgucaacaaccucgucgagcucaaguccacccagcagaaguccguccuccgcgucggcacccucaccuccgacgaccuccucauccucgccgccgaccucgagaagcucaaguccaaggucacccgcaccgagcgcccccucuccgccggcgucuacaugggcaaccucuccucccagcagcucgaccagcgccgcgcccuccucaacaugaucggcauguccggcggcaaccgcggcgcccgcaccggcaaggacggcgucguccgcaucugggacgucaagaacgccgaccuccucaacaaccaguucggcaccaugcccucccucacccucgccugccucaccaagcagggccaggucgaccucaacgacgucguccaggcccucaccgaccucggccucaucuacaccgccaaguaccccaacaccuccgaccucgaccgccucacccagucccaccccauccucaacaugaucgacaccaacaaguccucccucaacaucuccggcuacaacuucucccucggcgccgccgucaaggccggcgccugcaugcucgacggcggcaacaugcucgagaccaucaaggucuccccccagaccauggacggcauccucaaguccauccucaaggucaagaagucccucggcauguucaucuccgacacccccggcgagcgcaaccccuacgagaacauccucuacaagaucugccucuccggcgacggcuggcccuacaucgccucccgcaccuccaucaccggccgcgccugggagaacaccgucgucgaccucgaguccgacgagaagccccagaaggccggcuccaacaacuccaacaagucccuccaguccaccggcuucaccgccggccucaccuacucccagcucaugacccucaaggacgccaugcuccagcucgaccccaacgccaagaccuggauggacaucgagggccgccccgaggaccccgucgagaucgcccucuaccagcccuccuccggcugcuacauccacuucuuccgcgagcccaccgaccucaagcaguucaagcaggacgccaaguacucccacggcaucgacgucaccgaccucuucgccgcccagcccggccucaccuccgccgucaucgacacccucccccgcaacauggucaucaccugccagggcuccgacgacauccgcaagcuccucgagucccagggccgcaaggacaucaagcucaucgacaucgcccucuccaagaccgacucccgcaaguacgagaacgccgucugggaccaguacaaggaccucugccacaugcacaccggcgucgucgucgagaagaagaagcgcggcggcaaggaggagaucaccccccacugcgcccucauggacugcaucauguucgacgccgccgucuccggcggccucaacgccuccguccuccgcgccguccucccccgcgacauggucuuccgcaccuccaccccccgcgucguccucuga

SEQ ID NO: 8459 - RNA, 1710 nt, Artificial Sequence
  derived and/or modified CDS sequence (opt2) from LASV(G1618-SLE-2011;Clade IV)__AIT17189__NP
auguccgccuccaaggagaucaaguccuuccucuggacccagucccuccgccgcgagcucuccggcuacugcuccaacaucaagcuccaggucgucaaggacgcccaggcccuccuccacggccucgacuucuccgaggucuccaacguccagcgccucaugcgcaaggagcgccgcgacgacaacgaccucaagcgccuccgcgaccucaaccaggccgucaacaaccucgucgagcucaaguccacccagcagaaguccguccuccgcgucggcacccucaccuccgacgaccuccucauccucgccgccgaccucgagaagcucaaguccaaggucacccgcaccgagcgcccccucuccgccggcgucuacaugggcaaccucuccucccagcagcucgaccagcgccgcgcccuccucuccaugaucggcauguccggcggcaaccagggcgcccgcaccggccgcgacggcgucguccgcgucugggacgucaagaacgccgagcuccucaacaaccaguucggcaccaugcccucccucacccucgccugccucaccaagcagggccaggucgaccucaacgacgucguccaggcccucaccgaccucggccucaucuacaccgccaaguaccccaacaccuccgaccucgaccgccucacccagucccaccccauccucaacaugaucgacaccaagaaguccucccucaacaucuccggcuacaacuucucccucggcgccgccgucaaggccggcgccugcaugcucgacggcggcaacaugcucgagaccaucaaggucuccccccagaccaucgacggcauccucaaguccauccucaaggucaagaaggcccucggcauguucaucuccgacacccccggcgagcgcaaccccuacgagaacauccucuacaagaucugccucuccggcgacggcuggcccuacaucgccucccgcaccuccaucaccggccgcgccugggagaacaccgucgucgaccucgaguccgacggcaagccccagaaggccggcuccaacaacuccaacaagucccuccaguccgccggcuucaccgccggccucaccuacucccagcucaugacccucaaggacgccaugcuccagcucgaccccaacgccaagaccuggauggacaucgagggccgccccgaggaccccgucgagaucgcccucuaccagcccuccuccggcugcuacauccacuucuuccgcgagcccaccgaccucaagcaguucaagcaggacgccaaguacucccacggcaucgacgucaccgaccucuucgccgcccagcccggccucaccuccgccgucaucgacgcccucccccgcaacauggucaucaccugccagggcuccgacgacauccgcaagcuccucgagucccagggccgcaaggacaucaagcucaucgacaucgcccucuccaagaccgacucccgcaaguacgagaacgccgucugggaccaguacaaggaccucugccacaugcacaccggcgucgucgucgagaagaagaagcgcggcggcaaggaggagaucaccccccacugcgcccucauggacugcaucauguucgacgccgccgucuccggcggccucaacucccucguccuccgcgccguccucccccgcgacauggucuuccgcaccuccaccccccgcgucguccucuga

SEQ ID NO: 8460 - RNA, 1710 nt, Artificial Sequence
  derived and/or modified CDS sequence (opt2) from LASV(G1646-SLE-2011;Clade IV)__AIT17193__NP
auguccgccuccaaggagaucaaguccuuccucuggacccagucccuccgccgcgagcucuccggcuacugcuccaacaucaagcuccaggucgucaaggacgcccaggcccuccuccacggccucgacuucuccgaggucuccaacguccagcgccucaugcgcaaggagcgccgcgacgacaacgaccucaagcgccuccgcgaccucaaccaggccgucaacaaccucgucgagcucaaguccacccagcagaaguccguccuccgcgucggcacccucaccuccgacgaccuccucauccucgccgccgaccucgagaagcucaaguccaaggucacccgcaccgagcgcccccucuccgccggcgucuacaugggcaaccucuccucccagcagcucgaccagcgccgcgcccuccucuccaugaucggcauguccggcggcaaccagggcgcccgcaccggccgcgacggcgucguccgcgucugggacgucaagaacgccgagcuccucaacaaccaguucggcaccaugcccucccucacccucgccugccucaccaagcagggccaggucgaccucaacgacgccguccaggcccucaccgaccucggccucaucuacaccgccaaguaccccaacaccuccgaccucgaccgccucacccagucccaccccauccucaacaugaucgacaccaagaaguccucccucaacaucuccggcuacaacuucucccucggcgccgccgucaaggccggcgccugcaugcucgacggcggcaacaugcucgagaccaucaaggucuccccccagaccauggacggcauccucaaguccauccucaaggucaagaaggcccucggcauguucaucuccgacacccccggcgagcgcaaccccuacgagaacauccucuacaagaucugccucuccggcgacggcuggcccuacaucgccucccgcaccuccaucaccggccgcgccugggagaacaccgucgucgaccucgaguccgacggcaagccccagaaggccggcaacaacaacuccaacaagucccuccaguccgccggcuucaccgccggccucaccuacucccagcucaugacccucaaggacgccaugcuccagcucgaccccaacgccaagaccuggauggacaucgagggccgccccgaggaccccgucgagaucgcccucuaccagcccuccuccggcugcuacauccacuucuuccgcgagcccaccgaccucaagcaguucaagcaggacgccaaguacucccacggcaucgacgucaccgaccucuucgccgcccagcccggccucaccuccgccgucaucgacgcccucccccgcaacauggucaucaccugccagggcuccgacgacauccgcaagcuccucgagucccagggccgcaaggacaucaagcucaucgacaucgcccucuccaagaccgacucccgcaaguacgagaacgccgucugggaccaguacaaggaccucugccacaugcacaccggcgucgucgucgagaagaagaagcgcggcggcaaggaggagaucaccccccacugcgcccucauggacugcaucauguucgacgccgccgucuccggcggccucaacucccucguccuccgcgccguccucccccgcgacauggucuuccgcaccuccaccccccgcgucguccucuga

SEQ ID NO: 8461 - RNA, 1710 nt, Artificial Sequence
  derived and/or modified CDS sequence (opt2) from LASV(G1647-SLE-2011;Clade IV)__AIT17197__NP
auguccgccuccaaggagaucaaguccuuccucuggacccagucccuccgccgcgagcucuccggcuacugcuccaacaucaagcuccaggucgucaaggacgcccaggcccuccuccacggccucgacuucuccgaggucuccaacguccagcgccucaugcgcaaggagcgccgcgacgacaacgaccucaagcgccuccgcgaccucaaccaggccgucaacaaccucgucgagcucaaguccacccagcagaaguccauccuccgcgucggcacccucaccuccgacgaccuccucauccucgccgccgaccucgagaagcucaaguccaaggucauccgcaccgagcgcccccucuccgccggcgucuacaugggcaaccucucccuccagcagcucgaccagcgccgcgcccuccucaacaugaucggcauguccggcuccaaccagggcguccgcgccggccgcgacggcgucguccgcgucugggacgucaagaacgccgagcuccucaacaaccaguucggcaccaugcccucccucacccucgccugccucaccaagcagggccaggucgaccucaacgacgccguccaggcccucaccgaccucggccucaucuacaccgccaaguaccccaacaccuccgaccucgaccgccucacccagucccaccccauccucaacaugaucgacaccaagaaguccucccucaacaucuccggcuacaacuucucccucggcgccgccgucaaggccggcgccugcaugcucgacggcggcaacaugcucgagaccaucaaggucuccccccagaccauggacggcauccucaaguccauccucaaggucaagaaggcccucggcauguucaucuccgacacccccggcgagcgcaaccccuacgagaacauccucuacaagaucugccucuccggcgacggcuggcccuacaucgccucccgcaccuccaucaccggccgcgccugggagaacaccgucgucgaccucgaguccgacggcaagccccagaaggccggcuccaacggcuccaacaagucccuccaguccgccggcuucaccgccggccucaccuacucccagcucaugacccucaaggacgccaugcuccagcucgaccccaacgccaagaccuggauggacaucgagggccgccccgaggaccccgucgagaucgcccucuaccagcccuccuccggcugcuacauccacuucuuccgcgagcccaccgaccucaagcaguucaagcaggacgccaaguacucccacggcaucgacgucaccgaccucuucgccgcccagcccggccucaccuccgccgucaucgacgcccucccccgcaacauggucaucaccugccagggcuccgacgacauccgcaagcuccucgagucccagggccgcaaggacaucaagcucaucgacaucgcccucuccaagaccgacucccgcaaguacgagaacgccgucugggaccaguacaaggaccucugccacaugcacaccggcaucgucgucgagaagaagaagcgcggcggcaaggaggagaucaccccccacugcgcccucauggacugcaucauguucgacgccgccgucuccggcggccucaacaccuccguccuccgcgccguccucccccgcgacauggucuuccgcaccuccaccccccgcgucguccucuga

SEQ ID NO: 8462 - RNA, 1710 nt, Artificial Sequence
  derived and/or modified CDS sequence (opt2) from LASV(G1727-SLE-2011;Clade IV)__AIT17201__NP
auguccgccuccaaggagaucaaguccuuccucuggacccagucccuccgccgcgagcucuccggcuacugcuccaacaucaagcuccaggucgucaaggacgcccaggcccuccuccacggccucgacuucuccgaggucuccaacguccagcgccucaugcgcaaggagcgccgcgacgacaacgaccucaagcgccuccgcgaccucaaccaggccgucaacaaccucgucgagcucaaguccacccagcagaaguccauccuccgcgucggcacccucaccuccgacgaccuccucauccucgccgccgaccucgagaagcucaaguccaaggucacccgcaccgagcgcccccucuccgccggcgucuacaugggcaaccucuccucccagcagcucgaccagcgccgcgcccuccucaacaugaucggcauguccggcuccaaccagggcgcccgcgccggccgcgacggcgucguccgcgucugggacgucaagaacgccgagcuccucaacaaccaguucggcaccaugcccucccucacccucgccugccucaccaagcagggccaggucgaccucaacgacgccguccaggcccucaccgaccucggccucaucuacaccgccaaguaccccaacaccuccgaccucgaccgccucacccagucccaccccauccucaacaugaucgacaccaagaaguccucccucaacaucuccggcuacaacuucucccucggcgccgccgucaaggccggcgccugcaugcucgacggcggcaacaugcucgagaccaucaaggucuccccccagaccauggacggcauccucaaguccauccucaaggucaagaaggcccucggcauguucaucuccgacgcccccggcgagcgcaaccccuacgagaacauccucuacaagaucugccucuccggcgacggcuggcccuacaucgccucccgcaccuccaucaccggccgcgccugggagaacaccgucgucgaccucgaguccgacggcaagccccagaaggccggcuccaacggcuccaacaagucccuccaguccgccggcuucaccgccggccucaccuacucccagcucaugacccucaaggacgccaugcuccagcucgaccccaacgccaagaccuggauggacaucgagggccgccccgaggaccccgucgagaucgcccucuaccagcccuccuccggcugcuacauccacuucuuccgcgagcccaccgaccucaagcaguucaagcaggacgccaaguacucccacggcaucgacgucaccgaccucuucgccgcccagcccggccucaccuccgccgucaucgacgcccucccccgcaacauggucaucaccugccagggcuccgacgacaucaagaagcucuucgagucccagggccgcaaggacaucaagcucaucgacaucgcccucuccaagaccgacucccgcaaguacgagaacgccgucugggaccaguacaaggaccucugccacaugcacaccggcaucgucgucgagaagaagaagcgcggcggcaaggaggagaucaccccccacugcgcccucauggacugcaucauguucgacgccgccgucuccggcggccucaacaccuccguccuccgcgccguccucccccgcgacauggucuuccgcaccuccaccccccgcgucguccucuga

SEQ ID NO: 8463 - RNA, 1710 nt, Artificial Sequence
  derived and/or modified CDS sequence (opt2) from LASV(G1774-SLE-2011;Clade IV)__AIT17205__NP
auguccgccuccaaggagaucaaguccuuccucuggacccagucccuccgccgcgagcucuccggcuacugcuccaacaucaagcuccaggucgucaaggacgcccaggcccuccuccacggccucgacuucuccgaggucuccaacguccagcgccucaugcgcaaggagcgccgcgacgacaacgaccucaagcgccuccgcgaccucaaccaggccgucaacaaccucgucgagcucaaguccacccagcagaaguccauccuccgcgucggcacccucaccuccgacgaccuccucauccucgccgccgaccucgagaagcucaaguccaaggucacccgcaccgagcgcccccucuccgccggcgucuacaugggcaaccucuccucccagcagcucgaccagcgcaaggcccuccucaacaugaucggcauguccggcuccaaccagggcgcccgcaucggccgcgacggcgucguccgcgucugggacgucaagaacgccgagcuccucaacaaccaguucggcaccaugcccucccucacccucgccugccucaccaagcagggccaggucgaccucaacgacgccguccaggcccucaccgaccucggccucaucuacaccgccaaguaccccaacaccuccgaccucgaccgccucacccagucccaccccauccucaacaugaucgacaccaagaaguccucccucaacaucuccggcuacaacuucucccucggcgccgccgucaaggccggcgccugcaugcucgacggcggcaacaugcucgagaccaucaaggucuccccccagaccauggacggcauccucaaguccauccucaaggucaagaaggcccucggcauguucaucuccgacacccccggcgagcgcaaccccuacgagaacauccucuacaagaucugccucuccggcgacggcuggcccuacaucgccucccgcaccuccaucaccggccgcgccugggagaacaccgucgucgaccucgaguccgacggcaagccccagaaggccggcuccaacuccuccaacaagucccuccaguccgccggccucaccgccggccucaccuacucccagcucaugacccucaaggacgccaugcuccagcucgaccccaacgccaagaccuggauggacaucgagggccgccccgaggaccccgucgagaucgcccucuaccagcccuccuccggcugcuacauccacuucuuccgcgagcccaccgaccucaagcaguucaagcaggacgccaaguacucccacggcaucgacgucaccgaccucuucgccgcccagcccggccucaccuccgccgucaucgacgcccucccccgcaaccucgucaucaccugccagggcuccgacgacauccgcaagcuccucgagucccagggccgcaaggacaucaagcucaucgacaucgcccucuccaagaccgacucccgcaaguacgagaacgccgucugggaccaguacaaggaccucugccacaugcacaccggcaucgucgucgagaagaagaagcgcggcggcaaggaggagaucaccccccacugcgcccucauggacugcaucauguucgacgccgccgucuccggcggccucaacgccuccguccuccgcgccguccucccccgcgacauggucuuccgcaccuccaccccccgcgucguccucuga

SEQ ID NO: 8464 - RNA, 1710 nt, Artificial Sequence
  derived and/or modified CDS sequence (opt2) from LASV(G1792-SLE-2011;Clade IV)__AIT17209__NP
auguccgccuccaaggagaucaaguccuuccucuggacccagucccuccgccgcgagcucuccggcuacugcuccaacaucaagcuccaggucgucaaggacgcccaggcccuccuccacggccucgacuucuccgaggucuccaacguccagcgccucaugcgcaaggagcgccgcgacgacaacgaccucaagcgccuccgcgaccucaaccaggccgucaacaaccucgucgagcucaaguccacccagcagaaguccauccuccgcgucggcacccucaccuccgacgaccuccucauccucgccgccgaccucgagaagcucaaguccaaggucacccgcaccgagcgcccccucuccgccggcgucuacaugggcaaccucuccucccagcagcucgaccagcgccgcgcccuccucuccaugaucggcauguccggcggcaaccagggcgcccgcgccggccgcgacggcgucguccgcgucugggacgucaagaacgccgagcuccucaacaaccaguucggcaccaugcccucccucacccucgccugccucaccaagcagggccaggucgaccucaacgacgucguccaggcccucaccgaccucggccucaucuacaccgccaaguaccccaacaccuccgaccucgaccgccucacccagucccaccccauccucaacaugaucgacaccaagaaguccucccucaacaucuccggcuacaacuucucccucggcgccgccgucaaggccggcgccugcaugcucgacggcggcaacaugcucgagaccaucaaggucuccccccagaccauggacggcauccucaaguccauccucaaggucaagaaggcccucggcauguucaucuccgacacccccggcgagcgcaaccccuacgagaacauccucuacaagaucugccucuccggcgacggcuggcccuacaucgccucccgcaccuccaucaccggccgcgccugggagaacaccgucgucgaccucgaguccgacggcaagcuccagaagaccggcuccaacaacuccaacaagucccuccaguccgccggcuucaccgccggccucaccuacucccagcucaugacccucaaggacgccaugcuccagcucgaccccaacgccaagaucuggauggacaucgagggccgccccgaggaccccgucgagaucgcccucuaccagcccuccuccggcugcuacauccacuucuuccgcgagcccaccgaccucaagcaguucaagcaggacgccaaguacucccacggcaucgacgucaccgaccucuucgccgcccagcccggccucaccuccgccgucaucgacgcccucccccgcaacauggucaucaccugccagggcuccgacgacauccgcaagcuccucgagucccagggccgcaaggacaucaagcucaucgacaucgcccucaacaagaccgacucccgcaaguacgagaacgccgucugggaccaguacaaggaccucugccacaugcacaccggcgucgucgucgagaagaagaagaagggcggcaaggaggagaucaccccccacugcgcccucauggacugcaucauguucgacgccgccgucuccggcggccucaacaccuccguccuccgcgccguccucccccgcgacauggucuuccgcaccuccaccccccgcgucguccucuga

SEQ ID NO: 8465 - RNA, 1710 nt, Artificial Sequence
  derived and/or modified CDS sequence (opt2) from LASV(G1897-SLE-2011;Clade IV)__AIT17211__NP
auguccgccuccaaggagaucaaguccuuccucuggacccagucccuccgccgcgagcucuccggcuacugcuccaacaucaagcuccaggucgucaaggacgcccaggcccuccuccacggccucgacuucuccgaggucuccaacguccagcgccucaugcgcaaggagcgccgcgacgacaacgaccucaagcgccuccgcgaccucaaccaggccgucaacaaccucgucgagcucaaguccacccagcagaaguccauccuccgcgucggcacccucaccuccgacgaccuccucauccucgccgccgaccucgagaagcucaaguccaaggucacccgcaccgagcgcccccucuccgccggcgucuacaugggcaaccucuccucccagcagcucgaccagcgccgcgcccuccucaacaugaucggcauguccggcggcaaccagggcgcccaggccggccgcgacggcgucguccgcgucugggacgucaagaacgccgagcuccucaacaaccaguucggcaccaugcccucccucacccucgccugccucaccaagcagggccaggucgaccucaacgacgccguccaggcccucaccgaccucggccucaucuacaccgccaaguaccccaacaccuccgaccucgaccgccucacccagucccaccccauccucaacaugaucgacaccaagaaguccucccucaacaucuccggcuacaacuucucccucggcgccgccgucaaggccggcgccugcaugcucgacggcggcaacaugcucgagaccaucaaggucuccccccagaccauggacggcauccucaaguccauccucaaggucaagaaggcccucggcauguucaucuccgacacccccggcgagcgcaaccccuacgagaacauccucuacaagaucugccucuccggcgacggcuggcccuacaucgccucccgcaccuccaucaccggccgcgccugggagaacaccgucgucgaccucgaguccgacggcaagccccagaaggccaacuccaacuccuccaacaagucccuccaguccgccggcuucaccgccggccucaccuacucccagcucaugacccucaaggacgccaugcuccagcucgaccccaacgccaagaccuggauggacaucgagggccgccccgaggaccccgucgagaucgcccucuaccagcccuccuccggcugcuacauccacuucuuccgcgagcccaccgaccucaagcaguucaagcaggacgccaaguacucccacggcaucgacgucaccgaccucuucgccgcccagcccggccucaccuccgccgucaucgacgcccucccccgcaacauggucaucaccugccagggcuccgacgacauccgcaagcuccucgagucccagggccgcaaggacaucaagcucaucgacaucgcccucuccaagaccgacucccgcaaguacgagaacgccgucugggaccaguacaaggaccucugccacaugcacaccggcaucgucgucgagaagaagaagcgcggcggcaaggaggagaucaccccccacugcgcccucauggacugcaucauguucgacgccgccgucuccggcggccucaacaccuccguccuccgcgccguccucccccgcgacauggucuuccgcaccuccaccccccgcgucguccucuga

SEQ ID NO: 8466 - RNA, 1710 nt, Artificial Sequence
  derived and/or modified CDS sequence (opt2) from LASV(G1932-SLE-2011;Clade IV)__AIT17213__NP
auguccgccuccaaggagaucaaguccuuccucuggacccagucccuccgccgcgagcucgccggcuacugcuccaacaucaagcuccaggucgucaaggacgcccaggcccuccuccacggccucgacuucuccgaggucuccaacguccagcgccucaugcgcaaggagcgccgcgacgacaacgaccucaagcgccuccgcgaccucaaccaggccgucaacaaccucgucgagcucaaguccacccagcagaaguccguccuccgcgucggcacccucaccuccgacgaccuccucauccucgccgccgaccucgagaagcucaaguccaaggucauccgcaccgagcgcccccucuccgccggcgucuacaugggcaaccucuccucccagcagcucgaccagcgccgcgcccuccucaacaugaucggcauguccggcuccaaccagggcguccgcgccggccgcgacggcgucguccgcgucugggacgucaagaacgccgagcuccucaacaaccaguucggcaccaugcccucccucacccucgccugccucaccaagcagggccaggucgaccucaacgacgccguccaggcccucaccgaccucggccucaucuacaccgccaaguaccccaacaccuccgaccucgaccgccucacccagucccaccccauccucaacaugaucgacaccaagaaguccucccucaacaucuccggcuacaacuucucccucggcgccgccgucaaggccggcgccugcaugcucgacggcggcaacaugcucgagaccaucaaggucuccccccagaccauggacggcauccucaaguccauccucaaggucaagaaggcccucggcauguucaucuccgacacccccggcgagcgcaaccccuacgagaacauccucuacaagaucugccucuccggcgacggcuggcccuacaucgccucccgcaccuccaucaccggccgcgccugggagaacaccgucgucgaccucgaguccgacggcaagccccagaaggccggcuccaacggcuccaacaagucccuccaguccgccggcuucaccgccggccucaccuacucccagcucaugacccucaaggacgccaugcuccagcucgaccccaacgccaagaccuggauggacaucgagggccgccccgaggaccccgucgagaucgcccucuaccagcccuccuccggcugcuacauccacuucuuccgcgagcccaccgaccucaagcaguucaagcaggacgccaaguacucccacggcaucgacgucaccgaccucuucgccgcccagcccggccucaccuccgccgucaucgacgcccucccccgcaacauggucaucaccugccagggcuccgacgacauccgcaagcuccucgagucccagggccgcaaggacaucaagcucaucgacaucgcccucuccaagaccgacucccgcaaguacgagaacgccgucugggaccaguacaaggaccucugccacaugcacaccggcaucgucgucgagaagaagaagcgcggcggcaaggaggagaucaccccccacugcgcccucauggacugcaucauguucgacgccgccgucuccggcggccucaacaccuccguccuccgcgccguccucccccgcgacauggucuuccgcaccuccaccccccgcgucguccucuga

SEQ ID NO: 8467 - RNA, 1710 nt, Artificial Sequence
  derived and/or modified CDS sequence (opt2) from LASV(G1959-SLE-2011;Clade IV)__AIT17217__NP
auguccgccuccaaggagaucaaguccuuccucuggacccagucccuccgccgcgagcucuccggcuacugcuccaacaucaagcuccaggucgucaaggacgcccaggcccuccuccacggccucgacuucuccgaggucuccaacguccagcgccucaugcgcaaggagcgccgcgacgacaacgaccucaagcgccuccgcgaccucaaccaggccgucaacaaccucgucgagcucaaguccacccagcagaaguccauccuccgcgucggcacccucaccuccgacgaccuccucauccucgccgccgaccucgagaagcucaaguccaaggucacccgcaccgagcgcccccucuccgccggcgucuacaugggcaaccucuccucccagcagcucgaccagcgccgcgcccuccucuccaugaucggcauguccuccggcguccagggcgcccgcgccggccgcgacggcgucguccgcgucugggacgucaagaacgccgagcuccucaacaaccaguucggcaccaugcccucccucacccucgccugccucaccaagcagggccaggucgaccucaacgacgucguccaggcccucaccgaccucggccucaucuacaccgccaaguaccccaacaccuccgaccucgaccgccucacccagucccaccccauccucaacaugaucgacaccaagaaguccucccucaacaucuccggcuacaacuucucccucggcgccgccgucaaggccggcgccugcaugcucgacggcggcaacaugcucgagaccaucaaggucuccccccagaccauggacggcauccucaaguccauccucaaggucaagaaggcccucggcauguucaucuccgagacccccggcgagcgcaaccccuacgagaacauccucuacaagaucugccucuccggcgacggcuggcccuacaucgccucccgcaccuccaucaccggccgcgccugggagaacaccgucgucgaccucgaguccgacggcaagccccagaaggccggcuccaacaacuccaacaagucccuccaguccaccggcuucgccgccggccucaccuacucccagcucaugacccucaaggacgccaugcuccagcucgaccccaacgccaagaccuggauggacaucgagggccgccccgaggaccccgucgaggucgcccucuaccagcccuccuccggcugcuacauccacuucuuccgcgagcccaccgaccucaagcaguucaagcaggacgccaaguacucccacggcaucgacgucaccgaccucuucgccgcccagcccggccucaccuccgccgucaucgacgcccucccccgcaacauggucaucaccugccagggcuccgacgacaucaagaagcuccucgagucccagggccgcaaggacaucaagcucaucgacaucgcccucuccaagaccgacucccgcaaguacgagaacgccgucugggaccaguacaaggaccucugccacaugcacaccggcgucgucgucgagaagaagaagcgcggcggcaaggaggagaucaccccccacugcgcccucauggacugcaucauguucgacgccgccgucuccggcggccucaacaccuccguccuccgcgccguccucccccgcgacauggucuuccgcaccuccaccccccgcgucguccucuga

SEQ ID NO: 8468 - RNA, 1710 nt, Artificial Sequence
  derived and/or modified CDS sequence (opt2) from LASV(G2141-SLE-2011;Clade IV)__AIT17225__NP
auguccgccuccaaggagaucaaguccuuccucuggacccagucccuccgccgcgagcucuccggcuacugcuccaacaucaagcuccaggucgucaaggacgcccaggcccuccuccacggccucgacuucuccgaggucuccaacguccagcgccucaugcgcaagcagcgccgcgacgacaacgaccucaagcgccuccgcgaccucaaccaggccgucaacaaccucgucgagcucaaguccacccagcagaaguccguccuccgcgucggcacccucaccuccgacgaccuccucguccucgccgccgaccucgagaagcucaaguccaaggucacccgcaccgagcgcccccucuccgccggcgucuacaugggcaaccucuccucccagcagcucgaccagcgccgcgcccuccucaacaugaucggcauguccggcggcaaccagggcgcccgcgccggcaacgacggcgucguccgcgucugggacgucaagaacgccgaccuccucaacaaccaguucggcaccaugcccucccucacccucgccugccucaccaagcagggccaggucgaccucaacgacgucguccaggcccucaccgaccucggccucaucuacaccgccaaguaccccaacaccuccgaccucgaccgccucacccagucccaccccauccucaacaugaucgacaccaagaaguccucccucaacaucuccggcuacaacuucucccucggcgccgccgucaaggccggcgccugcaugcucgacggcggcaacaugcucgagaccaucaaggucuccccccagaccauggacggcauccucaaguccauccucaaggucaagaaggcccucggcauguucaucuccgacacccccggcgagcgcaaccccuacgagaacauccucuacaagaucugccucuccggcgacggcuggcccuacaucgccucccgcaccuccaucaccggccgcgccugggagaacaccgucgucgaccucgaguccgacggcaagccccagaagaccggcaacaacuccuccaacaagucccuccaguccgccggcuucaccgccggccucaccuacucccagcucaugacccucaaggacgccaugcuccagcucgaccccaacgccaagaccuggauggacaucgagggccgccccgaggaccccgucgaggucgcccucuaccagcccuccuccggcugcuacauccacuucuuccgcgagcccaccgaccucaagcaguucaagcaggacgccaaguacucccacggcaucgacgucaccgaccucuucgccgcccagcccggccucaccuccgccgucaucgaggcccucccccgcaacauggucaucaccugccagggcuccgacgacauccgcaagcuccucgagucccagggccgcaaggacaucaagcucaucgacaucgcccucuccaagaucgacucccgcaaguacgagaacgccgucugggaccaguacaaggaccucugccacaugcacaccggcgucgucgucgagaagaagaagcgcggcggcaaggaggagaucaccccccacugcgcccucauggacugcaucauguucgacgccgccgucuccggcggccucaacacccucguccuccgcgccguccucccccgcgacauggucuuccgcaccuccacccccaaggucguccucuga

SEQ ID NO: 8469 - RNA, 1710 nt, Artificial Sequence
  derived and/or modified CDS sequence (opt2) from LASV(G2147-SLE-2011;Clade IV)__AIT17229__NP
auguccgccuccaaggagaucaaguccuuccucuggacccagucccuccgccgcgagcucuccggcuacugcuccaacaucaagcuccaggucgucaaggacgcccaggcccuccuccacggccucgacuucuccgaggucuccaacguccagcgccucaugcgcaaggagcgccgcgacgacaacgaccucaagcgccuccgcgaccucaaccaggccgucaacaaccucgucgagcucaaguccacccagcagaaguccguccuccgcgucggcacccucaccuccgacgaccuccucauccucgccgccgaccucgagaagcucaaguccaaggucauccgcaccgagcgcccccucuccgccggcgucuacaugggcaaccucuccucccagcagcucgaccagcgccgcgcccuccucuccaugaucggcauguccggcggcaaccagggcacccgcgccggccgcgacggcgucguccgcgucugggacgucaagaacgccgagcuccucaacaaccaguucggcaccaugcccucccucacccucgccugccucaccaagcagggccaggucgaccucaacgacgccguccaggcccucaccgaccucggccucaucuacaccgccaaguaccccaacaccuccgaccucgaccgccucacccagucccaccccauccucaacaugaucgacaccaagaaguccucccucaacaucuccggcuacaacuucucccucggcgccgccgucaaggccggcgccugcaugcucgacggcggcaacaugcucgagaccaucaaggucuccccccagaccauggacggcauccucaaguccauccucaaggucaagaaggcccucggcauguucaucuccgacacccccggcgagcgcaaccccuacgagaacauccucuacaagaucugccucuccggcgacggcuggcccuacaucgccucccgcaccuccaucaccggccgcgccugggagaacaccgucgucgaccucgaguccgacggcaagccccagaaggccggcuccaacaacuccaacaagucccuccaguccgccggcuucaccgccggccucaccuacucccagcucaugacccucaaggacgccaugcuccagcucgaccccaacgccaagaccuggauggacaucgagggccgccccgaggaccccgucgagaucgcccucuaccagcccuccuccggcugcuacauccacuucuuccgcgagcccaccgaccucaagcaguucaagcaggacgccaaguacucccacggcaucgacgucaccgaccucuucgccgcccagcccggccucaccuccgccgucaucgacgcccucccccgcaacauggucaucaccugccagggcuccgacgacauccgcaagcuccucgagucccagggccgcaaggacaucaagcucaucgacaucgcccucuccaaggccgacucccgcaaguacgagaacgccgucugggaccaguacaaggaccucugccacaugcacaccggcgucgucgucgagaagaagaagcgcggcggcaaggaggagaucaccccccacugcgcccucauggacugcaucauguucgacgccgccgucuccggcggccucaacaccuccguccuccgcgccguccucccccgcgacauggucuuccgcaccuccaccccccgcgucguccucuga

SEQ ID NO: 8470 - RNA, 1710 nt, Artificial Sequence
  derived and/or modified CDS sequence (opt2) from LASV(G2165-SLE-2011;Clade IV)__AIT17233__NP
auguccgccuccaaggaggucaaguccuuccucuggacccagucccuccgccgcgagcucuccggcuacugcuccaacaucaagcuccaggucgucaaggacgcccaggcccuccuccacggccucgacuucuccgaggucuccaacguccagcgccucaugcgcaaggagcgccgcgacgacaacgaccucaagcgccuccgcgaccucaaccaggccgucaacaaccucgucgagcucaaguccacccagcagaaguccauccuccgcgucggcacccucaccuccgacgaccuccucguccucgccgccgaccucgagaagcucaaguccaaggucacccgcaccgagcgcccccucuccgccggcgucuacaugggcaaccucuccucccagcagcucgaccagcgccgcgcccuccucuccaugaucggcauguccggcggcaaccagggcgcccaggccggccgcgacggcgucguccgcgucugggacgucaagaacgccgagcuccucaacaaccaguucggcaccaugcccucccucacccucgccugccucaccaagcagggccaggucgaccucaacgacgccguccaggcccucaccgaccucggccucaucuacaccgccaaguaccccaacaccuccgaccucgaccgccucacccagucccaccccauccucaacaugaucgacaccaagaaguccucccucaacaucuccggcuacaacuucucccucggcgccgccgucaaggccggcgccugcaugcucgacggcggcaacaugcucgagaccaucaaggucuccccccagaccauggacggcauccucaaguccauccucaaggucaagaaggcccucggcauguucaucuccgacacccccggcgagcgcaaccccuacgagaacauccucuacaagaucugccucuccggcgacggcuggcccuacaucgccucccgcaccuccaucaccggccgcgccugggagaacaccgucgucgaccucgaguccgacggcaagccccagaaggccggcuccaacaacuccaacaagucccuccaguccgccggcuucaccgccggccucaccuacucccagcucaugacccucaaggacgccaugcuccagcucgaccccaacgccaagaccuggauggacaucgagggccgccccgaggaccccgucgaggucgcccucuaccagcccuccuccggcugcuacauccacuucuuccgcgagcccaccgaccucaagcaguucaagcaggacgccaaguacucccacggcaucgacgucaccgaccucuucgccgcccagcccggccucaccuccgccgucaucgacgcccucccccgcaacauggucaucaccugccagggcuccgacgacauccgcaagcuccucgagucccagggccgcaaggacaucaagcucaucgacaucgcccucuccaagaccgacucccgcaaguacgagaacgccgucugggaccaguacaaggaccucugccacaugcacaccggcgucgucgucgagaagaagaagcgcggcggcaaggaggagaucaccccccacugcgcccucauggacugcaucauguucgacgccgccgucuccggcggccucaacaccuccguccuccgcgccguccucccccgcgacauggucuuccgcaccuccaccccccgcgucguccucuga

SEQ ID NO: 8471 - RNA, 1710 nt, Artificial Sequence
  derived and/or modified CDS sequence (opt2) from LASV(G2184-SLE-2011;Clade IV)__AIT17237__NP
auguccgccuccaaggagaucaaguccuuccucuggacccagucccuccgccgcgagcucuccggcuacugcuccaacaucaagcuccaggucgucaaggacgcccaggcccuccuccacggccucgacuucuccgaggucuccaacguccagcgccucaugcgcaaggagcgccgcgacgacaacgaccucaagcgccuccgcgaccucaaccaggccgucaacaaccucgucgagcucaaguccacccagcagaaguccauccuccgcgucggcacccucaccuccgacgaccuccucauccucgccgccgaccucgagaagcucaaguccaaggucacccgcaccgagcgcccccucuccgccggcgucuacaugggcaaccucuccucccagcagcucgaccagcgccgcgcccuccucuccaugaucggcauguccggcggcaaccagggcgcccgcgccggccgcgacggcgucguccgcgucugggacgucaagaacgccgagcuccucaacaaccaguucggcaccaugcccucccucacccucgccugccucaccaagcagggccaggucgaccucaacgacgccguccaggcccucaccgaccucggccucaucuacaccgccaaguaccccaacaccuccgaccucgaccgccucacccagucccaccccauccucaacaugaucgacaccaagaaguccucccucaacaucuccggcuacaacuucucccucggcgccgccgucaaggccggcgccugcaugcucgacggcggcaacaugcucgagaccaucaaggucuccccccagaccauggacggcauccucaaguccauccucaaggucaagaaggcccucggcauguucaucuccgacacccccggcgagcgcaaccccuacgagaacauccucuacaagaucugccucuccggcgacggcuggcccuacaucgccucccgcaccuccaucaccggccgcgccugggagaacaccgucgucgaccucgaguccgacggcaagccccagaaggccggcuccaacaacuccaacaagucccuccaguccgccggcuucaccgccggccucaccuacucccagcucaugacccucaaggacgccaugcuccagcucgaccccaacgccaagaccuggauggacaucgagggccgccccgaggaccccgucgaggucgcccucuaccagcccuccuccggcugcuacauccacuucuuccgcgagcccaccgaccucaagcaguucaagcaggacgccaaguacucccacggcaucgacgucaccgaccucuucgccgcccagcccggccucaccuccgccgucaucgacgcccucccccgcaacauggucaucaccugccagggcuccgacgacauccgcaagcuccucgagucccagggccgcaaggacaucaagcucaucgacaucgcccucuccaagaccgacucccgcaaguacgagaacgccgucugggaccaguacaaggaccucugccacaugcacaccggcgucgucgucgagaagaagaagcgcggcggcaaggaggagaucaccccccacugcgcccucauggacugcaucauguucgacgccgccgucuccggcggccucaacaccuccguccuccgcgccguccucccccgcgacauggucuuccgcaccuccaccccccgcgucguccucuga

SEQ ID NO: 8472 - RNA, 1710 nt, Artificial Sequence
  derived and/or modified CDS sequence (opt2) from LASV(G2197-SLE-2011;Clade IV)__AIT17241__NP
auguccgccuccaaggagaucaaguccuuccucuggacccagucccuccgccgcgagcucuccggcuacugcuccaacaucaagcuccaggucgucaaggacgcccaggcccuccuccacggccucgacuucuccgaggucuccaacguccagcgccucaugcgcaaggagcgccgcgacgacaacgaccucaagcgccuccgcgaccucaaccaggccgucaacaaccucgucgagcucaaguccacccagcagaaguccauccuccgcgucggcacccucaccuccgacgaccuccucauccucgccgccgaccucgagaagcucaaguccaaggucacccgcaccgagcgcccccucuccgccggcgucuacaugggcaaccucuccucccagcagcucgaccagcgccgcgcccuccucuccaugaucggcauguccggcggcaaccagggcgcccgcgccggccgcgacggcgucguccgcgucugggacgucaagaacgccgagcuccucaacaaccaguucggcaccaugcccucccucacccucgccugccucaccaagcagggccaggucgaccucaacgacgccguccaggcccucaccgaccucggccucaucuacaccgccaaguaccccaacaccuccgaccucgaccgccucacccagucccaccccauccucaacaugaucgacaccaagaaguccucccucaacaucuccggcuacaacuucucccucggcgccgccgucaaggccggcgccugcaugcucgacggcggcaacaugcucgagaccaucaaggucuccccccagaccauggacggcauccucaaguccauccucaaggucaagaaggcccucggcauguucaucuccgacacccccggcgagcgcaaccccuacgagaacauccucuacaagaucugccucuccggcgacggcuggcccuacaucgccucccgcaccuccaucaccggccgcgccugggagaacaccgucgucgaccucgaguccgacggcaagccccagaaggccggcuccaacaacuccaacaagucccuccaguccgccggcuucaccgccggccucaccuacucccagcucaugacccucaaggacgccaugcuccagcucgaccccaacgccaagaccuggauggacaucgagggccgccccgaggaccccgucgagaucgcccucuaccagcccuccuccggcugcuacauccacuucuuccgcgagcccaccgaccucaagcaguucaagcaggacgccaaguacucccacggcaucgacgucaccgaccucuucgccgcccagcccggccucaccuccgccgucaucgacgcccucccccgcaacauggucaucaccugccagggcuccgacgacauccgcaagcucuucgagucccagggccgcaaggacaucaagcucaucgacaucgcccucuccaagaccgacucccgcaaguacgagaacgccgucugggaccaguacaaggaccucugccacaugcacaccggcgucgucgucgagaagaagaagcgcggcggcaaggaggagaucaccccccacugcgcccucauggacugcaucauguucgacgccgccgucuccggcggccucaacaccuccguccuccgcgccguccucccccgcgacauggucuuccgcaccuccaccccccgcgucguccucuga

SEQ ID NO: 8473 - RNA, 1710 nt, Artificial Sequence
  derived and/or modified CDS sequence (opt2) from LASV(G2222-SLE-2011;Clade IV)__AIT17245__NP
auguccgccuccaaggagaucaaguccuuccucuggacccagucccuccgccgcgagcucuccggcuacugcuccaacaucaagcuccaggucgucaaggacgcccaggcccuccuccacggccucgacuucuccgaggucuccaacguccagcgccucaugcgcaaggagcgccgcgacgacaacgaccucaagcgccuccgcgaccucaaccaggccgucaacaaccucgucgagcucaaguccacccagcagaaguccauccuccgcgucggcacccucaccuccgacgaccuccucauccucgccgccgaccucgagaagcucaaguccaaggucacccgcaccgagcgcccccucuccgccggcgucuacaugggcaaccucuccucccagcagcucgaccagcgccgcgcccuccucaacaugaucggcauguccggcuccaaccagggcgcccgcaccggccgcgacggcgucguccgcgucugggacgucaagaacgccgagcuccucaacaaccaguucggcaccaugcccucccucacccucgccugccucaccaagcagggccaggucgaccucaacgacgccguccaggcccucaccgaccucggccucaucuacaccgccaaguaccccaacaccuccgaccucgaccgccucacccagucccaccccauccucaacaugaucgacaccaagaaguccucccucaacaucuccggcuacaacuucucccucggcgccgccgucaaggccggcgccugcaugcucgacggcggcaacaugcucgagaccaucaaggucuccccccagaccauggacggcauccucaaguccauccucaaggucaagaaggcccucggcauguucaucuccgacacccccggcgagcgcaaccccuacgagaacauccucuacaagaucugccucuccggcgacggcuggcccuacaucgccucccgcaccuccaucaccggccgcgccugggagaacaccgucgucgaccucgaguccgacggcaagccccagaaggccggcuccaacaacuccaacaagucccuccaguccgccggccucaccgccggccucaccuacucccagcucaugacccucaaggacgccaugcuccagcucgaccccaacgccaagaccuggauggacaucgagggccgccccgaggaccccgucgagaucgcccucuaccagcccuccuccggcugcuacauccacuucuuccgcgagcccaccgaccucaagcaguucaagcaggacgccaaguacucccacggcaucgacgucgccgaccucuucgccgcccagcccggccucaccuccgccgucaucgacgcccucccccgcaaccucgucaucaccugccagggcuccgacgacauccgcaagcuccucgagucccagggccgcaaggacaucaagcucaucgacaucgcccucuccaagaccgacucccgcaaguacgagaacgccgucugggaccaguacaaggaccucugccacaugcacaccggcaucgucgucgagaagaagaagcgcggcggcaaggaggagaucaccccccacugcgcccucauggacugcaucauguucgacgccgccgucuccggcggccucaacgccuccguccuccgcgccguccucccccgcgacauggucuuccgcaccuccaccccccgcgucguccucuga

SEQ ID NO: 8474 - RNA, 1710 nt, Artificial Sequence
  derived and/or modified CDS sequence (opt2) from LASV(G2230-SLE-2012;Clade IV)__AIT17247__NP
auguccgccuccaaggagaucaaguccuuccucuggacccagucccuccgccgcgagcucuccggcuacugcuccaacaucaagcuccaggucgucaaggacgcccaggcccuccuccacggccucgacuucuccgaggucuccaacguccagcgccucaugcgcaagcagcgccgcgacgacuccgaccucaagcgccuccgcgaccucaaccaggccgucaacaaccucgucgagcucaaguccacccagcagaaguccguccuccgcgucggcacccucaccuccgacgaccuccucauccucgccgccgaccucgagaagcucaaguccaaggucauccgcaccgagcgcccccucuccuccggcgucuacaugggcaaccucuccucccagcagcucgaccagcgccgcgcccuccucaacaugaucggcauguccggcggcaaccagggcgcccaggucggccgcgacggcgucguccgcgucugggacgucaagaacgccgaccuccucaacaaccaguucggcaccaugcccucccucacccucgccugccucaccaagcagggccaggucgaccucaacgacgucguccaggcccucaccgaccucggccucaucuacaccgccaaguaccccaacaccuccgaccucgaccgccucgcccagucccaccccauccucaacaugaucgacaccaagaaguccucccucaacaucuccggcuacaacuucucccucggcgccgccgucaaggccggcgccugcaugcucgacggcggcaacaugcucgagaccaucaaggucuccccccagaccauggacggcauccucaaguccauccucaaggucaagaaggcccucggcauguucaucuccgagacccccggcgagcgcaaccccuacgagaacauccucuacaagaucugccucuccggcgacggcuggcccuacaucgccucccgcaccuccaucaccggccgcgccugggagaacaccaucgucgaccucgaguccgacggcaagccccagaaggccggcuccaacaacuccaacaagucccuccaguccgccggcuucaccgccggccucaccuacucccagcucaugacccucaaggacuccaugcuccagcucgaccccaacgccaagaccuggauggacaucgagggccgccccgaggaccccgucgaggucgcccucuaccagcccuccuccggcugcuacauccacuucuuccgcgagcccaccgaccucaagcaguucaagcaggacgccaaguacucccacggcaucgacgucaccgaccucuucgccgcccagcccggccucaccuccgccgucaucgaggcccucccccgcaacauggucaucaccugccagggcuccgacgacauccgcaagcuccucgagucccagggccgcaaggacaucaagcucaucgacaucgcccucaacaagaccgacucccgcaaguacgagaacgccgucugggaccaguacaaggaccucugccacaugcacaccggcgucgucgucgagaagaagaagcgcggcggcaaggaggagaucaccccccacugcgcccucauggacugcaucauguucgacgccgccgucuccggcggccucaagacccucguccuccgcgccguccucccccgcgacauggucuuccgcaccuccacccccaaggucguccucuga

SEQ ID NO: 8475 - RNA, 1710 nt, Artificial Sequence
  derived and/or modified CDS sequence (opt2) from LASV(G2259-SLE-2012;Clade IV)__AIT17251__NP
auguccgccuccaaggagaucaaguccuuccucuggacccagucccuccgccgcgagcucuccggcuacugcuccaacaucaagcuccaggucgucaaggacgcccaggcccuccuccacggccucgacuucuccgaggucuccaacguccagcgccucaugcgcaagcagcgccgcgacgacuccgaccucaagcgccuccgcgaccucaaccaggccgucaacaaccucgucgagcucaaguccacccagcagaaguccguccuccgcgucggcacccucaccuccgacgaccuccucauccucgccgccgaccucgagaagcucaaguccaaggucauccgcaccgagcgcccccucuccuccggcgucuacaugggcaaccucuccucccagcagcucgaccagcgccgcgcccuccucaacaugaucggcauguccggcggcaaccagggcgcccaggucggccgcgacggcgucguccgcgucugggacgucaagaacgccgaccuccucaacaaccaguucggcaccaugcccucccucacccucgccugccucaccaagcagggccaggucgaccucaacgacgucguccaggcccucaccgaccucggccucaucuacaccgccaaguaccccaacaccuccgaccucgaccgccucgcccagucccaccccauccucaacaugaucgacaccaagaaguccucccucaacaucuccggcuacaacuucucccucggcgccgccgucaaggccggcgccugcaugcucgacggcggcaacaugcucgagaccaucaaggucuccccccagaccauggacggcauccucaaguccauccucaaggucaagaaggcccucggcauguucaucuccgagacccccggcgagcgcaaccccuacgagaacauccucuacaagaucugccucuccggcgacggcuggcccuacaucgccucccgcaccuccaucaccggccgcgccugggagaacaccaucgucgaccucgaguccgacggcaagccccagaagaccggcuccaacaacuccaacaagucccuccaguccgccggcuucaccgccggccucaccuacucccagcucaugacccucaaggacuccaugcuccagcucgaccccaacgccaagaccuggauggacaucgagggccgccccgaggaccccgucgaggucgcccucuaccagcccuccuccggcugcuacauccacuucuuccgcgagcccaccgaccucaagcaguucaagcaggacgccaaguacucccacggcaucgacgucaccgaccucuucgccgcccagcccggccucaccuccgccgucaucgaggcccucccccgcaacauggucaucaccugccagggcuccgacgacauccgcaagcuccucgagucccagggccgcaaggacaucaagcucaucgacaucgcccucaacaagaccgacucccgcaaguacgagaacgccgucugggaccaguacaaggaccucugccacaugcacaccggcgucgucgucgagaagaagaagcgcggcggcaaggaggagaucaccccccacugcgcccucauggacugcaucauguucgacgccgccgucuccggcggccucaagacccucguccuccgcgccguccucccccgcgacauggucuuccgcaccuccacccccaaggucguccucuga

SEQ ID NO: 8476 - RNA, 1710 nt, Artificial Sequence
  derived and/or modified CDS sequence (opt2) from LASV(G2263-SLE-2012;Clade IV)__AIT17255__NP
auguccgccuccaaggagaucaaguccuuccucuggacccagucccuccgccgcgagcucuccggcuacugcuccaacaucaagcuccaggucgucaaggacgcccaggcccuccuccacggccucgacuucuccgaggucuccaacguccagcgccucaugcgcaaggagcgccgcgacgacaacgaccucaagcgccuccgcgaccucaaccaggccgucaacaaccucgucgagcucaaguccacccagcagaaguccguccuccgcgucggcacccucaccuccgacgaccuccucguccucgccgccgaccucgagaagcucaaguccaaggucacccgcaccgagcgcccccucuccgccggcgucuacaugggcaaccucuccucccagcagcucgaccagcgccgcgcccuccucuccaugaucggcauguccggcggcaaccagcgcgcccaggccggccgcgacggcgucguccgcgucugggacgucaagaacgccgagcuccucaacaaccaguucggcaccaugcccucccucacccucgccugccucaccaagcagggccaggucgaccucaacgacgccguccaggcccucaccgaccucggccucaucuacaccgucaaguaccccaacgccuccgaccucgaccgccucacccagucccaccccauccucaacaugaucgacaccaagaaguccucccucaacaucuccggcuacaacuucucccucggcgccgccgucaaggccggcgccugcaugcucgacggcggcaacaugcucgagaccaucaaggucuccccccagaccauggacggcauccucaaguccauccucaaggucaagaagacccucggcauguucaucuccgacacccccggcgagcgcaaccccuacgagaacauccucuacaagaucugccucuccggcgacggcuggcccuacaucgccucccgcaccuccaucaccggccgcgccugggagaacaccgucgucgaccucgaguccaacggcaagccccagaaggccgacuccaacuccuccaacaagucccuccaguccgccggcuucaccgccggccucaccuacucccagcucaugacccucaaggacgccaugcuccagcucgaccccaacgccaagaccuggauggacaucgagggccgccccgaggaccccgucgagaucgccuucuaccagcccuccuccggcugcuacauccacuucuuccgcgagcccaccgaccucaagcaguucaagcaggacgccaaguacucccacggcaucgacgucaccgaccucuucgccgcccagcccggccucaccuccgccgucaucgacgcccucccccgcaacauggucaucaccugccagggcuccgacgacauccgcaagcuccucgagucccagggccgcaaggacaucaagcucaucgacaucgcccucuccaagaccgacucccgcaaguacgagaacgccgucugggaccaguacaaggaccucugccacaugcacaccggcgucgucgucgagaagaagaagcgcggcggcaaggaggagaucaccccccacugcgcccucauggacugcaucauguucgacgccgccgucuccggcggccucaacacccucguccuccgcgccguccucccccgcgacauggucuuccgcaccuccaccccccgcgucguccucuga

SEQ ID NO: 8477 - RNA, 1710 nt, Artificial Sequence
  derived and/or modified CDS sequence (opt2) from LASV(G2280-SLE-2012;Clade IV)__AIT17259__NP
auguccgccuccaaggagaucaaguccuuccucuggacccagucccuccgccgcgagcucuccuccuacugcuccaacaucaagcuccaggucgucaaggacgcccaggcccuccuccacggccucgacuucuccgaggucuccaacguccagcgccucaugcgcaaggagcgccgcgacgacaacgaccucaagcgccuccgcgaccucaaccaggccgucaacaaccucgucgagcucaaguccacccagcagaaguccauccuccgcgucggcacccucaccuccgacgaccuccucauccucgccgccgaccucgagaagcucaaguccaaggucacccgcaccgagcgcccccucuccgccggcgucuacaugggcaaccucuccucccagcagcucgaccagcgccgcgcccuccucaacaugcucggcauguccggcuccaaccagggcgcccgcgccggccgcgacggcgucguccgcgucugggacgucaagaacgccgagcuccucaacaaccaguucggcaccaugcccucccucacccucgccugccucaccaagcagggccaggucgaccucaacgacgccguccaggcccucaccgaccucggccucaucuacaccgccaaguaccccaacaccuccgaccucgaccgccucacccagucccaccccauccucaacaugaucgacaccaagaaguccucccucaacaucuccggcuacaacuucucccucggcgccgccgucaaggccggcgccugcaugcucgacggcggcaacaugcucgagaccaucaaggucuccccccagaccauggacggcauccucaaguccauccucaaggucaagaaggcccucggcauguucaucuccgacacccccggcgagcgcaaccccuacgagaacauccucuacaagaucugccucuccggcgacggcuggcccuacaucgccucccgcaccuccaucaccggccgcgccugggagaacaccgucgucgaccucgaguccgacggcaagccccagaaggccggcuccaacuccuccaacaagucccuccaguccgccggcuucaccgccggccucaccuacucccagcucaugacccucaaggacgccaugcuccagcucgaccccaacgccaagaccuggauggacaucgagggccgccccgaggaccccgucgagaucgcccucuaccagcccuccuccggcugcuacauccacuucuuccgcgagcccaccgaccucaagcaguucaagcaggacgccaaguacucccacggcaucgacgucaccgaccucuucgccgcccagcccggccucaccuccgccgucaucgacgcccucccccgcaacauggucaucaccugccagggcuccgacgacauccgcaagcuccucgagucccagggccgcaaggacaucaagcucaucgacaucgcccucuccaagaccgacucccgcaaguacgagaacgccgucugggaccaguacaaggaccucugccacaugcacaccggcaucgucgucgagaagaagaagcgcggcggcaaggaggagaucaccccccacugcgcccucauggacugcaucauguucgacgccgccgucuccggcggccucaacgccuccguccuccgcgccguccucccccgcgacauggucuuccgcaccuccaccccccgcgucguccucuga

SEQ ID NO: 8478 - RNA, 1710 nt, Artificial Sequence
  derived and/or modified CDS sequence (opt2) from LASV(G2295-SLE-2012;Clade IV)__AIT17263__NP
auguccgccuccaaggagaucaaguccuuccucuggacccagucccuccgccgcgagcucuccggcuacugcuccaacaucaagcuccaggucgucaaggacgcccaggcccuccuccacggccucgacuucuccgaggucuccaacguccagcgccucaugcgcaaggagcgccgcgacgacaacgaccucaagcgccuccgcgaccucaaccaggccgucaacaaccucgucgagcucaaguccacccagcagaaguccguccuccgcgucggcacccucaccuccgacgaccuccucauccucgccgccgaccucgagaagcucaaguccaaggucauccgcaccgagcgcccccucuccgccggcgucuacaugggcaaccucuccucccagcagcucgaccagcgccgcgcccuccucaacaugaucggcaugggcggcuccaaccagggcgcccgcgccggccgcgacggcgucguccgcgucugggacgucaagaacgccgagcuccucaacaaccaguucggcaccaugcccucccucacccucgccugccucaccaagcagggccaggucgaccucaacgacgccguccaggcccucaccgaccucggccucaucuacaccgccaaguaccccaacaccuccgaccucgaccgccucacccagucccaccccauccucaacaugaucgacaccaagaaguccucccucaacaucuccggcuacaacuucucccucggcgccgccgucaaggccggcgccugcaugcucgacggcggcaacaugcucgagaccaucaaggucuccccccagaccauggacggcauccucaaguccauccucaaggucaagaaggcccucggcauguucaucuccgacacccccggcgagcgcaaccccuacgagaacauccucuacaagaucugccucuccggcgacggcuggcccuacaucgccucccgcaccuccaucaccggccgcgccugggagaacaccgucgucgaccucgaguccgacggcaagccccagaaggccggcuccaacggcuccaacaagucccuccaguccgccggcuucaccgccggccucaccuacucccagcucaugacccucaaggacgccaugcuccagcucgaccccaacaccaagaccuggauggacaucgagggccgccccgaggaccccgucgaggucgcccucuaccagcccuccuccggcugcuacauccacuucuuccgcgagcccaccgaccucaagcaguucaagcaggacgccaaguacucccacggcaucgacgucaccgaccucuucgccgcccagcccggccucaccuccgccgucaucgacgcccucccccgcaacauggucaucaccugccagggcuccgacgacauccgcaagcuccucgagucccagggccgcaaggacaucaagcucaucgacaucgcccucuccaagaccgacucccgcaaguacgagaacgccgucugggaccaguacaaggaccucugccacaugcacaccggcaucgucgucgagaagaagaagcgcggcggcaaggaggagaucaccccccacugcgcccucauggacugcaucauguucgacgccgccgucuccggcggccucaacaccuccguccuccgcgccguccucccccgcgacauggucuuccgcaccuccaccccccgcgucguccucuga

SEQ ID NO: 8479 - RNA, 1710 nt, Artificial Sequence
  derived and/or modified CDS sequence (opt2) from LASV(G2315-SLE-2012;Clade IV)__AIT17267__NP
auguccgccuccaaggagaucaaguccuuccucuggacccagucccuccgccgcgagcucuccggcuacugcuccaacaucaagcuccaggucgucaaggacgcccaggcccuccuccacggccucgacuucuccgaggucuccaacguccagcgccucaugcgcaaggagcgccgcgacgacaacgaccucaagcgccuccgcgaccucaaccaggccgucaacaaccucgucgagcucaaguccacccagcagaaguccguccuccgcgucggcacccucaccuccgacgaccuccucauccucgccgccgaccucgagaagcucaaguccaaggucacccgcaccgagcgcccccucuccgccggcgucuacaugggcaaccucuccucccagcagcucgaccagcgccgcgcccuccucaacaugaucggcauguccggcggcaaccagggcgcccgcgccggccgcgacggcgucguccgcgucugggacgucaagaacgccgagcuccucaacaaccaguucggcaccaugcccucccucacccucgccugccucaccaagcagggccaggucgaccucaacgacgccguccaggcccucaccgaccucggccucaucuacaccgccaaguaccccaacaccuccgaccucgaccgccucacccagucccaccccauccucaacaugaucgacaccaagaaguccucccucaacaucuccggcuacaacuucucccucggcgccgccgucaaggccggcgccugcaugcucgacggcggcaacaugcucgagaccaucaaggucuccccccagaccauggacuccauccucaaguccauccucaaggucaagaaggcccucggcauguucaucuccgacacccccggcgagcgcaaccccuacgagaacauccucuacaagaucugccucuccggcgacggcuggcccuacaucgccucccgcaccuccaucaccggccgcgccugggagaacaccgucgucgaccucgaguccgacggcaagccccagaaggccggcuccaacaacuccaacaagucccuccaguccgccggcuucgccgccggccucaccuacucccagcucaugacccucaaggacgccaugcuccagcucgaccccaacgccaagaccuggauggacaucgagggccgccccgaggaccccgucgagaucgcccucuaccagcccuccuccggcugcuacauccacuucuuccgcgagcccaccgaccucaagcaguucaagcaggacgccaaguacucccacggcaucgacgucaccgaccucuucgccgcccagcccggccucaccuccgccgucaucgacgcccucccccgcaacauggucaucaccugccagggcuccgacgacauccgcaagcuccucgagucccagggccgcaaggacaucaagcucaucgacaucgcccucuccaagaccgacucccgcaaguacgagaacgccgucugggaccaguacaaggaccucugccacaugcacaccggcgucgucgucgagaagaagaagcgcggcggcaaggaggagaucaccccccacugcgcccucauggacugcaucauguucgacgccgccgucuccggcggccucaacaccuccguccuccgcgccguccucccccgcgacauggucuuccgcaccaccaccccccgcgucguccucuga

SEQ ID NO: 8480 - RNA, 1710 nt, Artificial Sequence
  derived and/or modified CDS sequence (opt2) from LASV(G2318-SLE-2012;Clade IV)__AIT17271__NP
auguccgccuccaaggagaucaaguccuuccucuggacccagucccuccgccgcgagcucuccggcuacugcuccaacaucaagcuccaggucgucaaggacgcccaggcccuccuccacggccucgacuucuccgaggucuccaacguccagcgccucaugcgcaaggagcgccgcgacgacaacgaccucaagcgccuccgcgaccucaaccaggccgucaacaaccucgucgagcucaaguccacccagcagaaguccauccuccgcgucggcacccucaccuccgacgaccuccucauccucgccgccgaccucgagaagcucaaguccaaggucacccgcaccgagcgcccccucuccgccggcgucuacaugggcaaccucuccucccagcagcucgaccagcgccgcgcccuccucaacaugaucggcauguccggcggcaaccagggcgcccgcgccggccgcgacggcgucguccgcgucugggacgucaagaacgccgagcuccucaacaaccaguucggcaccaugcccucccucacccucgccugccucaccaagcagggccaggucgaccucaacgacgccguccaggcccucaccgaccucggccucaucuacaccgccaaguaccccaacaccuccgaccucgaccgccucacccagucccaccccauccucaacaugaucgacaccaagaaguccucccucaacaucuccggcuacaacuucucccucggcgccgccgucaaggccggcgccugcaugcucgacggcggcaacaugcucgagaccaucaaggucuccccccagaccauggacggcauccucaagaccauccucaaggucaagaaggcccucggcauguucaucuccgacacccccggcgagcgcaaccccuacgagaacauccucuacaagaucugccucuccggcgacggcuggcccuacaucgccucccgcaccuccaucaccggccgcgccugggagaacaccgucgucgaccucgaguccgacggcaagccccagaagaccggcuccaacaacuccaacaagucccuccaguccgccggcuucgccgccggccucaccuacucccagcucaugacccucaaggacgccaugcuccagcucgaccccaacgccaagaccuggauggacaucgagggccgccccgaggaccccgucgagaucgcccucuaccagcccuccuccggcugcuacauccacuucuuccgcgagcccaccgaccucaagcaguucaagcaggacgccaaguacucccacggcaucgacgucaccgaccucuucgccgcccagcccggccucaccuccgccgucaucgacgcccucccccgcaacauggucaucaccugccagggcuccgacgacauccgcaagcuccucgagucccagggccgcaaggacaucaagcucaucgacaucgcccucuccaaggccgacucccgcaaguacgagaacgccgucugggaccaguacaaggaccucugccacaugcacaccggcgucgucgucgagaagaagaagcgcggcggcaaggaggagaucaccccccacugcgcccucauggacugcaucauguacgacgccgccgucuccggcggccucuccaccuccguccuccgcgccguccucccccgcgacauggucuuccgcaccuccaccccccgcgucguccucuga

SEQ ID NO: 8481 - RNA, 1710 nt, Artificial Sequence
  derived and/or modified CDS sequence (opt2) from LASV(G2363-SLE-2012;Clade IV)__AIT17275__NP
auguccgccuccaaggagaucaaguccuuccucuggacccagucccuccgccgcgagcucuccggcuacugcuccaacaucaagcuccaggucgucaaggacgcccaggcccuccuccacggccucgacuucuccgaggucuccaacguccagcgccucaugcgcaagcagcgccgcgacgacggcgaccucaagcgccuccgcgaccucaaccaggccgucaacaaccucgucgagcucaaguccacccagcagaaguccguccuccgcgucggcacccucaccuccgacgaccuccucacccucgccgccgaccucgagaagcucaaguccaaggucacccgcaccgagcgcccccucuccgccggcgucuacaugggcaaccucuccucccagcagcucgaccagcgccgcgcccuccucaacaugaucggcauguccggcggcaaccagggcgcccgcaccggcaaggacggcgucguccgcaucugggacgucaagaacgccgaccuccucaacaaccaguucggcaccaugcccucccucacccucgccugccucaccaagcagggccaggucgaccucaacgacgucguccaggcccucaccgaccucggccucaucuacaccgccaaguaccccaacaucuccgaccucgaccgccucgcccagucccaccccauccucaagaugaucgacaccuccaaguccucccucaacaucuccggcuacaacuucucccucggcgccgccgucaaggccggcgccugcaugcucgacggcggcaacaugcucgagaccgucaaggucuccccccagaccauggacggcauccucaaguccauccucaaggucaagaagucccucggcauguucaucuccgacacccccggcgagcgcaaccccuacgagaacauccucuacaagaucugccucuccggcgacggcuggcccuacaucgccucccgcaccuccaucaccggccgcgccugggagaacaccgucgucgaccucgaguccgacggcaagccccagaaggucggcuccaacaacuccaacaagucccuccaguccaccggcuucaccgccggccucaccuacucccagcucaugacccucaaggacgccaugcuccagcucgaccccaacgccaagaccuggauggacaucgagggccgccccgaggaccccgucgagaucgcccucuaccagcccuccuccggcugcuacauccacuucuuccgcgagcccaccgaccucaagcaguucaagcaggacgccaaguacucccacggcaucgacgucaccgaccucuucgccgcccagcccggccucaccuccgccgucaucgacacccucccccgcaacauggucaucaccugccagggcuccgacgacaucggcaagcuccucgagucccagggccgcaaggacaucaagcucaucgacaucgcccucuccaagaccgacucccgcaaguacgagaacgccgucugggaccaguacaaggaccucugccacaugcacaccggcgucgucgucgagaagaagaagcgcggcggcaaggaggagaucaccccccacugcgcccucauggacugcaucauguucgacgccgccgucuccggcggccucaacgccuccguccuccgcgccguccucccccgcgacauggucuuccgcaccuccaccccccgcgucguccucuga

SEQ ID NO: 8482 - RNA, 1710 nt, Artificial Sequence
  derived and/or modified CDS sequence (opt2) from LASV(G2384-SLE-2012;Clade IV)__AIT17277__NP
auguccgccuccaaggagaucaaguccuuccucuggacccagucccuccgccgcgagcucuccuccuacugcuccaacaucaagcuccaggucgucaaggacgcccaggcccuccuccacggccucgacuucuccgaggucuccaacguccagcgccucaugcgcaaggagcgccgcgacgacaacgaccucaagcgccuccgcgaccucaaccaggccgucaacaaccucgucgagcucaaguccacccagcagaaguccauccuccgcgucggcacccucaccuccgacgaccuccucauccucgccgccgaccucgagaagcucaaguccaaggucacccgcaccgagcgcccccucuccgccggcgucuacaugggcaaccucuccucccagcagcucgaccagcgccgcgcccuccucuccaugaucggcauguccggcuccaaccagggcgcccgcgccggccgcgacggcgucguccgcgucugggacgucaagaacgccgagcuccucaacaaccaguucggcaccaugcccucccucacccucgccugccucaccaagcagggccaggucgaccucaacgacgccguccaggcccucaccgaccucggccucaucuacaccgccaaguaccccaacaccuccgaccucgaccgccucacccagucccaccccauccucaacaugaucgacaccaagaaguccucccucaacaucuccggcuacaacuucucccucggcgccgccgucaaggccggcgccugcaugcucgacggcggcaacaugcucgagaccaucaaggucuccccccagaccauggacggcauccucaaguccauccucaaggucaagaaggcccucggcauguucaucuccgacacccccggcgagcgcaaccccuacgagaacauccucuacaagaucugccucuccggcgacggcuggcccuacaucgccucccgcaccuccaucaccggccgcgccugggagaacaccgucgucgaccucgaguccgacggcaagccccagaaggccggcuccaacaacuccaacaagucccuccaguccgccggcuucaccgccggccucaccuacucccagcucaugacccucaaggacgccaugcuccagcucgaccccaacgccaagaccuggauggacaucgagggccgccccgaggaccccgucgaggucgcccucuaccagcccuccuccggcugcuacauccacuucuuccgcgagcccaccgaccucaagcaguucaagcaggacgccaaguacucccacggcaucgacgucaccgaccucuucgccgcccagcccggccucaccuccgccgucaucgacgcccucccccgcaacauggucaucaccugccagggcuccgacgacauccgcaagcuccucgagucccagggccgcaaggacaucaagcucaucgacaucgcccucuccaagaccgacucccgcaaguacgagaacgccgucugggaccaguacaaggaccucugccacaugcacaccggcgucgucgucgagaagaagaagcgcggcggcaaggaggagaucaccccccacugcgcccucauggacugcaucauguucgacgccgccgucuccggcggccucaacaccuccguccuccgcgccguccucccccgcgacauggucuuccgcaccuccaccccccgcgucguccucuga

SEQ ID NO: 8483 - RNA, 1710 nt, Artificial Sequence
  derived and/or modified CDS sequence (opt2) from LASV(G2392-SLE-2012;Clade IV)__AIT17281__NP
auguccgccuccaaggagaucaaguccuuccucuggacccagucccuccgccgcgagcucuccggcuacugcuccaacaucaagcuccaggucgucaaggacgcccaggcccuccuccacggccucgacuucuccgaggucuccaacguccagcgccucaugcgcaaggagcgccgcgacgacuccgaccucaagcgccuccgcgaccucaaccaggccgucaacaaccucgucgagcucaaguccacccagcagaaguccguccuccgcgucggcacccucaccuccgacgaccuccucguccucgccgccgaccucgagaagcucaaguccaaggucacccgcaccgagcgcccccucuccgccggcgucuacaugggcaaccucuccucccagcagcucgaccagcgccgcgcccuccucuccaugaucggcauguccggcggcaaccagggcgcccgcgccggccgcgacggcgucguccgcaucugggacgucaagaacgccgagcuccucaacaaccaguucggcaccaugcccucccucacccucgccugccucaccaagcagggccaggucgaccucaacgacgucguccaggcccucaccgaccucggccucaucuacaccgccaaguaccccaacaccuccgaccucgaccgccucacccagucccaccccauccucaacaugaucgacaccaagaaguccucccucaacaucuccggcuacaacuucucccucggcgccgccgucaaggccggcgccugcaugcucgacggcggcaacaugcucgagaccaucaaggucuccccccagaccauggacggcauccucaaguccauccucaaggucaagaaggcccucggcauguucaucuccgacacccccggcgagcgcaaccccuacgagaacauccucuacaagaucugccucuccggcgacggcuggcccuacaucgccucccgcaccuccaucaccggccgcgccugggagaacaccaucgucgaccucgaguccgacggcaagccccagaagaccuccaccaccaacuccaacaagucccuccaguccgccggcuucgccgccggccucaccuacucccagcucaugacccucaaggacgccaugcuccagcucgaccccaacgccaagaccuggauggacaucgagggccgccccgaggaccccgucgagaucgcccucuaccagcccuccuccggcugcuacauccacuucuuccgcgagcccaccgaccucaagcaguucaagcaggacgccaaguacucccacggcaucgacgucaccgaccucuucgccgcccagcccggccucaccuccgccgucaucgacacccucccccgcaacauggucaucaccugccagggcuccgaggacauccgccgccuccucgagucccagggccgcaaggacaucaagcucaucgacaucgcccucuccaagaccgacucccgcaaguacgagaacgccgucugggaccaguacaaggaccucugccacaugcacaccggcgucgucgucgagaagaagaagaagggcggcaaggaggagaucaccccccacugcgcccucauggacugcaucauguucgacgccgccgucuccggcggccucaacaccuccguccuccgcgccguccucccccgcgacauggucuuccgcaccuccaccccccgcgucguccucuga

SEQ ID NO: 8484 - RNA, 1710 nt, Artificial Sequence
  derived and/or modified CDS sequence (opt2) from LASV(G2405-SLE-2012;Clade IV)__AIT17285__NP
auguccgccuccaaggagaucaaguccuuccucuggacccagucccuccgccgcgagcucuccggcuacugcuccaacaucaagcuccaggucgucaaggacgcccaggcccuccuccacggccucgacuucuccgaggucuccaacguccagcgcuccaugcgcaaggagcgccgcgacgacaacgaccucaagcgccuccgcgaccucaaccaggccgucaacaaccucgucgagcucaaguccacccagcagaaguccauccuccgcgucggcacccucaccuccgacgaccuccucauccucgccgccgaccucgagaagcucaaguccaaggucacccgcaccgagcgcccccucuccgccggcgucuacaugggcaaccucuccucccagcagcucgaccagcgccgcgcccuccucaacaugaucggcauguccggcuccaaccagggcgcccgcgccggccgcgacggcgucguccgcgucugggacgucaagaacgccgagcuccucaacaaccaguucggcaccaugcccucccucacccucgccugccucaccaagcagggccaggucgaccucaacgacgucguccaggcccucaccgaccucggccucaucuacaccgccaaguaccccaacgccuccgaccucgaccgccucacccagucccaccccauccucaacaugaucgacaccaagaaguccucccucaacaucuccggcuacaacuucucccucggcgccgccgucaaggccggcgccugcaugcucgacggcggcaacaugcucgagaccaucaaggucuccccccagaccauggacggcauccucaaguccauccucaaggucaagaaggcccucggcauguucaucuccgacacccccggcgagcgcaaccccuacgagaacauccucuacaagaucugccucuccggcgacggcuggcccuacaucgccucccgcaccuccaucaccggccgcgccugggagaacaccaucgucgaccucgaguccgacggcaagccccagaaggccggcaacaacggcuccaacaagucccuccaguccgccggcuucaccgccggccucaccuacucccagcucaugacccucaaggacgccaugcuccagcucgaccccaacgccaagaccuggauggacaucgagggccgccccgaggaccccgucgagaucgcccucuaccagcccuccuccggcugcuacauccacuucuuccgcgagcccaccgaccucaagcaguucaagcaggacgccaaguacucccacggcaucgacgucaccgaccucuucgccgcccagcccggccucaccuccgccgucaucgacgcccucccccgcaaccucgucaucaccugccagggcuccgacgacauccgcaagcuccucgagucccagggccgcaaggacaucaagcucaucgacaucgcccucuccaagaccgacucccgcaaguacgagaacgccgucugggaccaguacaaggaccucugccacaugcacaccggcaucgucgucgagaagaagaagcgcggcggcaaggaggagaucaccccccacugcgcccucauggacugcaucauguucgacgccgccgucuccggcggccucaacaccuccguccuccgcgccguccucccccgcgacauggucuuccgcaccuccaccccccgcgucguccucuga

SEQ ID NO: 8485 - RNA, 1710 nt, Artificial Sequence
  derived and/or modified CDS sequence (opt2) from LASV(G2427-SLE-2012;Clade IV)__AIT17289__NP
auguccgccuccaaggagaucaaguccuuccucuggacccagucccuccgccgcgagcucuccggcuacugcuccaacaucaagcuccaggucgucaaggacgcccaggcccuccuccacggccucgacuucuccgaggucuccaacguccagcgccucaugcgcaaggagcgccgcgacgacuccgaccucaagcgccuccgcgaccucaaccaggccgucaacaaccucgucgagcucaaguccacccagcagaaguccguccuccgcgucggcacccucaccuccgacgaccuccucguccucgccgccgaccucgagaagcucaaguccaaggucacccgcaccgagcgcccccucuccgccggcgucuacaugggcaaccucuccucccagcagcucgaccagcgccgcgcccuccucuccaugaucggcauguccggcggcaaccagggcguccgcgccggccgcgacggcgucguccgcaucugggacgucaagaacgccgagcuccucaacaaccaguucggcaccaugcccucccucacccucgccugccucaccaagcagggccaggucgaccucaacgacgucguccaggcccucaccgaccucggccucaucuacaccgccaaguaccccaacaccuccgaccucgaccgccucacccagucccaccccauccucaacaugaucgacaccaagaaguccucccucaacaucuccggcuacaacuucucccucggcgccgccgucaaggccggcgccugcaugcucgacggcggcaacaugcucgagaccaucaaggucuccccccagaccauggacggcauccucaaguccauccucaaggucaagaaggcccucggcauguucaucuccgacacccccggcgagcgcaaccccuacgagaacauccucuacaagaucugccucuccggcgacggcuggcccuacaucgccucccgcaccuccaucaccggccgcgccugggagaacaccaucgucgaccucgaguccgacggcaagccccagaagaccggcuccaucaacuccaacaagucccuccaguccaccggcuucgccgccggccucaccuacucccagcucaugacccucaaggacgccaugcuccagcucgaccccaacgccaagaccuggauggacaucgagggccgccccgaggaccccgucgagaucgcccucuaccagcccuccuccggcugcuacauccacuucuuccgcgagcccaccgaccucaagcaguucaagcaggacgccaaguacucccacggcaucgacgucaccgaccucuucgccgcccagcccggccucaccuccgccgucaucgacgcccucccccgcaacauggucaucaccugccagggcuccgacgacauccgcaagcuccucgagucccagggccgcaaggacaucaagcucaucgacaucgcccucuccaagaccgacucccgcaaguacgagaacgccgucugggaccaguacaaggaccucugccacaugcacaccggcaucgucgucgagaagaagaagcgcggcggcaaggaggagaucaccccccacugcgcccucauggacugcaucauguucgacgccgccgucuccggcggccucaacaccuccguccuccgcgccguccucccccgcgacauggucuuccgcaccuccaccccccgcgucguccucuga

SEQ ID NO: 8486 - RNA, 1710 nt, Artificial Sequence
  derived and/or modified CDS sequence (opt2) from LASV(G2431-SLE-2012;Clade IV)__AIT17293__NP
auguccgccuccaaggagaucaaguccuuccucuggacccagucccuccgccgcgagcucuccggcuacugcuccaacaucaagcuccaggucgucaaggacgcccaggcccuccuccacggccucgacuucuccgaggucuccaacguccagcgccucaugcgcaagcagcgccgcgacgacaacgaccucaagcgccuccgcgaccucaaccaggccgucaacaaccucgucgagcucaaguccacccagcagaaguccguccuccgcgucggcacccucaccuccgacgaccuccucguccucgccgccgaccucgagaagcucaaguccaaggucacccgcaccgagcgcccccucuccgccggcgucuacaugggcaaccucuccacccagcagcucgaccagcgccgcgcccuccucaacaugaucggcauguccggcggcaaccagggcgcccgcgccggccgcgacggcgucguccgcgucugggacgucaagaacgccgaccuccucaacaaccaguucggcaccaugcccucccucacccucgccugccucaccaagcagggccaggucgaccucaacgacgucguccaggcccucaccgaccucggccucaucuacaccgccaaguaccccaacaccuccgaccucgaccgccucacccagucccaccccauccucaacaugaucgacaccaacaaguccucccucaacaucuccggcuacaacuucucccucggcgccgccgucaaggccggcgccugcaugcucgacggcggcaacaugcucgagaccaucaaggucuccccccagaccauggacggcauccucaaguccauccucaaggucaagaaggcccucggcauguucaucuccgacacccccggcgagcgcaaccccuacgagaacauccucuacaagaucugccucuccggcgacggcuggcccuacaucgccucccgcaccuccaucaccggccgcgccugggagaacaccgucgucgaccucgaguccgacggcaagccccagaaggccggcggcaacaacuccaacaagucccuccaguccgccggcuucaccgccggccucaccuacucccagcucaugacccucaaggacgccaugcuccagcucgaccccaacgccaagaccuggauggacaucgagggccgccccgaggaccccgucgagaucgcccucuaccagcccuccuccggcugcuacauccacuucuuccgcgagcccaccgaccucaagcaguucaagcaggacgccaaguacucccacggcaucgacgucaccgaccucuucgccgcccagcccggccucaccuccgccgucaucgacgcccucccccgcaacauggucaucaccugccagggcuccgacgacauccgcaagcuccucgagucccagggccgcaaggacaucaagcucaucgacaucgcccucuccaagaccgacucccgcaaguacgagaacgccgucugggaccaguacaaggaccucugcaacaugcacaccggcaucgucgucgagaagaagaagcgcggcggcaaggaggagaucaccccccacugcgcccucauggacugcaucauguucgacgccgccgucuccggcggcaugaacaccuccguccuccgcgccguccucccccgcgacauggucuuccgcaccuccaccccccgcgucguccucuga

SEQ ID NO: 8487 - RNA, 1710 nt, Artificial Sequence
  derived and/or modified CDS sequence (opt2) from LASV(G2511-SLE-2012;Clade IV)__AIT17295__NP
auguccgccuccaaggagaucaaguccuuccucuggacccagucccuccgccgcgagcucuccggcuacugcuccaacaucaagcuccaggucgucaaggacgcccaggcccuccuccacggccucgacuucuccgaggucuccaacguccagcgccucaugcgcaaggagcgccgcgacgacaacgaccucaagcgccuccgcgaccucaaccaggccgucaacaaccucgucgagcucaaguccacccagcagaaguccguccuccgcgucggcacccucaccuccgacgaccuccucauccucgccgccgaccucgagaagcucaaguccaaggucauccgcaccgagcgcccccucuccgccggcgucuacaugggcaaccucuccucccagcagcucgaccagcgccgcgcccuccucaacaugaucggcaugggcggcuccaaccagggcgcccgcgccggccgcgacggcgucguccgcgucugggacgucaagaacgccgagcuccucaacaaccaguucggcaccaugcccucccucacccucgccugccucaccaagcagggccaggucgaccucaacgacgccguccaggcccucaccgaccucggccucaucuacaccgccaaguaccccaacaccuccgaccucgaccgccucacccagucccaccccauccucaacaugaucgacaccaagaaguccucccucaacaucuccggcuacaacuucucccucggcgccgccgucaaggccggcgccugcaugcucgacggcggcaacaugcucgagaccaucaaggucuccccccagaccauggacggcauccucaaguccauccucaaggucaagaaggcccucggcauguucaucuccgacacccccggcgagcgcaaccccuacgagaacauccucuacaagaucugccucuccggcgacggcuggcccuacaucgccucccgcaccuccaucaccggccgcgccugggagaacaccaucgucgaccucgaguccgacggcaagccccagaaggccggcuccaacggcuccaacaagucccuccaguccgccggcuucaccgccggccucaccuacucccagcucaugacccucaaggacgccaugcuccagcucgaccccaacgccaagaccuggauggacaucgagggccgccccgaggaccccgucgagaucgcccucuaccagcccuccuccggcugcuacauccacuucuuccgcgagcccaccgaccucaagcaguucaagcaggacgccaaguacucccacggcaucgacgucaccgaccucuucgccgcccagcccggccucaccuccgccaucaucgacgcccucccccgcaacauggucaucaccugccagggcuccgacgacauccgcaagcuccucgagucccagggccgcaaggacaucaagcucaucgacaucgcccucuccaagaccgacucccgcaaguacgagaacgccgucugggaccaguacaaggaccucugccacaugcacaccggcaucgucgucgagaagaagaagcgcggcggcaaggaggagaucaccccccacugcgcccucauggacugcaucauguucgacgccgccgucuccggcggccucaacaccuccguccuccgcgccguccucccccgcgacauggucuuccgcaccuccaccccccgcgucguccucuga

SEQ ID NO: 8488 - RNA, 1710 nt, Artificial Sequence
  derived and/or modified CDS sequence (opt2) from LASV(G2554-SLE-2012;Clade IV)__AIT17299__NP
auguccgccuccaaggagaucaaguccuuccucuggacccagucccuccgccgcgagcucuccggcuacugcuccaacaucaagcuccaggucgucaaggacgcccaggcccuccuccacggccucgacuucuccgaggucuccaacguccagcgccucaugcgcaaggagcgccgcgacgacaacgaccucaagcgccuccgcgaccucaaccaggccgucaacaaccucgucgagcucaaguccacccagcagaaguccguccuccgcgucggcacccucaccuccgacgaccuccucguccucgccgccgaccucgagaagcucaaguccaaggucacccgcaccgagcgcccccucuccgccggcgucuacaugggcaaccucuccucccagcagcucgaccagcgccgcgcccuccucuccaugaucggcauguccggcggcaaccagggcgcccgcaccggccgcgacggcgucguccgcgucugggacgucaagaacgccgagcuccucaacaaccaguucggcaccaugcccucccucacccucgccugccucaccaagcagggccaggucgaccucaacgacgucguccaggcccucaccgaccucggccucaucuacaccgccaaguaccccaacaccuccgaccucgaccgccucacccagucccaccccauccucaacaugaucgacaccaagaaguccucccucaacaucuccggcuacaacuucucccucggcgccgccgucaaggccggcgccugcaugcucgacggcggcaacaugcucgagaccaucaaggucuccccccagaccauggacggcauccucaaguccauccucaaggucaagaaggcccucggcauguucaucuccgacacccccggcgagcgcaaccccuacgagaacauccucuacaagaucugccucuccggcgacggcuggcccuacaucgccucccgcaccuccaucaccggccgcgccugggagaacaccgucgucgaccucgaguccgacggcaagccccagaaggccggcuccaacaacuccaacaagucccuccaguccgccggcuucaccgccggccucaccuacucccagcucaugacccucaaggacgccaugcuccagcucgaccccaacgccaagaccuggauggacaucgagggccgccccgaggaccccgucgagaucgcccucuaccagcccuccuccggcugcuacauccacuucuuccgcgagcccuccgaccucaagcaguucaagcaggacgccaaguacucccacggcaucgacgucaccgaccucuucgccgcccagcccggccucaccuccgccgucaucgacgcccucccccgcaacauggucaucaccugccagggcuccgacgacauccgcaagcucuucgagucccagggccgcaaggacaucaagcucaucgacaucgcccucuccaagaccgacucccgcaaguacgagaacgccgucugggaccaguacaaggaccucugccacaugcacaccggcgucgucgucgagaagaagaagcgcggcggcaaggaggagaucaccccccacugcgcccucauggacugcaucauguucgacgccgccgucuccggcggccucaacucccucguccuccgcgccguccucccccgcgacauggucuuccgcaccuccaccccccgcgucguccucuga

SEQ ID NO: 8489 - RNA, 1710 nt, Artificial Sequence
  derived and/or modified CDS sequence (opt2) from LASV(G2557-SLE-2012;Clade IV)__AIT17303__NP
auguccgccuccaaggagaucaaguccuuccucuggacccagucccuccgccgcgagcucuccggcuacugcuccaacaucaagcuccaggucgucaaggacgcccaggcccuccuccacggccucgacuucuccgaggucuccaacguccagcgccucaugcgcaagcagcgccgcgacgacuccgaccucaagcgccuccgcgaccucaaccaggccgucaacaaccucgucgagcucaaguccacccagcagaaguccguccuccgcgucggcacccucaccuccgacgaccuccucguccucgccgccgaccucgagaagcucaaguccaaggucauccgcaccgagcgcccccucuccuccggcgucuacaugggcaaccucuccucccagcagcucgaccagcgccgcgcccuccucaacaugaucggcauguccggcggcaaccagggcgcccaggucggccgcgacggcgucguccgcgucugggacgucaagaacgccgaccuccucaacaaccaguucggcaccaugcccucccucacccucgccugccucaccaagcagggccaggucgaccucaacgacgucguccaggcccucaccgaccucggccucaucuacaccgccaaguaccccaacaccuccgaccucgaccgccucguccagucccaccccauccucaacaugaucgacaccaagaaguccucccucaacaucuccggcuacaacuucucccucggcgccgccgucaaggccggcgccugcaugcucgacggcggcaacaugcucgagaccaucaaggucuccccccagaccauggacggcauccucaaguccauccucaaggucaagaaggcccucggcauguucaucuccgagacccccggcgagcgcaaccccuacgagaacauccucuacaagaucugccucuccggcgacggcuggcccuacaucgccucccgcaccuccaucaccggccgcgccugggagaacaccaucgucgaccucgaguccgacggcaagccccagaaggccggcuccaacaacuccaacaagucccuccaguccgccggcuucaccgccggccucaccuacucccagcucaugacccucaaggacuccaugcuccagcucgaccccaacgccaagaccuggauggacaucgagggccgccccgaggaccccgucgaggucgcccucuaccagcccuccuccggcugcuacauccacuucuuccgcgagcccaccgaccucaagcaguucaagcaggacgccaaguacucccacggcaucgacgucaccgaccucuucgccgcccagcccggccucaccuccgccgucaucgaggcccucccccgcaacauggucaucaccugccagggcuccgacgacauccgcaagcuccucgagucccagggccgcaaggacaucaagcucaucgacaucgcccucaacaagaccgacucccgcaaguacgagaacgccgucugggaccaguacaaggaccucugccacaugcacaccggcgucgucgucgagaagaagaagcgcggcggcaaggaggagaucaccccccacugcgcccucauggacugcaucauguucgacgccgccgucuccggcggccucaagacccucguccuccgcgccguccucccccgcgacauggucuuccgcaccuccacccccaaggucguccucuga

SEQ ID NO: 8490 - RNA, 1710 nt, Artificial Sequence
  derived and/or modified CDS sequence (opt2) from LASV(G2565-SLE-2012;Clade IV)__AIT17307__NP
auguccgccuccaaggagaucaaguccuuccucuggacccagucccuccgccgcgagcucuccggcuacugcuccaacaucaagcuccaggucgucaaggacgcccaggcccuccuccacggccucgacuucuccgaggucuccaacguccagcgccucaugcgcaaggagcgccgcgacgacaacgaccucaagcgccuccgcgaccucaaccaggccgucaacaaccucgucgagcucaaguccacccagcagaaguccguccuccgcgucggcacccucaccuccgacgaccuccucauccucgccgccgaccucgagaagcucaaguccaaggucacccgcaccgagcgcccccucuccgccggcgucuacaugggcaaccucuccucccagcagcucgaccagcgccgcgcccuccucuccaugaucggcauguccggcggcaaccagggcgcccgcaccggccgcgacggcgucguccgcgucugggacgucaagaacgccgagcuccucaacaaccaguucggcaccaugcccucccucacccucgccugccucaccaagcagggccaggucgaccucaacgacgucguccaggcccucaccgaccucggccucaucuacaccgccaaguaccccaacaccuccgaccucgaccgccucacccagucccaccccauccucaacaugaucgacaccaagaaguccucccucaacaucuccggcuacaacuucucccucggcgccgccgucaaggccggcgccugcaugcucgacggcggcaacaugcucgagaccaucaaggucuccccccagaccauggacggcauccucaaguccauccucaaggucaagaaggcccucggcauguucaucuccgacacccccggcgagcgcaaccccuacgagaacauccucuacaagaucugccucuccggcgacggcuggcccuacaucgccucccgcaccuccaucaccggccgcgccugggagaacaccgucgucgaccucgaguccgacggcaagcuccagaagaccggcuccaacaacuccaacaagucccuccaguccgccggcuucaccgccggccucaccuacucccagcucaugacccucaaggacgccaugcuccagcucgaccccaacgccaagaucuggauggacaucgagggccgccccgaggaccccgucgagaucgcccucuaccagcccuccuccggcugcuacauccacuucuuccgcgagcccaccgaccucaagcaguucaagcaggacgccaaguacucccacggcaucgacgucaccgaccucuucgccgcccagcccggccucaccuccgccgucaucgacgcccucccccgcaacauggucaucaccugccagggcuccgacgacauccgcaagcuccucgagucccagggccgcaaggacaucaagcucaucgacaucgcccucaacaagaccgacucccgcaaguacgagaacgccgucugggaccaguacaaggaccucugccacaugcacaccggcgucgucgucgagaagaagaagaagggcggcaaggaggagaucaccccccacugcgcccucauggacugcaucauguucgacgccgccgucuccggcggccucaacaccuccguccuccgcgccguccucccccgcgacauggucuuccgcaccuccaccccccgcgucguccucuga

SEQ ID NO: 8491 - RNA, 1710 nt, Artificial Sequence
  derived and/or modified CDS sequence (opt2) from LASV(G2587-SLE-2012;Clade IV)__AIT17311__NP
auguccgccuccaaggagaucaaguccuuccucuggacccagucccuccgccgcgagcucuccggcuacugcuccaacaucaagcuccaggucgucaaggacgcccaggcccuccuccacggccucgacuucuccgaggucuccaacguccagcgccucaugcgcaaggagcgccgcgacgacaacgaccucaagcgccuccgcgaccucaaccaggccgucaacaaccucgucgagcucaaguccacccagcagaaguccguccuccgcgucggcacccucaccuccgacgaccuccucauccucgccgccgaccucgagaagcucaaguccaaggucauccgcaccgagcgcccccucuccgccggcgucuacaugggcaaccucuccucccagcagcucgaccagcgccgcgcccuccucaacaugaucggcaugggcggcuccaaccagggcgcccgcgccggccgcgacggcgucguccgcgucugggacgucaagaacgccgagcuccucaacaaccaguucggcaccaugcccucccucacccucgccugccucaccaagcagggccaggucgaccucaacgacgccguccaggcccucaccgaccucggccucaucuacaccgccaaguaccccaacaccuccgaccucgaccgccucacccagucccaccccauccucaacaugaucgacaccaagaaguccucccucaacaucuccggcuacaacuucucccucggcgccgccgucaaggccggcgccugcaugcucgacggcggcaacaugcucgagaccaucaaggucuccccccagaccauggacggcauccucaaguccauccucaaggucaagaaggcccucggcauguucaucuccgacacccccggcgagcgcaaccccuacgagaacauccucuacaagaucugccucuccggcgacggcuggcccuacaucgccucccgcaccuccaucaccggccgcgccugggagaacaccgucgucgaccucgaguccgacggcaagccccagaaggccggcuccaacggcuccaacaagucccuccaguccgccggcuucaccgccggccucaccuacucccagcucaugacccucaaggacgccaugcuccagcucgaccccaacgccaagaccuggauggacaucgagggccgccccgaggaccccgucgaggucgcccucuaccagcccuccuccggcugcuacauccacuucuuccgcgagcccaccgaccucaagcaguucaagcaggacgccaaguacucccacggcaucgacgucaccgaccucuucgccgcccagcccggccucaccuccgccgucaucgacgcccucccccgcaacauggucaucaccugccagggcuccgacgacauccgcaagcuccucgagucccagggccgcaaggacaucaagcucaucgacaucgcccucuccaagaccgacucccgcaaguacgagaacgccgucugggaccaguacaaggaccucugccacaugcacaccggcaucgucgucgagaagaagaagcgcggcggcaaggaggagaucaccccccacugcgcccucauggacugcaucauguucgacgccgccgucuccggcggccucaacaccuccguccuccgcgccguccucccccgcgacauggucuuccgcaccuccaccccccgcgucguccucuga

SEQ ID NO: 8492 - RNA, 1710 nt, Artificial Sequence
  derived and/or modified CDS sequence (opt2) from LASV(G2612-SLE-2012;Clade IV)__AIT17315__NP
auguccgccuccaaggagaucaaguccuuccucuggacccagucccuccgccgcgagcucuccggcuacugcuccaacaucaagcuccaggucgucaaggacgcccaggcccuccuccacggccucgacuucuccgaggucuccaacguccagcgccucaugcgcaaggagcgccgcgacgacaacgaccucaagcgccuccgcgaccucaaccaggccgucaacaaccucgucgagcucaaguccacccagcagaaguccguccuccgcgucggcacccucaccuccgacgaccuccucauccucgccgccgaccucgagaagcucaaguccaaggucacccgcaccgagcgcccccucuccgccggcgucuacaugggcaaccucuccucccagcagcucgaccagcgccgcgcccuccucaacaugaucggcauguccggcuccaaccagggcgcccgcgccggccgcgacggcgucguccgcgucugggacgucaagaacgucgagcuccucaacaaccaguucggcaccaugcccucccucacccucgccugccucaccaagcagggccaggucgaccucaacgacgccguccaggcccucaccgaccucggccucaucuacaccgccaaguaccccaacaccuccgaccucgaccgccucacccagucccaccccauccucaacaugaucgacaccaagaaguccucccucaacaucuccggcuacaacuucucccucggcgccgccgucaaggccggcgccugcaugcucgacggcggcaacaugcucgagaccaucaaggucuccccccagaccauggacggcauccucaaguccauccucaaggucaagaaggcccucggcauguucaucuccgacacccccggcgagcgcaaccccuacgagaacauccucuacaagaucugccucuccggcgacggcuggcccuacaucgccucccgcaccuccaucaccggccgcgccugggagaacaccgucgucgaccucgaguccgacggcaagccccagaaggccggcuccaacuccuccaacaagucccuccaguccgccggcuucaccgccggccucaccuacucccagcucaugacccucaaggacgccaugcuccagcucgaccccaacgccaagaccuggauggacaucgagggccgccccgaggaccccgucgagaucgcccucuaccagcccuccuccggcugcuacauccacuucuuccgcgagcccaccgaccucaagcaguucaagcaggacgccaaguacucccacggcaucgacgucaccgaccucuucgccgcccagcccggccucaccuccgccgucaucgacgcccucccccgcaacauggucaucaccugccagggcuccgacgacauccgcaagcuccucgagucccagggccgcaaggacaucaagcucaucgacaucgcccucuccaagaccgacucccgcaaguacgagaacgccgucugggaccaguacaaggaccucugccacaugcacaccggcaucgucgucgagaagaagaagaagggcuccaaggaggagaucaccccccacugcgcccucauggacugcaucauguucgacgccgccgucuccggcggccucaacgccuccguccuccgcgccguccucccccgcgacauggucuuccgcaccuccaccccccgcgucguccucuga

SEQ ID NO: 8493 - RNA, 1710 nt, Artificial Sequence
  derived and/or modified CDS sequence (opt2) from LASV(G2615-SLE-2012;Clade IV)__AIT17319__NP
auguccgccuccaaggagaucaaguccuuccucuggacccagucccuccgccgcgagcucuccggcuacugcuccaacaucaagcuccaggucgucaaggacgcccaggcccuccuccacggccucgacuucuccgaggucuccaacguccagcgccucaugcgcaagcagcgccgcgacgacuccgaccucaagcgccuccgcgaccucaaccaggccgucaacaaccucgucgagcucaaguccacccagcagaaguccguccuccgcgucggcacccucaccuccgacgaccuccucguccucgccgccgaccucgagaagcucaaguccaaggucauccgcaccgagcgcccccucuccuccggcgucuacaugggcaaccucuccucccagcagcucgaccagcgccgcgcccuccucaacaugaucggcauguccggcggcaaccagggcgcccaggucggccgcgacggcgucguccgcgucugggacgucaagaacgccgacaugcucaacaaccaguucggcaccaugcccucccucacccucgccugccucaccaagcagggccaggucgaccucaacgacgucguccaggcccucaccgaccucggccucaucuacaccgccaaguaccccaacaccuccgaccucgaccgccucgcccagucccaccccauccucaacaugaucgacaccaagaaguccucccucaacaucuccggcuacaacuucucccucggcgccgccgucaaggccggcgccugcaugcucgacggcggcaacaugcucgagaccaucaaggucuccccccagaccauggacggcauccucaaguccauccucaaggucaagaaggcccucggcauguucaucuccgagacccccggcgagcgcaaccccuacgagaacauccucuacaagaucugccucuccggcgacggcuggcccuacaucgccucccgcaccuccaucaccggccgcgccugggagaacaccaucgucgaccucgaguccgacggcaagccccagaaggccggcuccaacaacuccaacaagucccuccaguccgccggcuucaccgccggccucaccuacucccagcucaugacccucaaggacuccaugcuccagcucgaccccaacgccaagaccuggauggacaucgagggccgccccgaggaccccgucgaggucgcccucuaccagcccuccuccggcugcuacauccacuucuuccgcgagcccaccgaccucaagcaguucaagcaggacgccaaguacucccacggcaucgacgucaccgaccucuucgccgcccagcccggccucaccuccgccgucaucgaggcccucccccgcaacauggucaucaccugccagggcuccgacgacauccgcaagcuccucgagucccagggccgcaaggacaucaagcucaucgacaucguccucaacaagaccgacucccgcaaguacgagaacgccgucugggaccaguacaaggaccucugccacaugcacaccggcgucgucgucgagaagaagaagcgcggcggcaaggaggagaucaccccccacugcgcccucauggacugcaucauguucgacgccgccgucuccggcggccucaagaccaugguccuccgcgccguccucccccgcgacauggucuuccgcaccuccacccccaaggucguccucuga

SEQ ID NO: 8494 - RNA, 1710 nt, Artificial Sequence
  derived and/or modified CDS sequence (opt2) from LASV(G2723-SLE-2012;Clade IV)__AIT17323__NP
auguccgccuccaaggagaucaaguccuuccucuggacccagucccuccgccgcgagcucuccggcuacugcuccaacaucaagcuccaggucgucaaggacgcccaggcccuccuccacggccucgacuucuccgaggucuccaacguccagcgccucaugcgcaagcagcgccgcgacgacuccgaccucaagcgccuccgcgaccucaaccaggccgucaacaaccucgucgagcucaaguccacccagcagaaguccguccuccgcgucggcacccucaccuccgacgaccuccucguccucgccgccgaccucgagaagcucaaguccaaggucauccgcaccgagcgcccccucuccuccggcgucuacaugggcaaccucuccucccagcagcucgaccagcgccgcgcccuccucaacaugaucggcauguccggcggcaaccagggcgcccaggucggccgcgacggcgucguccgcgucugggacgucaagaacgccgaccuccucaacaaccaguucggcaccaugcccucccucacccucgccugccucaccaagcagggccaggucgaccucaacgacgucguccaggcccucaccgaccucggccucaucuacaccgccaaguaccccaacaccuccgaccucgaccgccucgcccagucccaccccauccucaacaugaucgacaccaagaaguccucccucaacaucuccggcuacaacuucucccucggcgccgccgucaaggccggcgccugcaugcucgacggcggcaacaugcucgagaccaucaaggucuccccccagaccauggacggcauccucaaguccauccucaaggucaagaaggcccucggcauguucaucuccgagacccccggcgagcgcaaccccuacgagaacauccucuacaagaucugccucuccggcgacggcuggcccuacaucgccucccgcaccuccaucaccggccgcgccugggagaacaccaucgucgaccucgaguccgacggcaagccccagaaggccggcuccaacaacuccaacaagucccuccaguccgccggcuucaccgccggccucaccuacucccagcucaugacccucaaggacuccaugcuccagcucgaccccaacgccaagaccuggauggacaucgagggccgccccgaggaccccgucgaggucgcccucuaccagcccuccuccggcugcuacauccacuucuuccgcgagcccaccgaccucaagcaguucaagcaggacgccaaguacucccacggcaucgacgucaccgaccucuucgccgcccagcccggccucaccuccgccgucaucgaggcccucccccgcaacauggucaucaccugccagggcuccgacgacauccgcaagcuccucgagucccagggccgcaaggacaucaagcucaucgacaucgcccucaacaagaccgacucccgcaaguacgagaacgccgucugggaccaguacaaggaccucugccacaugcacaccggcgucgucgucgagaagaagaagcgcggcggcaaggaggagaucaccccccacugcgcccucauggacugcaucauguucgacgccgccgucuccggcggccucaagacccucguccuccgcgccguccucccccgcgacauggucuuccgcaccuccacccccaaggucguccucuga

SEQ ID NO: 8495 - RNA, 1710 nt, Artificial Sequence
  derived and/or modified CDS sequence (opt2) from LASV(G2789-SLE-2012;Clade IV)__AIT17325__NP
auguccgccuccaaggagaucaaguccuuccucuggacccagucccuccgccgcgagcucuccggcuacugcuccaacaucaagcuccaggucgucaaggacgcccaggcccuccuccacggccucgacuucuccgaggucuccaacguccagcgccucaugcgcaagcagcgccgcgacgacaacgaccucaagcgccuccgcgaccucaaccaggccgucaacaaccucgucgagcucaaguccacccagcagaaguccguccuccgcgucggcacccucaccuccgacgaccuccucguccucgccgccgaccucgagaagcucaaguccaaggucacccgcaccgagcgcccccucuccgccggcgucuacaugggcaaccucuccucccagcagcucgaccagcgccgcgcccuccucaacaugaucggcaugaccggcggcucccgcggcgcccaggccggcggcgacggcgucguccgcgucugggacgucaagaacgccgaccuccucaacaaccaguucggcaccaugcccucccucacccucgccugccucaccaagcagggccaggucgaccucaacgacgucguccaggcccucaccgaccucggccucaucuacaccgccaaguaccccaacaccuccgaccucgaccgccucacccagucccaccccauccucaacaugaucgacaccaagaaguccucccucaacaucuccggcuacaacuucucccucggcgccgccgucaaggccggcgccugcaugcucgacggcggcaacaugcucgagaccaucaaggucuccccccagaccauggacggcauccucaaguccauccucaaggucaagaagucccucggcauguucaucuccgacacccccggcgagcgcaaccccuacgagaacauccucuacaagaucugccucuccggcgacggcuggcccuacaucgccucccgcaccuccaucaccggccgcgccugggagaacaccgucgucgaccucgaguccgacggcaagccccagaaggccggcggcaacaacuccaacaagucccuccaguccgccggcuucaccgccggccucaccuacucccagcucaugacccucaaggacaccaugcuccagcucgaccccaacgccaagaccuggauggacaucgagggccgccccgaggaccccgucgaggucgcccucuaccagcccuccuccggcugcuacauccacuucuuccgcgagcccaccgaccucaagcaguucaagcaggacgccaaguacucccacggcaucgacgucaccgaccucuucgccgcccagcccggccucaccuccgccgucaucgaggcccucccccgcaacauggucaucaccugccagggcuccgacgacauccgcaagcuccucgagucccagggccgcaaggacaucaagcucaucgacaucgcccucuccaaggucgacucccgcaaguacgagaacgccgucugggaccaguacaaggaccucugccacaugcacaccggcgucgucgucgagaagaagaagcgcggcggcaaggaggagaucaccccccacugcgcccucauggacugcaucauguucgacgccgccgucuccggcggccucaacacccucguccuccgcgccguccucccccgcgacauggucuuccgcaccuccacccccaaggucguccucuga

SEQ ID NO: 8496 - RNA, 1710 nt, Artificial Sequence
  derived and/or modified CDS sequence (opt2) from LASV(G2868-SLE-2012;Clade IV)__AIT17329__NP
auguccgccuccaaggagaucaaguccuuccucuggacccagucccuccgccgcgagcucuccggcuacugcuccaacaucaagcuccaggucgucaaggacgcccaggcccuccuccacggccucgacuucuccgaggucuccaacguccagcgccucaugcgcaaggagcgccgcgacgacuccgaccucaagcgccuccgcgaccucaaccagaccgucaacaaccucgucgagcucaaguccacccagcagaaguccauccuccgcgucggcacccucaccuccgacgaccuccucauccucgccgccgaccucgagaagcucaaguccaaggucauccgcaccgagcgcccccucuccgccggcgucuacaugggcaaccucuccucccagcagcucgaccagcgccgcgcccuccucaacaugaucggcauguccuccggcaaccagggcgcccaggccggccgcgacggcgucguccgcgucugggacgucaagaacgccgagcuccucaacaaccaguucggcaccaugcccucccucacccucgccugccucaccaagcagggccaggucgaccucaacgacgccguccaggcccucaccgaccucggccucaucuacaccgccaaguaccccaacaccuccgaccucgaccgccucacccagucccaccccauccucaacaugaucgacaccaagaaguccucccucaacaucuccggcuacaacuucucccucggcgccgccgucaaggccggcgccugcaugcucgacggcggcaacaugcucgagaccaucaaggucuccccccagaccauggacggcauccucaaguccauccucaaggucaagaaggcccucggcauguucaucuccgacacccccggcgagcgcaaccccuacgagaacauccucuacaagaucugccucuccggcgacggcuggcccuacaucgccucccgcaccuccaucaccggccgcgccugggagaacaccgucgucgaccucgaguccgacggcaugccccagaaggccggcuccuccuccuccaacaagucccuccaguccgccggcuucgucgccggccucaccuacucccagcucaugacccucaaggacgccaugcuccagcucgaccccaacgccaagaccuggauggacaucgagggccgccccgaggaccccgucgagaucgcccucuaccagcccuccuccggcugcuacauccacuucuuccgcgagcccaccgaccucaagcaguucaagcaggacgccaaguacucccacggcaucgacgucaccgaccucuucgccgcccagcccggccucaccuccgccgucaucgacgcccucccccgcaacauggucaucaccugccagggcuccgacgacauccgcaagcuccucgagucccagggccgcaaggacaucaagcucaucgacaucgcccucuccaaggccgacucccgcaaguacgagaacgccgucugggaccaguacaaggaccucugccacaugcacaccggcgucgucgucgagaagaagaagcgcggcggcaaggaggagaucaccccccacugcgcccucauggacugcaucauguacgacgccgccgucuccggcggccucaacaccuccguccuccgcgccguccucccccgcgacauggucuuccgcaccuccaccccccgcgucguccucuga

SEQ ID NO: 8497 - RNA, 1710 nt, Artificial Sequence
  derived and/or modified CDS sequence (opt2) from LASV(G2903-SLE-2012;Clade IV)__AIT17333__NP
auguccgccuccaaggagaucaaguccuuccucuggacccagucccuccgccgcgagcucuccggcuacugcuccaacaucaagcuccaggucgucaaggacgcccaggcccuccuccacggccucgacuucuccgaggucuccaacguccagcgccucaugcgcaaggagcgccgcgacgacaacgaccucaagcgccuccgcgaccucaaccaggccgucaacaaccucgucgagcucaaguccacccagcagaaguccguccuccgcgucggcacccucaccuccgacgaccuccucauccucgccgccgaccucgagaagcucaaguccaaggucacccgcaccgagcgcccccucuccgccggcgucuacaugggcaaccucuccucccagcagcucgaccagcgccgcgcccuccucaacaugaucggcauguccggcggcaaccagggcgcccgcgccggccgcgacggcgucguccgcgucugggacgucaagaacgccgagcuccucaacaaccaguucggcaccaugcccucccucacccucgccugccucaccaagcagggccaggucgaccucaacgacgccguccaggcccucaccgaccucggccucaucuacaccgccaaguaccccaacaccuccgaccucgaccgccucacccagucccaccccauccucaacaugaucgacaccaagaaguccucccucaacaucuccggcuacaacuucucccucggcgccgccgucaaggccggcgccugcaugcucgacggcggcaacaugcucgagaccaucaaggucuccccccagaccauggacuccauccucaaguccauccucaaggucaagaaggcccucggcauguucaucuccgacacccccggcgagcgcaaccccuacgagaacauccucuacaagaucugccucuccggcgacggcuggcccuacaucgccucccgcaccuccaucaccggccgcgccugggagaacaccgucgucgaccucgaguccgacggcaagccccagaaggccggcuccaacaacuccaacaagucccuccaguccgccggcuucgccgccggccucaccuacucccagcucaugacccucaaggacgccaugcuccagcucgaccccaacgccaagaccuggauggacaucgagggccgccccgaggaccccgucgagaucgcccucuaccagcccuccuccggcugcuacauccacuucuuccgcgagcccaccgaccucaagcaguucaagcaggacgccaaguacucccacggcaucgacgucaccgaccucuucgccgcccagcccggccucaccuccgccgucaucgacgcccucccccgcaacauggucaucaccugccagggcuccgacgacauccgcaagcuccucgagucccagggccgcaaggacaucaagcucaucgacaucgcccucuccaagaccgacucccgcaaguacgagaacgccgucugggaccaguacaaggaccucugccacaugcacaccggcaucgucgucgagaagaagaagcgcggcggcaaggaggagaucaccccccacugcgcccucauggacugcaucauguucgacgccgccgucuccggcggccucaacaccuccguccuccgcgccguccucccccgcgacauggucuuccgcaccuccaccccccgcgucguccucuga

SEQ ID NO: 8498 - RNA, 1710 nt, Artificial Sequence
  derived and/or modified CDS sequence (opt2) from LASV(G2906-SLE-2012;Clade IV)__AIT17335__NP
auguccgccuccaaggagaucaaguccuuccucuggacccagucccuccgccgcgagcucuccggcuacugcuccaacaucaagcuccaggucgucaaggacgcccaggcccuccuccacggccucgacuucuccgaggucuccaacguccagcgccucaugcgcaaggagcgccgcgacgacuccgaccucaagcgccuccgcgaccucaaccaggccgucaacaaccucgucgagcucaaguccacccagcagaaguccauccuccgcgucggcacccucaccuccgacgaccuccucauccucgccgccgaccucgagaagcucaaguccaaggucacccgcaccgagcgcccccucuccgccggcgucuacaugggcaaccucuccucccagcagcucgaccagcgccgcgcccuccucuccaugaucggcauguccuccggcguccagggcgcccgcgccggccgcgacggcgucguccgcgucugggacgucaagaacgccgagcuccucaacaaccaguucggcaccaugcccucccucacccucgccugccucaccaagcagggccaggucgaccucaacgacgucguccaggcccucaccgaccucggccucaucuacaccgccaaguaccccaacaccuccgaccucgaccgccucacccagucccaccccauccucaacaugaucgacaccaagaaguccucccucaacaucuccggcuacaacuucucccucggcgccgccgucaaggccggcgccugcaugcucgacggcggcaacaugcucgagaccaucaaggucuccccccagaccauggacggcauccucaaguccauccucaaggucaagaaggcccucggcauguucaucuccgagacccccggcgagcgcaaccccuacgagaacauccucuacaagaucugccucuccggcgacggcuggcccuacaucgccucccgcaccuccaucaccggccgcgccugggagaacaccgucgucgaccucgaguccgacggcaagccccagaaggccggcuccaacaacuccaacaagucccuccaguccaccggcuucgccgccggccucaccuacucccagcucaugacccucaaggacgccaugcuccagcucgaccccaacgccaagaccuggauggacaucgagggccgccccgaggaccccgucgaggucgcccucuaccagcccuccuccggcugcuacauccacuucuuccgcgagcccaccgaccucaagcaguucaagcaggacgccaaguacucccacggcaucgacgucaccgaccucuucgccgcccagcccggccucaccuccgccgucaucgacgcccucccccgcaacauggucaucaccugccagggcuccgacgacaucaagaagcuccucgagucccagggccgcaaggacaucaagcucaucgacaucgcccucuccaagaccgacucccgcaaguacgagaacgccgucugggaccaguacaaggaccucugccacaugcacaccggcgucgucgucgagaagaagaagcgcggcggcaaggaggagaucaccccccacugcgcccucauggacugcaucauguucgacgccgccgucuccggcggccucaacaccuccguccuccgcgccguccucccccgcgacauggucuuccgcaccuccaccccccgcgucguccucuga

SEQ ID NO: 8499 - RNA, 1710 nt, Artificial Sequence
  derived and/or modified CDS sequence (opt2) from LASV(G2944-SLE-2012;Clade IV)__AIT17341__NP
auguccgccuccaaggagaucaaguccuuccucuggacccagucccuccgccgcgagcucuccggcuacugcuccaacaucaagcuccaggucgucaaggacgcccaggcccuccuccacggccucgacuucuccgaggucuccaacguccagcgccucaugcgcaaggagcgccgcgacgacaacgaccucaagcgccuccgcgaccucaaccaggccgucaacaaccucgucgagcucaaguccacccagcagaaguccauccuccgcgucggcacccucaccuccgacgaccuccucauccucgccgccgaccucgagaagcucaaguccaaggucacccgcaccgagcgcccccucuccgccggcgucuacaugggcaaccucuccucccagcagcucgaccagcgccgcgcccuccucaacaugaucggcauguccggcggcaaccagggcgcccgcgccggccgcgacggcgucguccgcgucugggacgucaagaacgccgagcuccucaacaaccaguucggcaccaugcccucccucacccucgccugccucaccaagcagggccaggucgaccucaacgacgccguccaggcccucaccgaccucggccucaucuacaccgccaaguaccccaacaccuccgaccucgaccgccucacccagucccaccccauccucaacaugaucgacaccaagaaguccucccucaacaucuccggcuacaacuucucccucggcgccgccgucaaggccggcgccugcaugcucgacggcggcaacaugcucgagaccaucaaggucuccccccagaccauggacggcauccucaaguccauccucaaggucaagaaggcccucggcauguucaucuccgacgcccccggcgagcgcaaccccuacgagaacauccucuacaagaucugccucuccggcgacggcuggcccuacaucgccucccgcaccuccaucaccggccgcgccugggagaacaccgucgucgaccucgaguccgacggcaagccccagaaggccggcuccaacggcuccaacaagucccuccaguccgccggcuucaccgccggccucaccuacucccagcucaugacccucaaggacgccaugcuccagcucgaccccaacgccaagaccuggauggacaucgagggccgccccgaggaccccgucgagaucgcccucuaccagcccuccuccggcugcuacauccacuucuuccgcgagcccaccgaccucaagcaguucaagcaggacgccaaguacucccacggcaucgacgucaccgaccucuucgccgcccagcccggccucaccuccgccgucaucgacgcccucccccgcaacauggucaucaccugccagggcuccgacgacauccgcaagcucuucgagucccagggccgcaaggacaucaagcucaucgacaucgcccucuccaaggccgacucccgcaaguacgagaacgccgucugggaccaguacaaggaccucugccacaugcacaccggcgucgucgucgagaagaagaagcgcggcggcaaggaggagaucaccccccacugcgcccucauggacugcaucauguucgacgccgccgucuccggcggccucaacaccuccguccuccgcgccguccucccccgcgacauggucuuccgcaccuccaccccccgcgucguccucuga

SEQ ID NO: 8500 - RNA, 1710 nt, Artificial Sequence
  derived and/or modified CDS sequence (opt2) from LASV(G3010-SLE-2013;Clade IV)__AIT17345__NP
auguccgccuccaaggagaucaaguccuuccucuggacccagucccuccgccgcgagcucuccggcuacugcuccaacaucaagcuccaggucgucaaggacgcccaggcccuccuccacggccucgacuucuccgaggucuccaacguccagcgccucaugcgcaaggagcgccgcgacgacaacgaccucaagcgccuccgcgaccucaaccaggccgucaacaaccucgucgagcucaaguccacccagcagaaguccauccuccgcgucggcacccucaccuccgacgaccuccucauccucgccgccgaccucgagaagcucaaguccaaggucacccgcaccgagcgcccccucuccgccggcgucuacaugggcaaccucuccucccagcagcucgaccagcgccgcgcccuccucuccaugaucggcauguccuccggcguccagggcgcccgcgccggccgcgacggcgucguccgcgucugggacgucaagaacgccgagcuccucaacaaccaguucggcaccaugcccucccucacccucgccugccucaccaagcagggccaggucgaccucaacgacgucguccaggcccucaccgaccucggccucaucuacaccgccaaguaccccaacaccuccgaccucgaccgccucacccagucccaccccauccucaacaugaucgacaccaagaaguccucccucaacaucuccggcuacaacuucucccucggcgccgccgucaaggccggcgccugcaugcucgacggcggcaacaugcucgagaccaucaaggucuccccccagaccauggacggcauccucaaguccauccucaaggucaagaaggcccucggcauguucaucuccgagacccccggcgagcgcaaccccuacgagaacauccucuacaagaucugccucuccggcgacggcuggcccuacaucgccucccgcaccuccaucaccggccgcgccugggagaacaccgucgucgaccucgaguccgacggcaagccccagaaggccggcuccaacaacuccaacaagucccuccaguccgccggcuucaccgccggccucaccuacucccagcucaugacccucaaggacgccaugcuccagcucgaccccaacgccaagaccuggauggacaucgagggccgccccgaggaccccgucgaggucgcccucuaccagcccuccuccggcugcuacauccacuucuuccgcgagcccaccgaccucaagcaguucaagcaggacgccaaguacucccacggcaucgacgucaccgaccucuucgccgcccagcccggccucaccuccgccgucaucgacgcccucccccgcaacauggucaucaccugccagggcuccgacgacaucaagaagcuccucgagucccagggccgcaaggacaucaagcucaucgacaucgcccucuccaagaccgacucccgcaaguacgagaacgccgucugggaccaguacaaggaccucugccacaugcacaccggcgucgucgucgagaagaagaagcgcggcggcaaggaggagaucaccccccacugcgcccucauggacugcaucauguucgacgccgccgucuccggcggccucaacaccuccguccuccgcgccguccucccccgcgacauggucuuccgcaccuccaccccccgcgucguccucuga

SEQ ID NO: 8501 - RNA, 1710 nt, Artificial Sequence
  derived and/or modified CDS sequence (opt2) from LASV(G3016-SLE-2013;Clade IV)__AIT17349__NP
auguccgccuccaaggagaucaaguccuuccucuggacccagucccuccgccgcgagcucuccggcuacugcuccaacaucaagcuccaggucgucaaggacgcccaggcccuccuccacggccucgacuucuccgaggucuccaacguccagcgccucaugcgcaaggagcgccgcgacgacuccgaccucaagcgccuccgcgaccucaaccaggccgucaacaaccucgucgagcucaaguccacccagcagaaguccauccuccgcgucggcacccucaccuccgacgaccuccucauccucgccgccgaccucgagaagcucaaguccaaggucacccgcaccgagcgcccccucuccgccggcgucuacaugggcaaccucuccucccagcagcucgaccagcgccgcgcccuccucaacaugcucggcauguccggcuccaaccagggcgcccgcgccggccgcgacggcgucguccgcgucugggacgucaagaacgccgagcuccucaacaaccaguucggcaccaugcccucccucacccucgccugccucaccaagcagggccaggucgaccucaacgacgccguccaggcccucaccgaccucggccucaucuacaccgccaaguaccccaacaccuccgaccucgaccgccucacccagucccaccccauccucaacaugaucgacaccaagaaguccucccucaacaucuccggcuacaacuucucccucggcgccgccgucaaggccggcgccugcaugcucgacggcggcaacaugcucgagaccaucaaggucuccccccagaccauggacggcauccucaaguccauccucaaggucaagaaggcccucggcauguucaucuccgacacccccggcgagcgcaaccccuacgagaacauccucuacaagaucugccucuccggcgacggcuggcccuacaucgccucccgcaccuccaucaccggccgcgccugggagaacaccgucgucgaccucgaguccgacgagaagccccagaaggccggcuccaacuccuccaacaagucccuccaguccgccggcuucaccgccggccucaccuacucccagcucaugacccucaaggacgccaugcuccagcucgaccccaacgccaagaccuggauggacaucgagggccgccccgaggaccccgucgagaucgcccucuaccagcccuccuccggcugcuacauccacuucuuccgcgagcccaccgaccucaagcaguucaagcaggacgccaaguacucccacggcaucgacgucaccgaccucuucgccgcccagcccggccucaccuccgccgucaucgacgcccucccccgcaacauggucaucaccugccagggcuccgacgacauccgcaagcuccucgagucccagggccgcaaggacaucaagcucaucgacaucgcccucuccaagaccgacucccgcaaguacgagaacgccgucugggaccaguacaaggaccucugccacaugcacaccggcaucgucgucgagaagaagaagcgcggcggcaaggaggagaucaccccccacugcgcccucauggacugcaucauguucgacgccgccgucuccggcggccucaacgccuccguccuccgcgccguccucccccgcgacauggucuuccgcaccuccaccccccgcgucguccucuga

SEQ ID NO: 8502 - RNA, 1710 nt, Artificial Sequence
  derived and/or modified CDS sequence (opt2) from LASV(G3034-SLE-2013;Clade IV)__AIT17351__NP
auguccgccuccaaggagaucaaguccuuccucuggacccagucccuccgccgcgagcucuccggcuacugcuccaacaucaagcuccaggucgucaaggacgcccaggcccuccuccacggccucgacuucuccgaggucuccaacguccagcgccucaugcgcaagcagcgccgcgacgacggcgaccucaagcgccuccgcgaccucaaccaggccgucaacaaccucgucgagcucaaguccacccagcagaaguccguccuccgcgucggcacccucaccuccgacgaccuccucauccucgccgccgaccucgagaagcucaaguccaaggucauccgcaccgagcgcccccucuccgccggcgucuacaugggcaaccucuccucccagcagcucgagcagcgccgcgcccuccucaacaugaucggcauguccuccggcaaccagggcgcccgcaccggcaaggacggcgucguccgcaucugggacgucaagaacgccgaccuccucaacaaccaguucggcaccaugcccucccucacccucgccugccucaccaagcagggccaggucgaccucaacgacgucguccaggcccucaccgaccucggccucaucuacaccgccaaguaccccaacaccuccgaccucgaccgccucacccagucccaccccauccucaacauggucgacaccuccaaguccucccucaacaucuccggcuacaacuucucccucggcgccgccgucaaggccggcgccugcaugcucgacggcggcaacaugcucgagaccaucaaggucuccccccagaccauggacggcauccucaaguccauccucaaggucaagaagucccucggcauguucgucuccgacacccccggcgagcgcaaccccuacgagaacauccucuacaagaucugccucuccggcgacggcuggcccuacaucgccucccgcaccuccaucaccggccgcgccugggagaacaccgucgucgaccucgaguccaacggcaagccccagaaggccggcuccaacaacuccaacaagucccuccaguccaccggcuucaccgccggccucaccuacucccagcucaugacccucaaggacgccaugcuccagcucgaccccaacgccaagaccuggauggacaucgagggccgccccgaggaccccgucgagaucgcccucuaccagcccuccuccggcugcuacauccacuucuuccgcgagcccaccgaccucaagcaguucaagcaggacgccaaguacucccacggcaucgacgucaccgaccucuucgccgcccagcccggccucaccuccgccgucaucgacacccucccccgcaacauggucaucaccugccagggcuccgacgacauccgcaagcuccucgagucccagggccgcaaggacaucaagcucaucgacaucgcccucuccaagaucgacucccgcaaguacgagaacgccgucugggaccaguacaaggaccucugccacaugcacaccggcgucgucgucgagaagaagaagcgcggcggcaaggaggagaucaccccccacugcgcccucauggacugcaucauguucgacgccgccgucuccggcggccucaacgccuccguccuccgcgccguccucccccgcgacauggucuuccgcaccuccaccccccgcgucguccucuga

SEQ ID NO: 8503 - RNA, 1710 nt, Artificial Sequence
  derived and/or modified CDS sequence (opt2) from LASV(G3110-SLE-2013;Clade IV)__AIT17361__NP
auguccgccuccaaggagaucaaguccuuccucuggacccagucccuccgccgcgagcucuccggcuacugcuccaacaucaagcuccaggucgucaaggacgcccaggcccuccuccacggccucgacuucuccgaggucuccaacguccagcgccucaugcgcaaggagcgccgcgacgacuccgaccucaagcgccuccgcgaccucaaccaggccgucaacaaccucgucgagcucaaguccacccagcagaaguccguccuccgcgucggcacccucaccuccgacgaccuccucguccucgccgccgaccucgagaagcucaaguccaaggucacccgcaccgagcgcccccucuccgccggcgucuacaugggcaaccucuccucccagcagcucgaccagcgccgcgcccuccucaacaugaucggcauguccggcggcaaccagggcgcccgcgccggccgcgacggcgucguccgcaucugggacgucaagaacgccgagcuccucaacaaccaguucggcaccaugcccucccucacccucgccugccucaccaagcagggccaggucgaccucaacgacgucguccaggcccucaccgaccucggccucaucuacaccgccaaguaccccaacaccuccgaccucgaccgccucacccagucccaccccauccucaacaugaucgacaccaagaaguccucccucaacaucuccggcuacaacuucucccucggcgccgccgucaaggccggcgccugcaugcucgacggcggcaacaugcucgagaccaucaaggucuccccccagaccauggacggcauccucaaguccauccucaaggucaagaaggcccucggcauguucaucuccgacacccccggcgagcgcaaccccuacgagaacauccucuacaagaucugccucuccggcgacggcuggcccuacaucgccucccgcaccuccaucaccggccgcgccugggagaacaccaucgucgaccucgaguccgacggcaagccccagaagaccaacaacaccaacuccaacaagucccuccaguccgccggcuucgccgccggccucaccuacucccagcucaugacccucaaggacgccaugcuccagcucgaccccaacgccaagaccuggauggacaucgagggccgccccgaggaccccgucgagaucgcccucuaccagcccuccuccggcugcuacauccacuucuuccgcgagcccaccgaccucaagcaguucaagcaggacgccaaguacucccacggcaucgacgucaccgaccucuucgccgcccagcccggccucaccuccgccgucaucgacacccucccccgcaacauggucaucaccugccagggcuccgaggacauccgccgccuccucgagucccagggccgcaaggacaucaagcucaucgacaucgcccucuccaagaccgacucccgcaaguacgagaacgccgucugggaccaguacaaggaccucugccacaugcacaccggcgucgucgucgagaagaagaagaagggcggcaaggaggagaucaccccccacugcgcccucauggacugcaucauguucgacgccgccgucuccggcggccucaacaccuccguccuccgcgccguccucccccgcgacauggucuuccgcaccuccaccccccgcgucguccucuga

SEQ ID NO: 8504 - RNA, 1710 nt, Artificial Sequence
  derived and/or modified CDS sequence (opt2) from LASV(G3148-SLE-2013;Clade IV)__AIT17365__NP
auguccgccuccaaggagaucaaguccuuccucuggacccagucccuccgccgcgagcucuccggcuacugcuccaacaucaagcuccaggucgucaaggacgcccaggcccuccuccacggccucgacuucuccgaggucuccaacguccagcgccucaugcgcaaggagcgccgcgacgacaacgaccucaagcgccuccgcgaccucaaccaggccgucaacaaccucgucgagcucaaguccacccagcagaaguccauccuccgcgucggcacccucaccuccgacgaccuccucauccucgccgccgaccucgagaagcucaaguccaaggucacccgcaccgagcgcccccucuccgccggcgucuacaugggcaaccucuccucccagcagcucgaccagcgccgcgcccuccucaacaugaucggcauguccggcuccaaccagggcgcccaggccggccgcgacggcgucguccgcgucugggacgucaagaacgccgagcuccucaacaaccaguucggcaccaugcccucccucacccucgccugccucaccaagcagggccaggucgaccucaacgacgccguccaggcccucaccgaccucggccucaucuacaccgccaaguaccccaacaccuccgaccucgaccgccucacccagucccaccccauccucaacaugaucgacaccaagaaguccucccucaacaucuccggcuacaacuucucccucggcgccgccgucaaggccggcgccugcaugcucgacggcggcaacaugcucgagaccaucaaggucuccccccagaccauggacggcauccucaaguccauccucaaggucaagaaggcccucggcauguucaucuccgacgcccccggcgagcgcaaccccuacgagaacauccucuacaagaucugccucuccggcgacggcuggcccuacaucgccucccgcaccuccaucaccggccgcgccugggagaacaccgucgucgaccucgaguccgacggcaagccccagaaggccggcuccaacggcuccaacaagucccuccaguccgccggcuucaccgccggccucaccuacucccagcucaugacccucaaggacgccaugcuccagcucgaccccaacgccaagaccuggauggacaucgagggccgccccgaggaccccgucgagaucgcccucuaccagcccuccuccggcugcuacauccacuucuuccgcgagcccaccgaccucaagcaguucaagcaggacgccaaguacucccacggcaucgacgucaccgaccucuucgccgcccagcccggccucaccuccgccgucaucgacgcccucccccgcaacauggucaucaccugccagggcuccgacgacauccgcaagcucuucgagucccagggccgcaaggacaucaagcucaucgacaucgcccucuccaagaccgacucccgcaaguacgagaacgccgucugggaccaguacaaggaccucugccacaugcacaccggcaucgucgucgagaagaagaagcgcggcggcaaggaggagaucaccccccacugcgcccucauggacugcaucauguucgacgccgccgucuccggcggccucaacaccuccguccuccgcgccguccucccccgcgacauggucuuccgcaccuccaccccccgcgucguccucuga

SEQ ID NO: 8505 - RNA, 1710 nt, Artificial Sequence
  derived and/or modified CDS sequence (opt2) from LASV(G3151-SLE-2013;Clade IV)__AIT17369__NP
auguccgccuccaaggagaucaaguccuuccucuggacccagucccuccgccgcgagcucuccggcuacugcuccaacaucaagcuccaggucgucaaggacgcccaggcccuccuccacggccucgacuucuccgaggucuccaacguccagcgccucaugcgcaaggagcgccgcgacgacuccgaccucaagcgccuccgcgaccucaaccaggccgucaacaaccucgucgagcucaaguccacccagcagaaguccguccuccgcgucggcacccucaccuccgacgaccuccucguccucgccgccgaccucgagaagcucaaguccaaggucacccgcaccgagcgcccccucuccgccggcgucuacaugggcaaccucuccucccagcagcucgaccagcgccgcgcccuccucuccaugaucggcauguccggcggcaaccagggcgcccgcgccggccgcgacggcgucguccgcaucugggacgucaagaacgccgagcuccucaacaaccaguucggcaccaugcccucccucacccucgccugccucaccaagcagggccaggucgaccucaacgacgucguccaggcccucaccgaccucggccucaucuacaccgccaaguaccccaacaccuccgaccucgaccgccucacccagucccaccccauccucaacaugaucgacaccaagaaguccucccucaacaucuccggcuacaacuucucccucggcgccgccgucaaggccggcgccugcaugcucgacggcggcaacaugcucgagaccaucaaggucuccccccagaccauggacggcauccucaaguccauccucaaggucaagaaggcccucggcauguucaucuccgacacccccggcgagcgcaaccccuacgagaacauccucuacaagaucugccucuccggcgacggcuggcccuacaucgccucccgcaccuccaucaccggccgcgccugggagaacaccaucgucgaccucgaguccgacggcaagccccagaagaccuccaacaccaacuccaacaagucccuccaguccgccggcuucgccgccggccucaccuacucccagcucaugacccucaaggacgccaugcuccagcucgaccccaacgccaagaccuggauggacaucgagggccgccccgaggaccccgucgagaucgcccucuaccagcccuccuccggcugcuacauccacuucuuccgcgagcccaccgaccucaagcaguucaagcaggacgccaaguacucccacggcaucgacgucaccgaccucuucgccgcccagcccggccucaccuccgccgucaucgacgcccucccccgcaacauggucaucaccugccagggcuccgaggacauccgcaagcuccucgagucccagggccgcaaggacaucaagcucaucgacaucgcccucuccaagaccgacucccgcaaguacgagaacgccgucugggaccaguacaaggaccucugccacaugcacaccggcgucgucgucgagaagaagaagaagggcggcaaggaggagaucaccccccacugcgcccucauggacugcaucauguucgacgccgccgucuccggcggccucaacaccuccguccuccgcgccguccucccccgcgacauggucuuccgcaccuccaccccccgcgucguccucuga

SEQ ID NO: 8506 - RNA, 1710 nt, Artificial Sequence
  derived and/or modified CDS sequence (opt2) from LASV(G3157-SLE-2013;Clade IV)__AIT17371__NP
auguccgccuccaaggagaucaaguccuuccucuggacccagucccuccgccgcgagcucuccggcuacugcuccaacaucaagcuccaggucgucaaggacgcccaggcccuccuccacggccucgacuucuccgaggucuccaacguccagcgccucaugcgcaaggagcgccgcgacgacaacgaccucaagcgccuccgcgaccucaaccaggccgucaacaaccucgucgagcucaaguccacccagcagaaguccauccuccgcgucggcacccucaccuccgacgaccuccucauccucgccgccgaccucgagaagcucaaguccaaggucacccgcaccgagcgcccccucuccgccggcgucuacaugggcaaccucuccucccagcagcucgaccagcgccgcgcccuccucaacaugaucggcauguccggcuccaaccagggcgcccaggccggccgcgacggcgucguccgcgucugggacgucaagaacgccgagcuccucaacaaccaguucggcaccaugcccucccucacccucgccugccucaccaagcagggccaggucgaccucaacgacgccguccaggcccucaccgaccucggccucaucuacaccgccaaguaccccaacaccuccgaccucgaccgccucacccagucccaccccauccucaacaugaucgacaccaagaaguccucccucaacaucuccggcuacaacuucucccucggcgccgccgucaaggccggcgccugcaugcucgacggcggcaacaugcucgagaccaucaaggucuccccccagaccauggacggcauccucaaguccauccucaaggucaagaaggcccucggcauguucaucuccgacgcccccggcgagcgcaaccccuacgagaacauccucuacaagaucugccucuccggcgacggcuggcccuacaucgccucccgcaccuccaucaccggccgcgccugggagaacaccgucgucgaccucgaguccgacggcaagccccagaaggccggcuccaacuccuccaacaagucccuccaguccgccggcuucaccgccggccucaccuacucccagcucaugacccucaaggacgccaugcuccagcucgaccccaacgccaagaccuggauggacaucgagggccgccccgaggaccccgucgagaucgcccucuaccagcccuccuccggcugcuacauccacuucuuccgcgagcccaccgaccucaagcaguucaagcaggacgccaaguacucccacggcaucgacgucaccgaccucuucgccgcccagcccggccucaccuccgccgucaucgacgcccucccccgcaacauggucaucaccugccagggcuccgacgacauccgcaagcucuucgagucccagggccgcaaggacaucaagcucaucgacaucgcccucuccaagaccgacucccgcaaguacgagaacgccgucugggaccaguacaaggaccucugccacaugcacaccggcaucgucgucgagaagaagaagcgcggcggcaaggaggagaucaccccccacugcgcccucauggacugcaucauguucgacgccgccgucuccggcggccucaacaccuccguccuccgcgccguccucccccgcgacauggucuuccgcaccuccaccccccgcgucguccucuga

SEQ ID NO: 8507 - RNA, 1710 nt, Artificial Sequence
  derived and/or modified CDS sequence (opt2) from LASV(G3206-SLE-2013;Clade IV)__AIT17379__NP
auguccgccuccaaggagaucaaguccuuccucuggacccagucccuccgccgcgagcucuccggcuacugcuccaacaucaagcuccaggucgucaaggacgcccaggcccuccuccacggccucgacuucuccgaggucuccaacguccagcgccucaugcgcaaggagcgccgcgacgacuccgaccucaagcgccuccgcgaccucaaccaggccgucaacaaccucgucgagcucaaguccacccagcagaaguccguccuccgcgucggcacccucaccuccgacgaccuccucauccucgccgccgaccucgagaagcucaaguccaaggucacccgcaccgagcgcccccucuccgccggcgucuacaugggcaaccucuccucccagcagcucgaccagcgccgcgcccuccucaacaugaucggcauguccuccggcaaccgcggcgcccaggccggccgcgacggcgucguccgcgucugggacgucaagaacgccgagcuccucaacaaccaguucggcaccaugcccucccucacccucgccugccucaccaagcagggccaggucgaccucaacgacgccguccaggcccucaccgaccucggccucaucuacaccgccaaguaccccaacaccuccgaccucgaccgccucacccagucccaccccauccucaacauggucgacaccaagaaguccucccucaacaucuccggcuacaacuucucccucggcgccgccgucaaggccggcgccugcaugcucgacggcggcaacaugcucgagaccaucaaggucuccccccagaccauggacggcauccucaaguccauccucaaggucaagaaggcccucggcauguucaucuccgacacccccggcgagcgcaaccccuacgagaacauccucuacaagaucugccucuccggcgacggcuggcccuacaucgccucccgcaccuccaucaccggccgcgccugggagaacaccgucgucgaccucgaguccgacggcaagccccagaaggccggcuccaacaacuccaacaagucccuccaguccgccggcuucgccgccggccucaccuacucccagcucaugacccucaaggacgccaugcuccagcucgaccccaacgccaagaccuggauggacaucgagggccgccccgaggaccccgucgagaucgcccucuaccagcccuccuccggcugcuacauccacuucuuccgcgagcccaccgaccucaagcaguucaagcaggacgccaaguacucccacggcaucgacgucaccgaccucuucgccgcccagcccggccucaccuccgccgucaucgacgcccucccccgcaacauggucaucaccugccagggcuccgacgacauccgcaagcuccucgagucccagggccgcaaggacaucaagcucaucgacaucgcccucuccaagaccgacucccgcaaguacgagaacgccgucugggaccaguacaaggaccucugccacaugcacaccggcaucgucgucgagaagaagaagcgcggcggcaaggaggagaucaccccccacugcgcccucauggacugcaucauguucgacgccgccgucuccggcggccucaacaccuccguccuccgcgccguccucccccgcgacauggucuuccgcaccuccaccccccgcgucguccucuga

SEQ ID NO: 8508 - RNA, 1710 nt, Artificial Sequence
  derived and/or modified CDS sequence (opt2) from LASV(G3234-SLE-2013;Clade IV)__AIT17389__NP
auguccgccuccaaggagaucaaguccuuccucuggacccagucccuccgccgcgagcucuccggcuacugcuccaacaucaagcuccaggucgucaaggacgcccaggcccuccuccacggccucgacuucuccgaggucuccaacguccagcgccucaugcgcaagcagcgccgcgacgacggcgaccucaagcgccuccgcgaccucaaccaggccgucaacaaccucgucgagcucaaguccacccagcagaaguccguccuccgcgucggcacccucaccuccgacgaccuccucauccucgccgccgaccucgagaagcucaaguccaaggucacccgcaccgagcgcccccucuccgccggcgucuacaugggcaaccucuccucccagcagcucgaccagcgccgcgcccuccucaacaugaucggcauguccggcggcaaccagggcgcccgcaccggcaaggacggcgucguccgcaucugggacgucaagaacgccgaccuccucaacaaccaguucggcaccaugcccucccucacccucgccugccucaccaagcagggccaggucgaccucaacgacgucguccaggcccucaccgaccucggccucaucuacaccgccaaguaccccaacaccuccgaccucgaccgccucacccagucccaccccauccucaacaugaucgacaccuccaaguccucccucaacaucuccggcuacaacuucucccucggcgccgccgucaaggccggcgccugcaugcucgacggcggcaacaugcucgagaccaucaaggucuccccccagaccauggacggcauccucaaguccauccucaaggucaagaagucccucggcauguucaucuccgacacccccggcgagcgcaaccccuacgagaacauccucuacaagaucugccucuccggcgacggcuggcccuacaucgccucccgcaccuccaucaccggccgcgccugggagaacaccgucgucgaccucgaguccgacggcaagccccagaaggccggcuccaacaacuccaacaagucccuccaguccaccggcuucaccgccggccucaccuacucccagcucaugacccucaaggacgccaugcuccagcucgaccccaacgccaagaccuggauggacaucgagggccgccccgaggaccccgucgagaucgcccucuaccagcccuccuccggcugcuacauccacuucuuccgcgagcccaccgaccucaagcaguucaagcaggacgccaaguacucccacggcaucgacgucaccgaccucuucgccgcccagcccggccucaccuccgccgucaucgacacccucccccgcaacauggucaucaccugccagggcuccgacgacauccgcaagcuccucgagucccagggccgcaaggacaucaagcucaucgacaucgcccucuccaagaccgacucccgcaaguacgagaacgccgucugggaccaguacaaggaccucugccacaugcacaccggcgucgucgucgagaagaagaagcgcggcggcaaggaggagaucaccccccacugcgcccucauggacugcaucauguucgacgccgccgucuccggcggccucaacgucuccguccuccgcgccguccucccccgcgacauggucuuccgcaccuccaccccccgcgucguccucuga

SEQ ID NO: 8509 - RNA, 1710 nt, Artificial Sequence
  derived and/or modified CDS sequence (opt2) from LASV(G3278-SLE-2013;Clade IV)__AIT17399__NP
auguccgccuccaaggagaucaaguccuuccucuggacccagucccuccgccgcgagcucuccggcuacugcuccaacaucaagcuccaggucgucaaggacgcccaggcccuccuccacggccucgacuucuccgaggucuccaacguccagcgccucaugcgcaagcagcgccgcgacgacuccgaccucaagcgccuccgcgaccucaaccaggccgucaacaaccucgucgagcucaaguccacccagcagaaguccguccuccgcgucggcacccucaccuccgacgaccuccucguccucgccgccgaccucgagaagcucaaguccaaggucauccgcaccgagcgcccccucuccuccggcgucuacaugggcaaccucuccucccagcagcucgaccagcgccgcgcccuccucaacaugaucggcauguccggcggcaaccagggcgcccaggucggccgcgacggcgucguccgcgucugggacgucaagaacgccgaccuccucaacaaccaguucggcaccaugcccucccucacccucgccugccucaccaagcagggccaggucgaccucaacgacgucguccaggcccucaccgaccucggccucaucuacaccgccaaguaccccaacaccuccgaccucgaccgccucgcccagucccaccccauccucaacaugaucgacaccaagaaguccucccucaacaucuccggcuacaacuucucccucggcgccgccgucaaggccggcgccugcaugcucgacggcggcaacaugcucgagaccaucaaggucaccccccagaccauggacggcauccucaaguccauccucaaggucaagaaggcccucggcauguucaucuccgagacccccggcgagcgcaaccccuacgagaacauccucuacaagaucugccucuccggcgacggcuggcccuacaucgccucccgcaccuccaucaccggccgcgccugggagaacaccgucgucgaccucgaguccgacggcaagccccagaaggccggcaacaacaacuccaacaagucccuccaguccgccggcuucaccgccggccucaccuacucccagcucaugacccucaaggacuccaugcuccagcucgaccccaacgccaagaccuggauggacaucgagggccgccccgaggaccccgucgaggucgcccucuaccagcccuccuccggcugcuacauccacuucuuccgcgagcccaccgaccucaagcaguucaagcaggacgccaaguacucccacggcaucgacgucaccgaccucuucgccacccagcccggccucaccuccgccgucaucgaggcccucccccgcaacauggucaucaccugccagggcuccgacgacauccgcaagcuccucgagucccagggccgcaaggacaucaagcucaucgacaucgcccucaacaagaccgacucccgcaaguacgagaacgccgucugggaccaguacaaggaccucugccacaugcacaccggcgucgucgucgagaagaagaagcgcggcggcaaggaggagaucaccccccacugcgcccucauggacugcaucauguucgacgccgccgucuccggcggccucaagacccucgcccuccgcgccguccucccccgcgacauggucuuccgcaccuccacccccaaggucguccucuga

SEQ ID NO: 8510 - RNA, 1710 nt, Artificial Sequence
  derived and/or modified CDS sequence (opt2) from LASV(G502-SLE-2009;Clade IV)__AIT17127__NP
auguccgccuccaaggagaucaaguccuuccucuggacccagucccuccgccgcgagcucuccggcuacugcuccaacaucaagcuccaggucgucaaggacgcccaggcccuccuccacggccucgacuucuccgaggucuccaacguccagcgccucaugcgcaaggagcgccgcgacgacaacgaccucaagcgccuccgcgaccucaaccaggccgucaacaaccucgucgagcucaaguccacccagcagaaguccauccuccgcgucggcacccucaccuccgacgaccuccucauccucgccgccgaccucgagaagcucaaguccaaggucauccgcaccgagcgcccccucuccgccggcgucuacaugggcaaccucuccucccagcagcucgaccagcgccgcgcccuccucuccaugaucggcauguccggcggcaaccagggcguccgcgccggcaaggacggcgucguccgcgucugggacgucaagaacgccgagcuccucaacaaccaguucggcaccaugcccucccucacccucgccugccucaccaagcagggccaggucgaccucaacgacgccguccaggcccucaccgaccucggccucaucuacaccgccaaguaccccaacaccuccgaccucgaccgccucacccagucccaccccauccucaacaugaucgacaccaagaaguccucccucaacaucuccggcuacaacuucucccucggcgccgccgucaaggccggcgccugcaugcucgacggcggcaacaugcucgagaccaucaaggucuccccccagaccauggacggcauccucaaguccauccucaaggucaagaaggcccucggcauguucaucuccgacacccccggcgagcgcaaccccuacgagaacauccucuacaagaucugccucuccggcgacggcuggcccuacaucgccucccgcaccuccaucaccggccgcgccugggagaacaccgucgucgaccucgaguccgacggcaagccccagaaggccggcuccaacaacuccaacaagucccuccaguccgccggcuucaccgccggccucaccuacucccagcucaugacccucaaggacgccaugcuccagcucgaccccaacaccaagaccuggauggacaucgagggccgccccgaggaccccgucgagaucgcccucuaccagcccuccuccggcugcuacauccacuucuuccgcgagcccaccgaccucaagcaguucaagcaggacgccaaguacucccacggcaucgacgucaccgaccucuucgccgcccagcccggccucaccuccgccgucaucgacgcccucccccgcaacauggucaucaccugccagggcuccgacgacauccgcaagcuccucgagucccagggccgcaaggacaucaagcucaucgacaucgcccucaacaagaccgacucccgcaaguacgagaacgccgucugggaccaguacaaggaccucugccacaugcacaccggcgucgucgucgagaagaagaagcgcggcggcaaggaggagaucaccccccacugcgcccucauggacugcaucauguucgacgccgccgucuccggcggccucaacaccuccguccuccgcgccguccucccccgcgacauggucuuccgcaccuccaccccccgcgucguccucuga

SEQ ID NO: 8511 - RNA, 1710 nt, Artificial Sequence
  derived and/or modified CDS sequence (opt2) from LASV(G503-SLE-2009;Clade IV)__AIT17131__NP
auguccgccuccaaggagaucaaguccuuccucuggacccagucccuccgccgcgagcucuccggcuacugcuccaacaucaagcuccaggucgucaaggacgcccaggcccuccuccacggccucgacuucuccgaggucuccaacguccagcgccucaugcgcaaggagcgccgcgacgacaacgaccucaagcgccuccgcgaccucaaccaggccgucaacaaccucgucgagcucaaguccacccagcagaaguccauccuccgcgucggcacccucuccuccgacgaccuccucguccucgccgccgaccucgagaagcucaaguccaaggucacccgcaccgagcgcccccucuccgccggcgucuacaugggcaaccucuccucccagcagcucgaccagcgccgcgcccuccucaacaugaucggcauguccggcggcaaccagggcgcccgcgccggccgcgacggcgucguccgcgucugggacgucaagaacgccgagcuccucaacaaccaguucggcaccaugcccucccucacccucgccugccucaccaagcagggccaggucgaccucaacgacgucguccaggcccucaccgaccucggccucaucuacaccgccaaguaccccaacaccuccgaccucgaccgccucacccagucccaccccauccucaacauggucgacaccaagaaguccucccucaacaucuccggcuacaacuucucccucggcgccgccgucaaggccggcgccugcaugcucgacggcggcaacaugcucgagaccaucaaggucuccccccagaccaucgacggcauccucaaguccauccucaaggucaagaaggcccucggcauguucaucuccgacacccccggcgagcgcaaccccuacgagaacauccucuacaagaucugccucuccggcgacggcuggcccuacaucgccucccgcaccuccaucaccggccgcgccugggagaacaccgucgucgaccucgaguccgacggcaagccccagaaggccggcuccaacaacuccaacaagucccuccaguccgccggcuucaccgccggccucaccuacucccagcucaugacccucaaggacgccaugcuccagcucgaccccaacgccaagaucuggauggacaucgagggccgccccgaggaccccgucgagaucgcccucuaccagcccuccuccggcugcuacauccacuucuuccgcgagcccaccgaccucaagcaguucaagcaggacgccaaguacucccacggcaucgacgucaccgaccucuucgccgcccagcccggccucaccuccgccgucaucgacgcccucccccgcaacauggucaucaccugccagggcgccgacgacauccgcaagcuccucgagucccagggccgcaaggacaucaagcucaucgacaucgcccucaacaaggccgacucccgcaaguacgagaacgccgucugggaccaguacaaggaccucugccacaugcacaccggcgucgucgucgagaagaagaagcgcggcggcaaggaggagaucaccccccacugcgcccucauggacugcaucauguucgacgccgccgucuccggcggccucaacaccuccguccuccgcgccguccucccccgcgacauggucuuccgcaccuccaccccccgcgucguccucuga

SEQ ID NO: 8512 - RNA, 1710 nt, Artificial Sequence
  derived and/or modified CDS sequence (opt2) from LASV(G610-SLE-2009;Clade IV)__AIT17135__NP
auguccgccuccaaggagaucaaguccuuccucuggacccagucccuccgccgcgagcucuccggcuacugcuccaacaucaagcuccaggucgucaaggacgcccaggcccuccuccacggccucgacuucuccgaggucuccaacguccagcgccucaugcgcaaggagcgccgcgacgacaacgaccucaagcgccuccgcgaccucaaccaggccgucaacaaccucgucgagcucaaguccacccagcagaaguccauccuccgcgucggcacccucaccuccgacgaccuccucauccucgccgccgaccucgagaagcucaaguccaaggucacccgcaccgagcgcccccucuccgccggcgucuacaugggcaaccucuccucccagcagcucgaccagcgccgcgcccuccucuccaugaucggcauguccggcggcaaccagggcgcccgcgccggccgcgacggcgucguccgcgucugggacgucaagaacgccgagcuccucaacaaccaguucggcaccaugcccucccucacccucgccugccucaccaagcagggccaggucgaccucaacgacgucguccaggcccucaccgaccucggccucaucuacaccgccaaguaccccaacaccuccgaccucgaccgccucacccagucccaccccauccucaacaugaucgacaccaagaaguccucccucaacaucuccggcuacaacuucucccucggcgccgccgucaaggccggcgccugcaugcucgacggcggcaacaugcucgagaccaucaaggucuccccccagaccauggacggcauccucaaguccauccucaaggucaagaaggcccucggcauguucaucuccgacacccccggcgagcgcaaccccuacgagaacauccucuacaagaucugccucuccggcgacggcuggcccuacaucgccucccgcaccuccaucaccggccgcgccugggagaacaccgucgucgaccucgaguccgacggcaagcuccagaaggccggcuccaacaacuccaacaagucccuccaguccgccggcuucaccgccggccucaccuacucccagcucaugacccucaaggacgccaugcuccagcucgaccccaacgccaagaccuggauggacaucgagggccgccccgaggaccccgucgagaucgcccucuaccagcccuccuccggcugcuacauccacuucuuccgcgagcccaccgaccucaagcaguucaagcaggacgccaaguacucccacggcaucgacgucaccgaccucuucgccgcccagcccggccucaccuccgccgucaucgacgcccucccccgcaacauggucaucaccugccagggcuccgacgacauccgcaagcuccucgagucccagggccgcaaggacaucaagcucaucgacaucgcccucaacaagaccgacucccgcaaguacgagaacgccgucugggaccaguacaaggaccucugccacaugcacaccggcgucgucgucgagaagaagaagaagggcggcaaggaggagaucaccccccacugcgcccucauggacugcaucauguucgacgccgccgucuccggcggccucaacaccuccguccuccgcgccguccucccccgcgacauggucuuccgcaccuccaccccccgcgucguccucuga

SEQ ID NO: 8513 - RNA, 1710 nt, Artificial Sequence
  derived and/or modified CDS sequence (opt2) from LASV(G636-SLE-2009;Clade IV)__AIT17139__NP
auguccgccuccaaggagaucaaguccuuccucuggacccagucccuccgccgcgagcucuccggcuacugcuccaacaucaagcuccaggucgucaaggacgcccaggcccuccuccacggccucgacuucuccgaggucuccaacguccagcgccucaugcgcaaggagcgccgcgacgacaacgaccucaagcgccuccgcgaccucaaccaggccgucaacaaccucgucgagcucaaguccacccagcagaaguccguccuccgcgucggcacccucaccuccgacgaccuccucauccucgccgccgaccucgagaagcucaaguccaaggucacccgcaccgagcgcccccucuccgccggcgucuacaugggcaaccucuccucccagcagcucgaccagcgccgcgcccuccucaacaugaucggcauguccggcggcaaccagggcgcccgcgccggccgcgacggcgucguccgcgucugggacgucaagaacgccgagcuccucaacaaccaguucggcaccaugcccucccucacccucgccugccucaccaagcagggccaggucgaccucaacgacgccguccaggcccucaccgaccucggccucaucuacaccgccaaguaccccaacaccuccgaccucgaccgccucacccagucccaccccauccucaacaugaucgacaccaagaaguccucccucaacaucuccggcuacaacuucucccucggcgccgccgucaaggccggcgccugcaugcucgacggcggcaacaugcucgagaccaucaaggucuccccccagaccauggacuccauccucaaguccauccucaaggucaagaaggcccucggcauguucaucuccgacacccccggcgagcgcaaccccuacgagaacauccucuacaagaucugccucuccggcgacggcuggcccuacaucgccucccgcaccuccaucaccggccgcgccugggagaacaccgucgucgaccucgaguccgacggcaagccccagaaggccggcuccaacaacuccaacaagucccuccaguccgccggcuucgccgccggccucaccuacucccagcucaugacccucaaggacgccaugcuccagcucgaccccaacgccaagaccuggauggacaucgagggccgccccgaggaccccgucgagaucgcccucuaccagcccuccuccggcugcuacauccacuucuuccgcgagcccaccgaccucaagcaguucaagcaggacgccaaguacucccacggcaucgacgucaccgaccucuucgccgcccagcccggccucaccuccgccgucaucgacgcccucccccgcaacauggucaucaccugccagggcuccgacgacauccgcaagcuccucgagucccagggccgcaaggacaucaagcucaucgacaucgcccucuccaagaccgacucccgcaaguacgagaacgccgucugggaccaguacaaggaccucugccacaugcacaccggcaucgucgucgagaagaagaagcgcggcggcaaggaggagaucaccccccacugcgcccucauggacugcaucauguucgacgccgccgucuccggcggccucaacaccuccguccuccgcgccguccucccccgcgacauggucuuccgcaccaccaccccccgcgucguccucuga

SEQ ID NO: 8514 - RNA, 1710 nt, Artificial Sequence
  derived and/or modified CDS sequence (opt2) from LASV(G676-SLE-2009;Clade IV)__AIT17143__NP
auguccgccuccaaggagaucaaguccuuccucuggacccagucccuccgccgcgagcucuccggcuacugcuccaacaucaagcuccaggucgucaaggacgcccaggcccuccuccacggccucgacuucuccgaggucuccaacguccagcgccucaugcgcaaggagcgccgcgacgacaacgaccucaagcgccuccgcgaccucaaccaggccgucaacaaccucgucgagcucaaguccacccagcagaaguccauccuccgcgucggcacccucaccuccgacgaccuccucauccucgccgccgaccucgagaagcucaaguccaaggucacccgcaccgagcgcccccucuccgccggcgucuacaugggcaaccucuccucccagcagcucgaccagcgccgcgcccuccucaacaugaucggcauguccggcuccaaccagggcgcccgcgccggccgcgacggcgucguccgcgucugggacgucaagaacgccgagcuccucaacaaccaguucggcaccaugcccucccucacccucgccugccucaccaagcagggccaggucgaccucaacgacgccguccaggcccucaccgaccucggccucaucuacaccgccaaguaccccaacaccuccgaccucgaccgccucacccagucccaccccauccucaacaugaucgacaccaagaaguccucccucaacaucuccggcuacaacuucucccucggcgccgccgucaaggccggcgccugcaugcucgacggcggcaacaugcucgagaccaucaaggucuccccccagaccauggacggcauccucaaguccauccucaaggucaagaaggcccucggcauguucaucuccgacacccccggcgagcgcaaccccuacgagaacauccucuacaagaucugccucuccggcgacggcuggcccuacaucgccucccgcaccuccaucaccggccgcgccugggagaacaccgucgucgaccucgaguccgacggcaagccccagaaggccggcaacaacggcuccaacaagucccuccaguccgccggcuucaccgccggccucaccuacucccagcucaugacccucaaggacgccaugcuccagcucgaccccaacgccaagaccuggauggacaucgagggccgccccgaggaccccgucgagaucgcccucuaccagcccuccuccggcugcuacauccacuucuuccgcgagcccaccgaccucaagcaguucaagcaggacgccaaguacucccacggcaucgacgucaccgaccucuucgccgcccagcccggccucaccuccgccgucaucgacgcccucccccgcaaccucgucaucaccugccagggcuccgacgacauccgcaagcuccucgagucccagggccgcaaggacaucaagcucaucgacaucgcccucuccaagaccgacucccgcaaguacgagaacgccgucugggaccaguacaaggaccucugccacaugcacaccggcaucgucgucgagaagaagaagcgcggcggcaaggaggagaucaccccccacugcgcccucauggacugcaucauguucgacgccgccgucuccggcggccucaacaccuccguccuccgcgccguccucccccgcgacauggucuuccgcaccuccaccccccgcgucguccucuga

SEQ ID NO: 8515 - RNA, 1710 nt, Artificial Sequence
  derived and/or modified CDS sequence (opt2) from LASV(G692-SLE-2009;Clade IV)__AIT17147__NP
auguccgccuccaaggagaucaaguccuuccucuggacccagucccuccgccgcgagcucuccggcuacugcuccaacaucaagcuccaggucgucaaggacgcccaggcccuccuccacggccucgacuucuccgaggucuccaacguccagcgccucaugcgcaaggagcgccgcgacgacaacgaccucaagcgccuccgcgaccucaaccaggccgucaacaaccucgucgagcucaaguccacccagcagaaguccguccuccgcgucggcacccucaccuccgacgaccuccucauccucgccgccgaccucgagaagcucaaguccaaggucacccgcaccgagcgcccccucuccgccggcgucuacaugggcaaccucuccucccagcagcucgagcagcgccgcgcccuccucaacaugaucggcauguccggcuccaaccagggcgcccaggccggccgcgacggcgucguccgcgucugggacgucaagaacgccgagcuccucaacaaccaguucggcaccaugcccucccucacccucgccugccucaccaagcagggccaggucgaccucaacgacgccguccaggcccucaccgaccucggccucaucuacaccgucaaguaccccaacaccuccgaccucgaccgccucacccagucccaccccauccucaacaugaucgacaccaagaaguccucccucaacaucuccggcuacaacuucucccucggcgccgccgucaaggccggcgccugcaugcucgacggcggcaacaugcucgagaccaucaaggucuccccccagaccauggacggcauccucaaguccauccucaaggucaagaaggcccucggcauguucaucuccgacacccccggcgagcgcaaccccuacgagaacauccucuacaagaucugccucuccggcgacggcuggcccuacaucgccucccgcaccuccaucaccggccgcgccugggagaacaccgucgucgaccucgaguccgacggcaagccccagaaggccgacuccaacuccuccaacaagucccuccaguccgccggcuucaccgccggccucaccuacucccagcucaugacccucaaggacgccaugcuccagcucgaccccaacgccaagaccuggauggacaucgagggccgccccgaggaccccgucgaggucgcccucuaccagcccuccuccggcugcuacauccacuucuuccgcgagcccaccgaccucaagcaguucaagcaggacgccaaguacucccacggcaucgacgucaccgaccucuucgccgcccagcccggccucaccuccgccgucaucgacgcccucccccgcaacauggucaucaccugccagggcuccgacgacauccgcaagcuccucgagucccagggccgcaaggacaucaagcucaucgacaucgcccucuccaagaccgacucccgcaaguacgagaacgccgucugggaccaguacaaggaccucugccacaugcacaccggcgucgucgucgagaagaagaagcgcggcggcaaggaggagaucaccccccacugcgcccucauggacugcaucauguucgacgccgccgucuccggcggccucaacaccuccguccuccgcgccguccucccccgcgacauggucuuccgcaccuccaccccccgcgucguccucuga

SEQ ID NO: 8516 - RNA, 1710 nt, Artificial Sequence
  derived and/or modified CDS sequence (opt2) from LASV(G733-SLE-2010;Clade IV)__AIT17155__NP
auguccgccuccaaggagaucaaguccuuccucuggacccagucccuccgccgcgagcucuccggcuacugcuccaacaucaagcuccaggucgucaaggacgcccaggcccuccuccacggccucgacuucuccgaggucuccaacguccagcgccucaugcgcaaggagcgccgcgacgacaacgaccucaagcgccuccgcgaccucaaccaggccgucaacaaccucgucgagcucaaguccacccagcagaaguccguccuccgcgucggcacccucaccuccgacgagcuccucguccucgccgccgaccucgagaagcucaaguccaaggucauccgcaccgagcgcccccucuccgccggcgucuacaugggcaaccucuccucccagcagcucgaccagcgccgcgcccuccucuccaugaucggcauguccggcggcaaccagggcgcccgcaccggccgcgacggcgucguccgcgucugggacgucaagaacgccgagcuccucaacaaccaguucggcaccaugcccucccucacccucgccugccucaccaagcagggccaggucgaccucaacgacgccguccaggcccucaccgaccucggccucaucuacaccgccaaguaccccaacaccuccgaccucgaccgccucacccagucccaccccauccucaacaugaucgacaccaagaaguccucccucaacaucuccggcuacaacuucucccucggcgccgccgucaaggccggcgccugcaugcucgacggcggcaacaugcucgagaccaucaaggucuccccccagaccauggacggcauccucaaguccauccucaaggucaagaaggcccucggcauguucaucuccgacacccccggcgagcgcaaccccuacgagaacauccucuacaagaucugccucuccggcgacggcuggcccuacaucgccucccgcaccuccaucaccggccgcgccugggagaacaccgucgucgaccucgaguccgacggcaagccccagaaggccggcuccaacaacuccaacaagucccuccaguccgccggcuucaccgccggccucaccuacucccagcucaugacccucaaggacgccaugcuccagcucgaccccaacgccaagaccuggauggacaucgagggccgccccgaggaccccgucgagaucgcccucuaccagcccuccuccggcugcuacauccacuucuuccgcgagcccaccgaccucaagcaguucaagcaggacgccaaguacucccacggcaucgacgucaccgaccucuucgccgcccagcccggccucaccuccgccgucaucgacgcccucccccgcaacauggucaucaccugccagggcuccgacgacauccgcaagcuccucgagucccagggccgcaaggacaucaagcucaucgacaucgcccucuccaagaucgacucccgcaaguacgagaacgccgucugggaccaguacaaggaccucugccacaugcacaccggcgucgucgucgagaagaagaagcgcggcggcaaggaggagaucaccccccacugcgcccucauggacugcaucauguucgacgccgccgucuccggcggccucaacucccucguccuccgcgccguccucccccgcgacauggucuuccgcaccuccaccccccgcgucguccucuga

SEQ ID NO: 8517 - RNA, 1710 nt, Artificial Sequence
  derived and/or modified CDS sequence (opt2) from LASV(G806-SLE-2010;Clade IV)__AIT17161__NP
auguccgccuccaaggagaucaaguccuuccucuggacccagucccuccgccgcgagcucuccggcuacugcuccaacaucaagcuccaggucgucaaggacgcccaggcccuccuccacggccucgacuucuccgaggucuccaacguccagcgccucaugcgcaaggagcgccgcgacgacaacgaccucaagcgccuccgcgaccucaaccaggccgucaacaaccucgucgagcucaaguccacccagcagaaguccauccuccgcgucggcacccucaccuccgacgaccuccucauccucgccgccgaccucgagaagcucaaguccaaggucacccgcaccgagcgcccccucuccgccggcgucuacaugggcaaccucuccucccagcagcucgaccagcgccgcgcccuccucaacaugaucggcauguccggcuccaaccagggcgcccgcaccggccgcgacggcgucguccgcgucugggacgucaagaacgccgagcuccucaacaaccaguucggcaccaugcccucccucacccucgccugccucaccaagcagggccaggucgaccucaacgacgccguccaggcccucaccgaccucggccucaucuacaccgccaaguaccccaacaccuccgaccucgaccgccucacccagucccaccccauccucaacaugaucgacaccaagaaguccucccucaacaucuccggcuacaacuucucccucggcgccgccgucaaggccggcgccugcaugcucgacggcggcaacaugcucgagaccaucaaggucuccccccagaccauggacggcauccucaaguccauccucaaggucaagaaggcccucggcauguucaucuccgacacccccggcgagcgcaaccccuacgagaacauccucuacaagaucugccucuccggcgacggcuggcccuacaucgccucccgcaccuccaucaccggccgcgccugggagaacaccgucgucgaccucgaguccgacggcaagccccagaaggccggcuccaacuccuccaacaagucccuccaguccgccggccucaccgccggccucaccuacucccagcucaugacccucaaggacgccaugcuccagcucgaccccaacgccaagaccuggauggacaucgagggccgccccgaggaccccgucgagaucgcccucuaccagcccuccuccggcugcuacauccacuucuuccgcgagcccaccgaccucaagcaguucaagcaggacgccaaguacucccacggcaucgacgucaccgaccucuucgccgcccagcccggccucaccuccgccgucaucgacgcccucccccgcaaccucgucaucaccugccagggcuccgacgacauccgcaagcuccucgagucccagggccgcaaggacaucaagcucaucgacaucgcccucuccaagaccgacucccgcaaguacgagaacgccgucugggaccaguacaaggaccucugccacaugcacaccggcaucgucgucgagaagaagaagcgcggcggcaaggaggagaucaccccccacugcgcccucauggacugcaucauguucgacgccgccgucuccggcggccucaacgccuccguccuccgcgccguccucccccgcgacauggucuuccgcaccuccaccccccgcgucguccucuga

SEQ ID NO: 8518 - RNA, 1710 nt, Artificial Sequence
  derived and/or modified CDS sequence (opt2) from LASV(G808-SLE-2010;Clade IV)__AIT17165__NP
auguccgccuccaaggagaucaaguccuuccucuggacccagucccuccgccgcgagcucuccggcuacugcuccaacaucaagcuccaggucgucaaggacgcccaggcccuccuccacggccucgacuucuccgaggucaacaacguccagcgccucaugcgcaaggagcgccgcgacgacaacgaccucaagcgccuccgcgaccucaaccaggccgucaacaaccucgucgagcucaaguccacccagcagaaguccauccuccgcgucggcacccucaccuccgacgaccuccucauccucgccgccgaccucgagaagcucaaguccaaggucacccgcaccgagcgcccccucuccgccggcgucuacaugggcaaccucuccucccagcagcucgaccagcgccgcgcccuccucaacaugaucggcauguccaacggcaaccagggcacccgcgccggccgcgacggcgucguccgcgucugggacgucaagaacgccgagcuccucaacaaccaguucggcaccaugcccucccucacccucgccugccucaccaagcagggccaggucgaccucaacgacgucguccaggcccucaccgaccucggccucaucuacaccgccaaguaccccaacaccuccgaccucgaccgccucacccagucccaccccauccucaacaugaucgacaccaagaaguccucccucaacaucuccggcuacaacuucucccucggcgccgccgucaaggccggcgccugcaugcucgacggcggcaacaugcucgagaccaucaaggucuccccccagaccauggacggcauccucaaguccauccucaaggucaagaaggcccucggcauguucaucuccgacacccccggcgagcgcaaccccuacgagaacauccucuacaagaucugccucuccggcgacggcuggcccuacaucgccucccgcaccuccaucaccggccgcgccugggagaacaccgucgucgaccucgaguccgacggcaagccccagaaggccgacuccuccaacuccaacaagucccuccaguccgccggcuucaccgccggccucaccuacucccagcucaugacccucaaggacgccaugcuccagcucgaccccaacgccaagaccuggauggacaucgagggccgccccgaggaccccgucgaggucgcccucuaccagcccuccuccggcugcuacauccacuucuuccgcgagcccaccgaccucaagcaguucaagcaggacgccaaguacucccacggcaucgacgucaccgaccucuucgccgcccagcccggccucaccuccgccgucaucgacgcccucccccgcaacauggucaucaccugccagggcuccgacgacauccgcaagcuccucgagucccagggccgcaaggacaucaagcucaucgacaucgcccucuccaaggccgacucccgcaaguacgagaacgccgucugggaccagcacaaggaccucugccacaugcacaccggcgucgucgucgagaagaagaagcgcggcggcaaggaggagaucaccccccacugcgcccucauggacugcaucauguacgacgccgccgucuccggcggccucaacaccuccguccuccgcgccguccucccccgcgacauggucuuccgcaccuccaccccccgcgucguccucuga

SEQ ID NO: 8519 - RNA, 1710 nt, Artificial Sequence
  derived and/or modified CDS sequence (opt2) from LASV(Guinea Faranah;Clade IV)__AMZ00380__NP
auguccgucuccaaggaggucaaguccuuccucuggacccagucccuccgccgcgagcucuccggcuacugcuccaacaucaagcuccaggucgucaaggacgcccaggcccuccuccacggccucgacuucuccgaggucuccaacguccagcgccucaugcgcaagcagcgccgcgacgacuccgaccucaagcgccuccgcgaccucaaccaggccgucaacaaccucgucgagcucaaguccacccagcagaaguccguccuccgcgucggcacccucaccuccgacgaccuccucauccucgccgccgaccucgagaagcucaaguccaaggucacccgcaccgagcgcccccucuccgccggcgucuacaugggcaaccucuccucccagcagcucgaccagcgccgcgcccuccucaacaugaucggcaugaacggcggcaaccagggcguccaggccggccgcgacggcgucguccgcgucugggacgucaagaacgccgagcuccucaacaaccaguucggcaccaugcccucccucacccucgccugccucaccaagcagggccaggucgaccucaacgacgccguccaggcccucaccgaccucggccucaucuacaccgccaaguaccccaacaccuccgaccucgaccgccucgcccagucccaccccauccucaacaugaucgacaccaagaaguccucccucaacaucuccggcuacaacuucucccucggcgccgccgucaaggccggcgccugcaugcucgacggcggcaacaugcucgagaccaucaaggucuccccccagaccauggacggcauccucaaggccauccucaaggucaagcgcacccucggcauguucgucuccgacacccccggcgagcgcaaccccuacgagaacauccucuacaagaucugccucuccggcgacggcuggcccuacaucgccucccgcaccuccaucaccggccgcgccugggagaacaccgucgucgaccucgaguccgacggcaagccccagaaggucggcaacaacggcuccaacaagucccuccaguccgccggcuucuccgccggccucaccuacucccagcucaugacccucaaggacgccaugcuccagcucgaccccaacaccaagaccuggauggacaucgagggccgccccgaggaccccgucgaggucgcccucuaccagcccuccuccggcugcuacauccacuucuuccgcgagcccaccgaccucaagcaguucaagcaggacgccaaguacucccacggcaucgacgucaccgaccucuucgccgcccagcccggccucaccuccgccgucaucgaggcccucccccgcaacauggucaucaccugccagggcuccgaggacauccgcaagcuccucgagucccagggccgcaaggacaucaagcucaucgacaucgcccucuccaaggccgacucccgcaaguacgagaacgccgucugggaccagugcaaggaccucugccacaugcacaccggcaucgucgucgagaagaagaagcgcggcggcaaggaggagaucaccccccacugcgcccucauggacugcaucauguucgacgccgccgucuccggcggccucaacacccagguccuccgcgccguccucccccgcgacauggucuuccgcaccuccacccccaaggucguccucuga

SEQ ID NO: 8520 - RNA, 1710 nt, Artificial Sequence
  derived and/or modified CDS sequence (opt2) from LASV(GUINEA Z-185a;Clade IV)__AMZ00376__NP
auguccgucuccaaggagaucaaguccuuccucuggacccagucccuccgccgcgagcucuccggcuacugcuccaacaucaagcuccaggucgucaaggacgcccaggcccuccuccacggccucgacuucuccgaggucuccaacguccagcgccucaugcgcaagcagcgccgcgacgacaacgaccucaagcgccuccgcgaccucaaccaggccgucaacaaccucgucgagcucaaguccacccagcagaaguccguccuccgcgucggcacccucaccuccgacgaccuccucauccucgccgccgaccucgagaagcucaaguccaaggucacccgcaccgagcgcccccucuccgccggcgucuacaugggcaaccucuccucccagcagcucgaccagcgccgcgcccuccucaacaugaucggcauguccggcggcaaccagggcgcccagaccggccgcgacggcgucguccgcaucugggacgucaagaacgccgagcuccucaacaaccaguucggcaccaugcccucccucacccucgccugccucaccaagcagggccaggucgaccucaacgacgucguccaggcccucaccgaccucggccucaucuacaccgccaaguaccccaacaccuccgaccucgaccgccucacccagucccaccccauccucaacaugaucgacaccaagaaguccucccucaacaucuccggcuacaacuucucccucggcgccgccgucaaggccggcgccugcaugcucgacggcggcaacaugcucgagaccaucaaggucuccccccagaccauggacggcauccucaaguccauccucaaggucaagaaggcccucggcauguucaucuccgacacccccggcgagcgcaaccccuacgagaacauccucuacaagaucugccucuccggcgacggcuggcccuacaucgccucccgcaccuccaucaccggccgcgccugggagaacaccgucgucgaccucgaguccggcgagaagccccagaagaucggcuccaacaacuccaacaagugccuccaguccgccggcuucaccgccggccucuccuacucccagcucaugacccucaaggacgccaugcuccagcucgaccccaacgccaagaccuggauggacaucgagggccgccccgaggaccccgucgagaucgcccucuaccagcccuccuccggcugcuacauccacuucuuccgcgagcccaccgaccucaagcaguucaagcaggacgccaaguacucccacggcaucgacgucaccgaccucuucgccgcccagcccggccucaccuccgccgucaucgaggcccucccccgcaacauggucaugaccugccagggcuccgacgacauccgcaagcuccucgagucccagggccgcaaggacaucaagcucaucgacaucgcccucuccaagaccgacucccgcaaguacgagaacgccgucugggaccaguacaaggaccucugccacaugcacaccggcgucgucgucgagaagaagaagaagggcggcaaggaggagaucaccccccacugcgcccucauggacugcaucauguucgacgccgccgucuccggcggccucaacaccuccguccuccgcgccguccucccccgcgacauggucuuccgcaccuccacccccaaggucguccucuga

SEQ ID NO: 8521 - RNA, 1710 nt, Artificial Sequence
  derived and/or modified CDS sequence (opt2) from MOPV/LASV reassortant(IGS-1;Clade IV)__AFY05578__NP
auguccgccuccaaggagaucaaguccuuccucuggacccagucccuccgccgcgagcucuccggcuacugcuccaacaucaagcuccaggucgucaaggacgcccaggcccuccuccacggccucgacuucuccgaggucuccaacguccagcgccucaugcgcaaggagcgccgcgacgacaacgaccucaagcgccuccgcgaccucaaccaggccgucaacaaccucgucgagcucaaguccacccagcagaaguccauccuccgcgucggcacccucaccuccgacgaccuccucauccucgccgccgaccucgagaagcuccgcuccaaggucauccgcaccgagcgcccccucuccgccggcgucuacaugggcaaccucuccucccagcagcucgaccagcgccgcgcccuccucaacaugaucggcauguccggcggcaaccagggcgcccgcgccggccgcgacggcgucguccgcgucugggacgucaagaacgccgagcuccucuccaaccaguucggcaccaugcccucccucacccucgccugccucaccaagcagggccaggucgaccucaacgacgccguccaggcccucaccgaccucggccucaucuacaccgccaaguaccccaacaccuccgaccucgaccgccucacccagucccaccccauccucaacaugaucgacaccaagaaguccucccucaacaucuccggcuacaacuucucccucggcgccgccgucaaggccggcgccugcaugcucgacggcggcaacaugcucgagaccaucaaggucuccccccagaccauggacggcauccucaaguccauccucaaggucaagaaggcccucggcauguucaucuccgacacccccggcgagcgcaaccccuacgagaacauccucuacaagaucugccucuccggcgacggcuggcccuacaucgccucccgcaccuccaucaccggccgcgccugggagaacaccgucgucgaccucgaguccgacggcaagccccagaaggccgacuccaacaacuccuccaagucccuccaguccgccggcuucaccgccggccucaccuacucccagcucaugacccucaaggacgccaugcuccagcucgaccccaacgccaagaccuggauggacaucgagggccgccccgaggaccccgucgagaucgcccucuaccagcccuccuccggcugcuacauccacuucuuccgcgagcccaccgaccucaagcaguucaagcaggacgccaaguacucccacggcaucgacgucaccgaccucuucgccacccagcccggccucaccuccgccgucaucgacgcccucccccgcaacauggucaucaccugccagggcuccgacgacauccgcaagcuccucgagucccagggccgcaaggacaucaagcucaucgacaucgaccucuccaagaccgacucccgcaaguacgagaacgccgucugggaccaguacaaggaccucugccacaugcacaccggcgucgucgucgagaagaagaagcgcggcggcaaggaggagaucaccccccacugcgcccucauggacugcaucauguucgacgccgccgucuccggcggccucaacaccuccguccuccgcgccguccucccccgcgacauggucuuccgcaccuccaccccccgcgucguccucuga

SEQ ID NO: 8522 - RNA, 1710 nt, Artificial Sequence
  derived and/or modified CDS sequence (opt2) from MOPV/LASV reassortant(IGS-11;Clade IV)__AFY05589__NP
auguccgccuccaaggagaucaaguccuuccucuggacccagucccuccgccgcgagcucuccggcuacugcuccaacaucaagcuccaggucgucaaggacgcccaggcccuccuccacggccucgacuucuccgaggucuccaacguccagcgccucaugcgcaaggagcgccgcgacgacaacgaccucaagcgccuccgcgaccucaaccaggccgucaacaaccucgucgagcucaaguccacccagcagaaguccauccuccgcgucggcacccucaccuccgacgaccuccucauccucgccgccgaccucgagaagcucaaguccaaggucauccgcaccgagcgcccccucuccgccggcgucuacaugggcaaccucuccucccagcagcucgaccagcgccgcgcccuccucaacaugaucggcauguccggcggcaaccagggcgcccgcgccggccgcgacggcgucguccgcgucugggacgucaagaacgccgagcuccucuccaaccaguucggcaccaugcccucccucacccucgccugccucaccaagcagggccaggucgaccucaacgacgccguccaggcccucaccgaccucggccucaucuacaccgccaaguaccccaacaccuccgaccucgaccgccucacccagucccaccccauccucaacaugaucgacaccaagaaguccucccucaacaucuccggcuacaacuucucccucggcgccgccgucaaggccggcgccugcaugcucgacggcggcaacaugcucgagaccaucaaggucuccccccagaccauggacggcauccucaaguccauccucaaggucaagaaggcccucggcauguucaucuccgacacccccggcgagcgcaaccccuacgagaacauccucuacaagaucugccucuccggcgacggcuggcccuacaucgccucccgcaccuccaucaccggccgcgccugggagaacaccgucgucgaccucgaguccgacggcaagccccagaaggccgacuccaacaacuccuccaagucccuccaguccgccggcuucaccgccggccucaccuacucccagcucaugacccucaaggacgccaugcuccagcucgaccccaacgccaagaccuggauggacaucgagggccgccccgaggaccccgucgagaucgcccucuaccagcccuccuccggcugcuacauccacuucuuccgcgagcccaccgaccucaagcaguucaagcaggacgccaaguacucccacggcaucgacgucaccgaccucuucgccacccagcccggccucaccuccgccgucaucgacgcccucccccgcaacauggucaucaccugccagggcuccgacgacauccgcaagcuccucgagucccagggccgcaaggacaucaagcucaucgacaucgaccucuccaagaccgacucccgcaaguacgagaacgccgucugggaccaguacaaggaccucugccacaugcacaccggcgucgucgucgagaagaagaagcgcggcggcaaggaggagaucaccccccacugcgcccucauggacugcaucauguucgacgccgccgucuccggcggccucaacaccuccguccuccgcgccguccucccccgcgacauggucuuccgcaccuccaccccccgcgucguccucuga

SEQ ID NO: 8523 - RNA, 1710 nt, Artificial Sequence
  derived and/or modified CDS sequence (opt2) from MOPV/LASV reassortant(IGS-12;Clade IV)__AFY05591__NP
auguccgccuccaaggagaucaaguccuuccucuggacccagucccuccgccgcgagcucuccggcuacugcuccaacaucaagcuccaggucgucaaggacgcccaggcccuccuccacggccucgacuucuccgaggucuccaacguccagcgccucaugcgcaaggagcgccgcgacgacaacgaccucaagcgccuccgcgaccucaaccaggccgucaacaaccucgucgagcucaaguccacccagcagaaguccauccuccgcgucggcacccucaccuccgacgaccuccucauccucgccgccgaccucgagaagcucaaguccaaggucauccgcaccgagcgcccccucuccgccggcgucuacaugggcaaccucuccucccagcagcucgaccagcgccgcgcccuccucaacaugaucggcauguccggcggcaaccagggcgcccgcgccggccgcgacggcgucguccgcgucugggacgucaagaacgucgagcuccucuccaaccaguucggcaccaugcccucccucacccucgccugccucaccaagcagggccaggucgaccucaacgacgccguccaggcccucaccgaccucggccucaucuacaccgccaaguaccccaacaccuccgaccucgaccgccucgcccagucccaccccauccucaacaugaucgacaccaagaaguccucccucaacaucuccggcuacaacuucucccucggcgccgccgucaaggccggcgccugcaugcucgacggcggcaacaugcucgagaccaucaaggucuccccccagaccauggacggcauccucaaguccauccucaaggucaagaaggcccucggcauguucaucuccgacacccccggcgagcgcaaccccuacgagaacauccucuacaagaucugccucuccggcgacggcuggcccuacaucgccucccgcaccuccaucaccggccgcgccugggagaacaccgucgucgaccucgaguccgacggcaagccccagaaggccgacuccaacaacuccuccaagucccuccaguccgccggcuucaccgccggccucaccuacucccagcucaugacccucaaggacgccaugcuccagcucgaccccaacgccaagaccuggauggacaucgagggccgccccgaggaccccgucgagaucgcccucuaccagcccuccuccggcugcuacauccacuucuuccgcgagcccaccgaccucaagcaguucaagcaggacgccaaguacucccacggcaucgacgucaccgaccucuucgccacccagcccggccucaccuccgccgucaucgacgcccucccccgcaacauggucaucaccugccagggcuccgacgacauccgcaagcuccucgagucccagggccgcaaggacaucaagcucaucgacaucgaccucuccaagaccgacucccgcaaguacgagaacgccgucugggaccaguacaaggaccucugccacaugcacaccggcgucgucgucgagaagaagaagcgcggcggcaaggaggagaucaccccccacugcgcccucauggacugcaucauguucgacgccgccgucuccggcggccucaacaccuccguccuccgcgccguccucccccgcgacauggucuuccgcaccuccaccccccgcgucguccucuga

SEQ ID NO: 8524 - RNA, 1710 nt, Artificial Sequence
  derived and/or modified CDS sequence (opt2) from MOPV/LASV reassortant(IGS-14;Clade IV)__AFY05595__NP
auguccgccuccaaggagaucaaguccuuccucuggacccagucccuccgccgcgagcucuccggcuacugcuccaacaucaagcuccaggucgucaaggacgcccaggcccuccuccacggccucgacuucuccgaggucuccaacguccagcgccucaugcgcaaggagcgccgcgacgacaacgaccucaagcgccuccgcgaccucaaccaggccgucaacaaccucgucgagcucaaguccacccagcagaaguccauccuccgcgucggcacccucaccuccgacgaccuccucauccucgccgccgaccucgagaagcucaaguccaaggucauccgcaccgagcgcccccucuccgccggcgucuacaugggcaaccucuccucccagcagcucgaccagcgccgcgcccuccucaacaugaucggcauguccggcggcaaccagggcgcccgcgccggccgcgacggcgucguccgcgucugggacgucaagaacgccgagcuccucuccaaccaguucggcaccaugcccucccucacccucgccugccucaccaagcagggccaggucgaccucaacgacgccguccaggcccucaccgaccucggccucaucuacaccgccaaguaccccaacaccuccgaccucgaccgccucgcccagucccaccccauccucaacaugaucgacaccaagaaguccucccucaacaucuccggcuacaacuucucccucggcgccgccgucaaggccggcgccugcaugcucgacggcggcaacaugcucgagaccaucaaggucuccccccagaccauggacggcauccucaaguccauccucaaggucaagaaggcccucggcauguucaucuccgacacccccggcgagcgcaaccccuacgagaacauccucuacaagaucugccucuccggcgacggcuggcccuacaucgccucccgcaccuccaucaccggccgcgccugggagaacaccgucgucgaccucgaguccgacggcaagccccagaaggccgacuccaacaacuccuccaagucccuccaguccgccggcuucaccgccggccucaccuacucccagcucaugacccucaaggacgccaugcuccagcucgaccccaacgccaagaccuggauggacaucgagggccgccccgaggaccccgucgagaucgcccucuaccagcccuccuccggcugcuacauccacuucuuccgcgagcccaccgaccucaagcaguucaagcaggacgccaaguacucccacggcaucgacgucaccgaccucuucgccacccagcccggccucaccuccgccgucaucgacgcccucccccgcaacauggucaucaccugccagggcuccgacgacauccgcaagcuccucgagucccagggccgcaaggacaucaagcucaucgacaucgaccucuccaagaccgacucccgcaaguacgagaacgccgucugggaccaguacaaggaccucugccacaugcacaccggcgucgucgucgagaagaagaagcgcggcggcaaggaggagaucaccccccacugcgcccucauggacugcaucauguucgacgccgccgucuccggcggccucaacaccuccguccuccgcgccguccucccccgcgacauggucuuccgcaccuccaccccccgcgucguccucuga

SEQ ID NO: 8525 - RNA, 1710 nt, Artificial Sequence
  derived and/or modified CDS sequence (opt2) from MOPV/LASV reassortant(IGS-23;Clade IV)__AFY05610__NP
auguccgccuccaaggagaucaaguccuuccucuggacccagucccuccgccgcgagcucuccggcuacugcuccaacaucaagcuccaggucgucaaggacgcccaggcccuccuccacggccucgacuucuccgaggucuccaacguccagcgccucaugcgcaaggagcgccgcgacgacaacgaccucaagcgccuccgcgaccucaaccaggccgucaacaaccucgucgagcucaaguccacccagcagaaguccauccuccgcgucggcacccucaccuccgacgaccuccucauccucgccgccgaccucgagaagcucaaguccaaggucauccgcaccgagcgcccccucuccgccggcgucuacaugggcaaccucuccucccagcagcucgaccagcgccgcgcccuccucaacaugaucggcauguccggcggcaaccagggcgcccgcgccggccgcgacggcgucguccgcgucugggacgucaagaacgccgagcuccucuccaaccaguucggcaccaugcccucccucacccucgccugccucaccaagcagggccaggucgaccucaacgacgccguccaggcccucaccgaccucggccucaucuacaccgccaaguaccccaacaccuccgaccucgaccgccucacccagucccaccccauccucaacaugaucgacaccaagaaguccucccucaacaucuccggcuacaacuucucccucggcgccgccgucaaggccggcgccugcaugcucgacggcggcaacaugcucgagaccaucaaggucuccccccagaccauggacggcauccucaaguccauccucaaggucaagaaggcccucggcauguucaucuccgacacccccggcgagcgcaaccccuacgagaacauccucuacaagaucugccucuccggcgacggcuggcccuacaucgccucccgcaccuccaucaccggccgcgccugggagaacaccgucgucgaccucgaguccgacggcaagccccagaaggccgacuccaacaacuccuccaagucccuccaguccgccggcuucaccgccggccucaccuacucccagcucaugacccucaaggacgccaugcuccagcucgaccccaacaccaagaccuggauggacaucgagggccgccccgaggaccccgucgagaucgcccucuaccagcccuccuccggcugcuacauccacuucuuccgcgagcccaccgaccucaagcaguucaagcaggacgccaaguacucccacggcaucgacgucaccgaccucuucgccacccagcccggccucaccuccgccgucaucgacgcccucccccgcaacauggucaucaccugccagggcuccgacgacauccgcaagcuccucgagucccagggccgcaaggacaucaagcucaucgacaucgaccucuccaagaccgacucccgcaaguacgagaacgccgucugggaccaguacaaggaccucugccacaugcacaccggcgucgucgucgagaagaagaagcgcggcggcaaggaggagaucaccccccacugcgcccucauggacugcaucauguucgacgccgccgucuccggcggccucaacaccuccguccuccgcgccguccucccccgcgacauggucuuccgcaccuccaccccccgcgucguccucuga

SEQ ID NO: 8526 - RNA, 1716 nt, Artificial Sequence
  derived and/or modified CDS sequence (opt2) from MOPV/LASV reassortant(IGS-27;Clade IV)__AFY05618__NP
auguccgccuccaaggagaucaaguccuuccucuggacccagucccuccgccgcgagcucuccggcuacugcuccaacaucaagcuccaggucgucaaggacgcccaggcccuccuccacggccucgacuucuccgaggucuccaacguccagcgccucaugcgcaaggagcgccgcgacgacaacgaccucaagcgccuccgcgaccucaaccaggccgucaacaaccucgucgagcucaaguccacccagcagaaguccauccuccgcgucggcacccucaccuccgacgaccuccucauccucgccgccgaccucgagaagcuccgcuccaaggucauccgcaccgagcgcccccucuccgccggcgucuacaugggcaaccucuccucccagcagcucgaccagcgccgcgcccuccucaacaugaucggcauguccggcggcaaccagggcgcccgcgccggccgcgacggcgucguccgcgucugggacgucaagaacgccgagcuccucuccaaccaguucggcaccaugcccucccucacccucgccugccucaccaagcagggccaggucgaccucaacgacgccguccaggcccucaccgaccucggccucaucuacaccgccaaguaccccaacaccuccgaccucgaccgccucacccagucccaccccauccucaacaugaucgacaccaagaaguccucccucaacaucuccggcuacaacuucucccucggcgccgccgucaaggccggcgccugcaugcucgacggcggcaacaugcucgagaccaucaaggucuccccccagaccauggacggcauccucaaguccauccucaaggucaagaaggcccucggcauguucaucuccgacacccccggcgagcgcaaccccuacgagaacauccucuacaagaucugccucuccggcgacggcuggcccuacaucgccucccgcaccuccaucaccggccgcgccugggagaacaccgucgucgaccucgaguccgacggcaagccccagaaggccgacuccaacaacuccuccaagucccuccaguccgccggcuucaccgccggccucaccuacucccagcucaugacccucaaggacgccaugcuccagcucgaccccaacgccaagaccuggauggacaucgagggccgccccgaggaccccgucgagaucgcccucuaccagcccuccuccggcugcuacauccacuucuuccgcgagcccaccgaccucaagcagaagcaguucaagcaggacgccaaguacucccacggcaucgacgucaccgaccucuucgccacccagcccggccucaccuccgccgucaucgacgcccucccccgcaacauggucaucaccugccagggcuccgacgacauccgcaagcuccucgagucccagggccgcaaggacaucaagcucaucgacaucgaccucuccaagaccgacucccgcaaguacgagaacgccgucugggaccaguacaaggaccucugccacaugcacaccggcgucgucgucgagaagaagaagcgcggcggcaaggaggagaucaccccccacugcgcccucauggacugcaucauguucgacgccgccgucuccggcggccucaacaccuccguccuccgcgccguccucccccgcgacauggucuuccgcaccuccaccccccgcgucguccucuga

SEQ ID NO: 8527 - RNA, 1710 nt, Artificial Sequence
  derived and/or modified CDS sequence (opt2) from MOPV/LASV reassortant(IGS-3;Clade IV)__AFY05580__NP
auguccgccuccaaggagaucaaguccuuccucuggacccagucccuccgccgcgagcucuccggcuacugcuccaacaucaagcuccaggucgucaaggacgcccaggcccuccuccacggccucgacuucuccgaggucuccaacguccagcgccucaugcgcaaggagcgccgcgacgacaacgaccucaagcgccuccgcgaccucaaccaggccgucaacaaccucgucgagcucaaguccacccagcagaaguccauccuccgcgucggcacccucaccuccgacgaccuccucauccucgccgccgaccucgagaagcuccgcuccaaggucauccgcaccgagcgcccccucuccgccggcgucuacaugggcaaccucuccucccagcagcucgaccagcgccgcgcccuccucaacaugaucggcauguccggcggcaaccagggcgcccgcgccggccgcgacggcgucguccgcgucugggacgucaagaacgccgagcuccucuccaaccaguucggcaccauccccucccucacccucgccugccucaccaagcagggccaggucgaccucaacgacgccguccaggcccucaccgaccucggccucaucuacaccgccaaguaccccaacaccuccgaccucgaccgccucacccagucccaccccauccucaacaugaucgacaccaagaaguccucccucaacaucuccggcuacaacuucucccucggcgccgccgucaaggccggcgccugcaugcucgacggcggcaacaugcucgagaccaucaaggucuccccccagaccauggacggcauccucaaguccauccucaaggucaagaaggcccucggcauguucaucuccgacacccccggcgagcgcaaccccuacgagaacauccucuacaagaucugccucuccggcgacggcuggcccuacaucgccucccgcaccuccaucaccggccgcgccugggagaacaccgucgucgaccucgaguccggcggcaagccccagaaggccgacuccaacaacuccuccaagucccuccaguccgccggcuucaccgccggccucaccuacucccagcucaugacccucaaggacgccaugcuccagcucgaccccaacgccaagaccuggauggacaucgagggccgccccgaggaccccgucgagaucgcccucuaccagcccuccuccggcugcuacauccacuucuuccgcgagcccaccgaccucaagcaguucaagcaggacgccaaguacucccacggcaucgacgucaccgaccucuucgccacccagcccggccucaccuccgccgucaucgacgcccucccccgcaacauggucaucaccugccagggcuccgacgacauccgcaagcuccucgagucccagggccgcaaggacaucaagcucaucgacaucgaccucuccaagaccgacucccgcaaguacgagaacgccgucugggaccaguacaaggaccucugccacaugcacaccggcgucgucgucgagaagaagaagcgcggcggcaaggaggagaucaccccccacugcgcccucauggacugcaucauguucgacgccgccgucuccggcggccucaacaccuccguccuccgcgccguccucccccgcgacauggucuuccgcaccuccaccccccgcgucguccucuga

SEQ ID NO: 8528 - RNA, 1710 nt, Artificial Sequence
  derived and/or modified CDS sequence (opt2) from MOPV/LASV reassortant(IGS-4;Clade IV)__AFY05581__NP
auguccgccuccaaggagaucaaguccuuccucuggacccagucccuccgccgcgagcucuccggcuacugcuccaacaucaagcuccaggucgucaaggacgcccaggcccuccuccacggccucgacuucuccgaggucuccaacguccagcgccucaugcgcaaggagcgccgcgacgacaacgaccucaagcgccuccgcgaccucaaccaggccgucaacaaccucgucgagcucaaguccacccagcagaaguccauccuccgcgucggcacccucaccuccgacgaccuccucauccucgccgccgaccucgagaagcucaaguccaaggucauccgcaccgagcgcccccucuccgccggcgucuacaugggcaaccucuccucccagcagcucgaccagcgccgcgcccuccucaacaugaucggcauguccggcggcaaccagggcgcccgcgccggccgcgacggcgucguccgcgucugggacgucaagaacgccgagcuccucuccaaccaguucggcaccauccccucccucacccucgccugccucaccaagcagggccaggucgaccucaacgacgccguccaggcccucaccgaccucggccucaucuacaccgccaaguaccccaacaccuccgaccucgaccgccucacccagucccaccccauccucaacaugaucgacaccaagaaguccucccucaacaucuccggcuacaacuucucccucggcgccgccgucaaggccggcgccugcaugcucgacggcggcaacaugcucgagaccaucaaggucuccccccagaccauggacggcauccucaaguccauccucaaggucaagaaggcccucggcauguucaucuccgacacccccggcgagcgcaaccccuacgagaacauccucuacaagaucugccucuccggcgacggcuggcccuacaucgccucccgcaccuccaucaccggccgcgccugggagaacaccgucgucgaccucgaguccggcggcaagccccagaaggccgacuccaacaacuccuccaagucccuccaguccgccggcuucaccgccggccucaccuacucccagcucaugacccucaaggacgccaugcuccagcucgaccccaacgccaagaccuggauggacaucgagggccgccccgaggaccccgucgagaucgcccucuaccagcccuccuccggcugcuacauccacuucuuccgcgagcccaccgaccucaagcaguucaagcaggacgccaaguacucccacggcaucgacgucaccgaccucuucgccacccagcccggccucaccuccgccgucaucgacgcccucccccgcaacauggucaucaccugccagggcuccgacgacauccgcaagcuccucgagucccagggccgcaaggacaucaagcucaucgacaucgaccucuccaagaccgacucccgcaaguacgagaacgccgucugggaccaguacaaggaccucugccacaugcacaccggcgucgucgucgagaagaagaagcgcggcggcaaggaggagaucaccccccacugcgcccucauggacugcaucauguucgacgccgccgucuccggcggccucaacaccuccguccucaaggccguccucccccgcgacauggucuuccgcaccuccaccccccgcgucguccucuga

SEQ ID NO: 8529 - RNA, 1710 nt, Artificial Sequence
  derived and/or modified CDS sequence (opt2) from MOPV/LASV reassortant(IGS-9;Clade IV)__AFY05585__NP
auguccgccuccaaggagaucaaguccuuccucuggacccagucccuccgccgcgagcucuccggcuacugcuccaacaucaagcuccaggucgucaaggacgcccaggcccuccuccacggccucgacuucuccgaggucuccaacguccagcgccucaugcgcaaggagcgccgcgacgacaacgaccucaagcgccuccgcgaccucaaccaggccgucaacaaccucgucgagcucaaguccacccagcagaaguccauccuccgcgucggcacccucaccuccgacgaccuccucauccucgccgccgaccucgagaagcuccgcuccaaggucauccgcaccgagcgcccccucuccgccggcgucuacaugggcaaccucuccucccagcagcucgaccagcgccgcgcccuccucaacaugaucggcauguccggcggcaaccagggcgcccgcgccggccgcgacggcgucguccgcgucugggacgucaagaacgccgagcuccucuccaaccaguucggcaccauccccucccucacccucgccugccucaccaagcagggccaggucgaccucaacgacgccguccaggcccucaccgaccucggccucaucuacaccgccaaguaccccaacaccuccgaccucgaccgccucacccagucccaccccauccucaacaugaucgacaccaagaaguccucccucaacaucuccggcuacaacuucucccucggcgccgccgucaaggccggcgccugcaugcucgacggcggcaacaugcucgagaccaucaaggucuccccccagaccauggacggcauccucaaguccauccucaaggucaagaaggcccucggcauguucaucuccgacacccccggcgagcgcaaccccuacgagaacauccucuacaagaucugccucuccggcgacggcuggcccuacaucgccucccgcaccuccaucaccggccgcgccugggagaacaccgucgucgaccucgaguccgacggcaagccccagaaggccgacuccaacaacuccuccaagucccuccaguccgccggcuucaccgccggccucaccuacucccagcucaugacccucaaggacgccaugcuccagcucgaccccaacgccaagaccuggauggacaucgagggccgccccgaggaccccgucgagaucgcccucuaccagcccuccuccggcugcuacauccacuucuuccgcgagcccaccgaccucaagcaguucaagcaggacgccaaguacucccacggcaucgacgucaccgaccucuucgccacccagcccggccucaccuccgccgucaucgacgcccucccccgcaacauggucaucaccugccagggcuccgacgacauccgcaagcuccucgagucccagggccgcaaggacaucaagcucaucgacaucgaccucuccaagaccgacucccgcaaguacgagaacgccgucugggaccaguacaaggaccucugccacaugcacaccggcgucgucgucgagaagaagaagcgcggcggcaaggaggagaucaccccccacugcgcccucauggacugcaucauguucgacgccgccgucuccggcggccucaacaccuccguccuccgcgccguccucccccgcgacauggucuuccgcaccuccaccccccgcgucguccucuga

SEQ ID NO: 8530 - RNA, 1710 nt, Artificial Sequence
  derived and/or modified CDS sequence (opt2) from LASV(LM032-SLE-2010;Clade IV)__AIT17803__NP
auguccgccuccaaggagaucaaguccuuccucuggacccagucccuccgccgcgagcucuccggcuacugcuccaacaucaagcuccaggucgucaaggacgcccaggcccuccuccacggccucgacuucuccgaggucuccaacguccagcgccucaugcgcaaggagcgccgcgacgacaacgaccucaagcgccuccgcgaccucaaccaggccgucaacaaccucgucgagcucaaguccacccagcagaaguccauccuccgcgucggcacccucaccuccgacgaccuccucauccucgccgccgaccucgagaagcucaaguccaaggucauccgcaccgagcgcccccucuccgccggcgucuacaugggcaaccucuccucccagcagcucgaccagcgccgcgcccuccucuccaugaucggcauguccggcggcucccaggaggcccgcgccggccgcgacggcgucguccgcgucugggacgucaagaacgccgagcuccucaacaaccaguucggcaccaugcccucccucacccucgccugccucaccaagcagggccaggucgaccucaacgacgccguccaggcccucaccgaccucggccucaucuacaccgccaaguaccccaacaccuccgaccucgaccgccucacccagucccaccccauccucaacaugaucgacaccaagaaguccucccucaacaucuccggcuacaacuucucccucggcgccgccgucaaggccggcgccugcaugcucgacggcggcaacaugcucgagaccaucaaggucuccccccagaccgucgacggcauccucaaguccauccucaaggucaagaaggcccucggcauguucaucuccgacacccccggcgagcgcaaccccuacgagaacauccucuacaagaucugccucuccggcgacggcuggcccuacaucgccucccgcaccuccaucaccggccgcgccugggagaacaccgucgucgaccucgaguccgacggcaagccccagaaggccggcuccaacaacuccaacaagucccuccaguccgccggcuucaccgccggccucaccuacucccagcucaugacccucaaggacgccaugcuccagcucgaccccaacgccaagaccuggauggacaucgagggccgccccgaggaccccgucgagaucgcccucuaccagcccuccuccggcugcuacauccacuucuuccgcgagcccaccgaccucaagcaguucaagcaggacgccaaguacucccacggcaucgacgucaccgaccucuucgccgcccagcccggccucaccuccgccgucaucgacgcccucccccgcaacauggucaucaccugccagggcuccgacgacauccgcaagcuccucgagucccagggccgcaaggacaucaagcucaucgacaucgcccucuccaagaccgacucccgcaaguacgagaacgccgucugggaccaguacaaggaccucugccacaugcacaccggcgucgucgucgagaagaagaagaagggcggcaaggaggagaucaccccccacugcgcccucauggacugcaucauguucgacgccgccgucuccggcggccucaacaccuccguccuccgcgccguccucccccgcgacauggucuuccgcaccuccaccccccgcgucguccucuga

SEQ ID NO: 8531 - RNA, 1710 nt, Artificial Sequence
  derived and/or modified CDS sequence (opt2) from LASV(LM395-SLE-2009;Clade IV)__AIT17811__NP
auguccgccuccaaggagaucaaguccuuccucuggacccagucccuccgccgcgagcucuccggcuacugcuccaacaucaagcuccaggucgucaaggacgcccaggcccuccuccacggccucgacuucuccgaggucuccaacguccagcgccucaugcgcaaggagcgccgcgacgacaacgaccucaagcgccuccgcgaccucaaccaggccgucaacaaccucgucgagcucaaguccacccagcagaaguccauccuccgcgucggcacccucaccuccgacgaccuccucauccucgccgccgaccucgagaagcucaaguccaaggucacccgcaccgagcgcccccucuccgccggcgucuacaugggcaaccucuccucccagcagcucgaccagcgccgcgcccuccucaacaugaucggcauguccggcuccaaccagggcgcccgcgccggccgcgacggcgucguccgcgucugggacgucaagaacgccgagcuccucaacaaccaguucggcaccaugcccucccucacccucgccugccucaccaagcagggccaggucgaccucaacgacgccguccaggcccucaccgaccucggccucaucuacaccgccaaguaccccaacaccuccgaccucgaccgccucacccagucccaccccauccucaacaugaucgacaccaagaaguccucccucaacaucuccggcuacaacuucucccucggcgccgccgucaaggccggcgccugcaugcucgacggcggcaacaugcucgagaccaucaaggucuccccccagaccauggacggcauccucaaguccauccucaaggucaagaaggcccucggcauguucaucuccgacacccccggcgagcgcaaccccuacgagaacauccucuacaagaucugccucuccggcgacggcuggcccuacaucgccucccgcaccuccaucaccggccgcgccugggagaacaccgucgucgaccucgaguccgacggcaagccccagaaggccggcuccaacggcuccaacaagucccuccaguccgccggcuucaccgccggccucaccuacucccagcucaugacccucaaggacgccaugcuccagcucgaccccaacgccaagaccuggauggacaucgagggccgccccgaggaccccgucgagaucgccuucuaccagcccuccuccggcugcuacauccacuucuuccgcgagcccaccgaccucaagcaguucaagcaggacgccaaguacucccacggcaucgacgucaccgaccucuucgccgcccagcccggccucaccuccgccgucaucgacgcccucccccgcaaccucgucaucaccugccagggcuccgacgacauccgcaagcucuucgagucccagggccgcaaggacaucaagcucaucgacaucgcccucuccaagaccgacucccgcaaguacgagaacgccgucugggaccaguacaaggaccucugccacaugcacaccggcaucgucgucgagaagaagaagcgcggcggcaaggaggagaucaccccccacugcgcccucauggacugcaucauguucgacgccgccgucuccggcggccucaacgccuccguccuccgcgccguccucccccgcgacauggucuuccgcaccuccaccccccgcgucguccucuga

SEQ ID NO: 8532 - RNA, 1710 nt, Artificial Sequence
  derived and/or modified CDS sequence (opt2) from LASV(LM765-SLE-2012;Clade IV)__AIT17815__NP
auguccgccuccaaggagaucaaguccuuccucuggacccagucccuccgccgcgagcucuccggcuacugcuccaacaucaagcuccaggucgucaaggacgcccaggcccuccuccacggccucgacuucuccgaggucuccaacguccagcgccucaugcgcaaggagcgccgcgacgacaacgaccucaagcgccuccgcgaccucaaccaggccgucaacaaccucgucgagcucaaguccacccagcagaaguccauccuccgcgucggcacccucaccuccgacgaccuccucauccucgccgccgaccucgagaagcucaaguccaaggucacccgcaccgagcgcccccucuccgccggcgucuacaugggcaaccucuccucccagcagcucgaccagcgccgcgcccuccucgacaugaucggcauguccggcuccaaccagggcgcccgcgccggccgcgacggcgucguccgcgucugggacgucaagaacgccgagcuccucaacaaccaguucggcaccaugcccucccucacccucgccugccucaccaagcagggccaggucgaccucaacgacgccguccaggcccucaccgaccucggccucaucuacaccgccaaguaccccaacaccuccgaccucgaccgccucacccagucccaccccauccucaacaugaucgacaccaagaaguccucccucaacaucuccggcuacaacuucucccucggcgccgccgucaaggccggcgccugcaugcucgacggcggcaacaugcucgagaccaucaaggucuccccccagaccauggacggcauccucaaguccauccucaaggucaagaaggcccucggcauguucaucuccgacgcccccggcgagcgcaaccccuacgagaacauccucuacaagaucugccucuccggcgacggcuggcccuacaucgccucccgcaccuccaucaccggccgcgccugggagaacaccgucgucgaccucgaguccgacggcaagccccagaaggccggcuccaacggcuccaacaagucccuccaguccgccggcuucaccgccggccucaccuacucccagcucaugacccucaaggacgccaugcuccagcucgaccccaacgccaagaccuggauggacaucgagggccgccccgaggaccccgucgagaucgcccucuaccagcccuccuccggcugcuacauccacuucuuccgcgagcccaccgaccucaagcaguucaagcaggacgccaaguacucccacggcaucgacgucaccgaccucuucgccgcccagcccggccucaccuccgccgucaucgacgcccucccccgcaacauggucaucaccugccagggcuccgacgacauccgcaagcucuucgagucccagggccgcaaggacaucaagcucaucgacaucgcccucuccaagaccgacucccgcaaguacgagaacgccgucugggaccaguacaaggaccucugccacaugcacaccggcaucgucgucgagaagaagaagcgcggcggcaaggaggagaucaccccccacugcgcccucauggacugcaucauguucgacgccgccgucuccggcggccucaacaccuccguccuccgcgccguccucccccgcgacauggucuuccgcaccuccaccccccgcgucguccucuga

SEQ ID NO: 8533 - RNA, 1710 nt, Artificial Sequence
  derived and/or modified CDS sequence (opt2) from LASV(LM774-SLE-2012;Clade IV)__AIT17821__NP
auguccgccuccaaggagaucaaguccuuccucuggacccagucccuccgccgcgagcucuccggcuacugcuccaacaucaagcuccaggucgucaaggacgcccaggcccuccuccacggccucgacuucuccgaggucuccaacguccagcgccucaugcgcaaggagcgccgcgacgacaacgaccucaagcgccuccgcgaccucaaccaggccgucaacaaccucgucgagcucaaguccacccagcagaaguccauccuccgcgucggcacccucaccuccgacgaccuccucauccucgccgccgaccucgagaagcucaaguccaaggucauccgcaccgagcgcccccucuccgccggcgucuacaugggcaaccucuccucccagcagcucgaccagcgccgcgcccuccucuccaugaucggcauguccggcggcaaccagggcgcccgcgccggccgcgacggcgucguccgcgucugggacgucaagaacgccgagcuccucaacaaccaguucggcaccaugcccucccucacccucgccugccucaccaagcagggccaggucgaccucaacgacgccguccaggcccucaccgaccucggccucaucuacaccgccaaguaccccaacaccuccgaccucgaccgccucacccagucccaccccauccucaacaugaucgacaccaagaaguccucccucaacaucuccggcuacaacuucucccucggcgccgccgucaaggccggcgccugcaugcucgacggcggcaacaugcucgagaccaucaaggucuccccccagaccgucgacggcauccucaaguccauccucaaggucaagaaggcccucggcauguucaucuccgacacccccggcgagcgcaaccccuacgagaacauccucuacaagaucugccucuccggcgacggcuggcccuacaucgccucccgcaccuccaucaccggccgcgccugggagaacaccgucgucgaccucgaguccgacggcaagccccagaagaccggcuccaacaacuccaacaagucccuccaguccgccggcuucaccgccggccucaccuacucccagcucaugacccucaaggacgccaugcuccagcucgaccccaacgccaagaccuggauggacaucgagggccgccccgaggaccccgucgaggucgcccucuaccagcccuccuccggcugcuacauccacuucuuccgcgagcccaccgaccucaagcaguucaagcaggacgccaaguacucccacggcaucgacgucaccgaccucuucgccgcccagcccggccucaccuccgccgucaucgacgcccucccccgcaacauggucaucaccugccagggcuccgacgacauccgcaagcuccucgagucccagggccgcaaggacaucaagcucaucgacaucgcccucuccaagaccgacucccgcaaguacgagaacgccgucugggaccaguacaaggaccucugccacaugcacaccggcgucgucgucgagaagaagaagcgcggcggcaaggaggagaucaccccccacugcgcccucauggacugcaucauguucgacgccgccgucuccggcggccucaacaccuccguccuccgcgccguccucccccgcgacauggucuuccgcaccuccaccccccgcgucguccucuga

SEQ ID NO: 8534 - RNA, 1710 nt, Artificial Sequence; identical to SEQ ID NO: 8482
  derived and/or modified CDS sequence (opt2) from LASV(LM776-SLE-2012;Clade IV)__AIT17825__NP

SEQ ID NO: 8535 - RNA, 1710 nt, Artificial Sequence
  derived and/or modified CDS sequence (opt2) from LASV(Mad39;Clade IV)__ANH09723__NP
auguccgccuccaaggagaucaaguccuuccucuggacccagucccuccgccgcgagcucuccggcuacugcuccaacaucaagcuccaggucgucaaggacgcccaggcccuccuccacggccucgacuucuccgaggucuccaacguccagcgccucaugcgcaagcagcgccgcgacgacaacgaccucaagcgccuccgcgaccucaaccaggccgucaacaaccucgucgagcucaaguccacccagcagaaguccguccuccgcgucggcacccucaccuccgacgaccuccucacccucgccgccgaccucgagaagcucaaguccaaggucacccgcaccgagcgcccccucaccgccggcgucuacaugggcaaccucuccucccagcagcucgaccagcgccgcgcccuccucaacaugaucggcauguccggcggcaaccagggcgcccgcaccggccgcgacggcgucguccgcgucugggacgucaagaacgccgagcuccucaacaaccaguucggcaccaugcccucccucacccucgccugccucaccaagcagggccaggucgaccucaacgacgucguccaggcccucaccgaccucggccucaucuacaccgccaaguaccccaacaccuccgaccucgaccgccucacccagucccaccccauccucaacaugaucgacaccaacaaguccucccucaacaucuccggcuacaacuucucccucggcgccgccgucaaggccggcgccugcaugcucgacggcggcaacaugcucgagaccaucaaggucuccccccagaccauggacggcauccucaaguccauccucaaggucaagaagucccucggcauguucaucuccgacacccccggcgagcgcaaccccuacgagaacauccucuacaagaucugccucuccggcgacggcuggcccuacaucgccucccgcaccuccaucaccggccgcgccugggagaacaccgucgucgaccucgaguccggcggcaagccccagaaggccggcuccaacaacuccaacaagucccuccaguccgccggcuucgccgccggccucaccuacucccagcucaugacccucaaggacgccaugcuccagcucgaccccaacgccaagaccuggauggacaucgagggccgccccgaggaccccgucgagaucgcccucuaccagcccaucuccggcugcuacauccacuucuuccgcgagcccaccgaccucaagcaguucaagcaggacgccaaguacucccacggcaucgacgucaccgaccucuucgccgcccagcccggccucaccuccgccgucaucgaggcccucccccgcaacauggucaucaccugccagggcuccgacgacauccgcaagcucuucgagucccagggccgcaaggacaucaagcucaucgacaucgcccucuccaagaccgacucccgcaaguacgagaacgccgucugggaccaguacaaggaccucugccacaugcacaccggcgucgucgucgagaagaagaagaagggcggcaaggaggagaucaccccccacugcgcccucauggacugcaucauguucgacgccgccgucuccggcggccucaacacccucguccuccgcgccguccucccccgcgacauggucuuccgcaccuccacccccaaggucguccucuga

SEQ ID NO: 8536 - RNA, 1710 nt, Artificial Sequence
  derived and/or modified CDS sequence (opt2) from LASV(Mad41;Clade IV)__ANH09725__NP
auguccgccuccaaggagaucaaguccuuccucuggacccagucccuccgccgcgagcucuccggcuacugcuccaacaucaagcuccaggucgucaaggacgcccaggcccuccuccacggccucgacuucuccgaggucuccaacguccagcgccucaugcgcaagcagcgccgcgacgacaacgaccucaagcgccuccgcgaccucaaccaggccgucaacaaccucgucgagcucaaguccacccagcagaaguccguccuccgcgucggcacccucaccuccgacgaccuccucauccucgccgccgaccucgagaagcucaaguccaaggucacccgcaccgagcgcccccucuccgccggcgucuacaugggcaaccucuccucccagcagcucgaccagcgccgcgcccuccucaacaugaucggcauguccggcggcaaccagggcgcccgcgccggccgcgacggcgucguccgcgucugggacgucaagaacgccgaccuccucaacaaccaguucggcaccaugcccucccucacccucgccugccucaccaagcagggccaggucgaccucaacgacgucguccaggcccucaccgaccucggccucaucuacaccgccaaguaccccaacaccuccgaccucgaccgccucacccagucccaccccauccucaacaugaucgacaccaacaaguccucccucaacaucuccggcuacaacuucucccucggcgccgccgucaaggccggcgccugcaugcucgacggcggcaacaugcucgagaccaucaaggucuccccccagaccauggacggcauccucaaguccauccucaaggucaagaagucccucggcauguucaucuccgacacccccggcgagcgcaaccccuacgagaacauccucuacaagaucugccucuccggcgacggcuggcccuacaucgccucccgcaccuccaucaccggccgcgccugggagaacaccgucgucgaccucgaguccggcggcaagccccagaaggccggcuccaacaacuccaacaagucccuccaguccgccggcuucgccgccggccucaccuacucccagcucaugacccucaaggacgccaugcuccagcucgaccccaacgccaagaccuggauggacaucgagggccgccccgaggaccccgucgagaucgcccucuaccagcccaucuccggcugcuacauccacuucuuccgcgagcccaccgaccucaagcaguucaagcaggacgccaaguacucccacggcaucgacgucaccgaccucuucgccgcccagcccggccucaccuccgccgucaucgaggcccucccccgcaacauggucaucaccugccagggcuccgacgacauccgcaagcuccucgagucccagggccgcaaggacaucaagcucaucgacaucgcccucuccaagaccgacucccgcaaguacgagaacgccgucugggaccaguacaaggaccucugccacaugcacaccggcgucgucgucgagaagaagaagcgcggcggcaaggaggagaucaccccccacugcgcccucauggacugcaucauguucgacgccgccgucuccggcggccucaacacccucguccuccgcgccguccucccccgcgacauggucuuccgcaccuccacccccaaggucguccucuga

SEQ ID NO: 8537 - RNA, 1710 nt, Artificial Sequence
  derived and/or modified CDS sequence (opt2) from LASV(Mad63;Clade IV)__ANH09729__NP
auguccgccuccaaggagaucaaguccuuccucuggacccagucccuccgccgcgagcucuccggcuacugcuccaacaucaagcuccaggucgucaaggacgcccaggcccuccuccacggccucgacuucuccgaggucuccaacguccagcgccucaugcgcaagcagcgccgcgacgacuccgaccucaagcgccuccgcgaccucaaccaggccgucaacaaccucgucgagcucaaguccacccagcagaaguccguccuccgcgucggcacccucaccuccgacgaccuccucacccucgccgccgaccucgagaagcucaaguccaaggucacccgcaccgagcgcccccucuccgccggcgucuacaugggcaaccucuccucccagcagcucgaccagcgccgcgcccuccucaacaugaucggcauguccggcggcaaccagggcgcccgcaccggccgcgacggcgucguccgcgucugggacgucaagaacgccgaccuccucaacaaccaguucggcaccaugcccucccucacccucgccugccucaccaagcagggccaggucgaccucaacgacgucguccaggcccucaccgaccucggccucaucuacaccgccaaguaccccaacaccuccgaccucgaccgccucacccagucccaccccauccucaacaugaucgacaccaacaaguccucccucaacaucuccggcuacaacuucucccucggcgccgccgucaaggccggcgccugcaugcucgacggcggcaacaugcucgagaccaucaaggucuccccccagaccauggacggcauccucaaguccauccucaaggucaagaagucccucggcauguucaucuccgacacccccggcgagcgcaaccccuacgagaacauccucuacaagaucugccucuccggcgacggcuggcccuacaucgccucccgcaccuccaucaccggccgcgccugggagaacaccgucgucgaccucgaguccggcggcaagccccagcgcgccggcuccaacaacuccaacaagucccuccaguccgccggcuucgccgccggccucaccuacucccagcucaugacccucaaggacgccaugcuccagcucgaccccaacgccaagaccuggauggacaucgagggccgccccgaggaccccgucgagaucgcccucuaccagcccaccuccggcugcuacauccacuucuuccgcgagcccaccgaccucaagcaguucaagcaggacgccaaguacucccacggcaucgacgucaccgaccucuucgccgcccagcccggccucaccuccgccgucaucgaggcccucccccgcaacauggucaucaccugccagggcuccgacgacauccgcaagcuccucgagucccagggccgcaaggacaucaagcucaucgacaucgcccucuccaagaccgacucccgcaaguacgagaacgccgucugggaccaguacaaggaccucugccacaugcacaccggcgucgucgucgagaagaagaagaagggcggcaaggaggagaucaccccccacugcgcccucauggacugcaucauguucgacgccgccgucuccggcggccucaacacccucguccuccgcgccguccucccccgcgacauggucuuccgcaccuccacccccaaggucguccucuga

SEQ ID NO: 8538 - RNA, 1710 nt, Artificial Sequence
  derived and/or modified CDS sequence (opt2) from LASV(Mad69;Clade IV)__ANH09731__NP
auguccgccuccaaggagaucaaguccuuccucuggacccagucccuccgccgcgagcucuccggcuacugcuccaacaucaagcuccaggucgucaaggacgcccaggcccuccuccacggccucgacuucuccgaggucuccaacguccagcgccucaugcgcaagcagcgccgcgacgacaacgaccucaagcgccuccgcgaccucaaccaggccgucaacaaccucgucgagcucaaguccacccagcagaaguccguccuccgcgucggcacccucaccuccgacgaccuccucacccucgccgccgaccucgagaagcucaaguccaaggucacccgcaccgagcgcccccucuccgccggcgucuacaugggcaaccucuccucccagcagcucgaccagcgccgcgcccuccucaacaugaucggcaugaccggcggcaaccagggcgcccgcaccggccgcgacggcgucguccgcgucugggacgucaagaacgccgaccuccucaacaaccaguucggcaccaugcccucccucacccucgccugccucaccaagcagggccaggucgaccucaacgacgucguccaggcccucaccgaccucggccucaucuacaccgccaaguaccccaacaccuccgaccucgaccgccucacccagucccaccccauccucaacaugaucgacaccaacaaguccucccucaacaucuccggcuacaacuucucccucggcgccgccgucaaggccggcgccugcaugcucgacggcggcaacaugcucgagaccaucaaggucuccccccagaccauggacggcauccucaaguccauccucaaggucaagaagucccucggcauguucaucuccgacacccccggcgagcgcaaccccuacgagaacauccucuacaagaucugccucuccggcgacggcuggcccuacaucgccucccgcaccuccaucaccggccgcgccugggagaacaccgucgucgaccucgaguccggcggcaagccccagcgcgccggcuccaacaacuccaacaagucccuccaguccgccggccucgccgccggccucaccuacucccagcucaugacccucaaggacgccaugcuccagcucgaccccaacgccaagaccuggauggacaucgagggccgccccgaggaccccgucgagaucgcccucuaccagcccaccuccggcugcuacauccacuucuuccgcgagcccaccgaccucaagcaguucaagcaggacgccaaguacucccacggcaucgacgucaccgaccucuucgccgcccagcccggccucaccuccgccgucaucgaggcccucccccgcaacauggucaucaccugccagggcuccgacgacauccgcaagcuccucgagucccagggccgcaaggacaucaagcucaucgacaucgcccucuccaagaccgacucccgcaaguacgagaacgccgucugggaccaguacaaggaccucugccacaugcacaccggcgucgucgucgagaagaagaagaagggcggcaaggaggagaucaccccccacugcgcccucauggacugcaucauguucgacgccgccgucuccggcggccucaacacccucguccuccgcgccguccucccccgcgacauggucuuccgcaccuccacccccaaggucguccucuga

SEQ ID NO: 8539 - RNA, 1710 nt, Artificial Sequence
  derived and/or modified CDS sequence (opt2) from LASV(Mad83;Clade IV)__ANH09733__NP
auguccgccuccaaggagaucaaguccuuccucuggacccagucccuccgccgcgagcucuccggcuacugcuccaacaucaagcuccaggucgucaaggacgcccaggcccuccuccacggccucgacuucuccgaggucuccaacguccagcgccucaugcgcaagcagcgccgcgacgacaacgaccucaagcgccuccgcgaccucaaccaggccgucaacaaccucgucgagcucaaguccacccagcagaaguccguccuccgcgucggcacccucaccuccgacgaccuccucacccucgccgccgaccucgagaagcucaaguccaaggucacccgcaccgagcgcccccucuccgccggcgucuacaugggcaaccucuccucccagcagcucgaccagcgccgcgcccuccucaacaugaucggcauguccggcggcaaccagggcgcccgcaccggccgcgacggcgucguccgcgucugggacgucaagaacgccgaccuccucaacaaccaguucggcaccaugcccucccucacccucgccugccucaccaagcagggccaggucgaccucaacgacgucguccaggcccucaccgaccucggccucaucuacaccgccaaguaccccaacaccuccgaccucgaccgccucacccagucccaccccauccucaacaugaucgacaccaacaaguccucccucaacaucuccggcuacaacuucucccucggcgccgccgucaaggccggcgccugcaugcucgacggcggcaacaugcucgagaccaucaaggucuccccccagaccauggacggcauccucaaguccauccucaaggucaagaagucccucggcauguucaucuccgacacccccggcgagcgcaaccccuacgagaacauccucuacaagaucugccucuccggcgacggcuggcccuacaucgccucccgcaccuccaucaccggccgcgccugggagaacaccgucgucgaccucgaguccggcggcaagccccagcgcgccggcuccaacaacuccaacaagucccuccaguccgccggcuucgccgccggccucaccuacucccagcucaugacccucaaggacgccaugcuccagcucgaccccaacgccaagaccuggauggacaucgagggccgccccgaggaccccgucgagaucgccuucuaccagcccaucuccggcugcuacauccacuucuuccgcgagcccaccgaccucaagcaguucaagcaggacgccaaguacucccacggcaucgacgucaccgaccucuucgccgcccagcccggccucaccuccgccgucaucgaggcccucccccgcaacauggucaucaccugccagggcuccgacgacauccgcaagcuccucgagucccagggccgcaaggacaucaagcucaucgacaucgcccucuccaagaccgacucccgcaaguacgagaacgccgucugggaccaguacaaggaccucugccacaugcacaccggcgucgucgucgagaagaagaagaagggcggcaaggaggagaucaccccccacugcgcccucauggacugcaucauguucgacgccgccgucuccggcggccucaacacccucguccuccgcgccguccucccccgcgacauggucuuccgcaccuccacccccaaggucguccucuga

SEQ ID NO: 8540 - RNA, 1710 nt, Artificial Sequence
  derived and/or modified CDS sequence (opt2) from LASV(NL;Clade IV)__AAO59513__NP
auguccgccuccaaggaggucaaguccuuccucuggacccagucccuccgccgcgagcucuccggcuacugcuccaacaucaagcuccaggucgucaaggacgcccaggcccuccuccacggccucgacuucuccgaggucuccaacguccagcgccucaugcgcaaggagcgccgcgacgacuccgaccucaagcgccuccgcgaccucaaccaggccgucaacaaccucgucgagcucaaguccacccagcagaaguccguccuccgcgucggcacccucaccuccgacgaccuccucguccucgccgccgaccucgagaagcuccgcuccaaggucacccgcaccgagcgcccccucuccgccggcgucuacaugggcaaccucuccucccagcagcucgaccagcgccgcgcccuccucuccaugaucggcaugaacggcuccaaccagggcgcccgcgccggccgcgacggcgucguccgcgucugggacgucaagaacgccgagcuccucaacaaccaguucggcaccaugcccucccucacccucgccugccucaccaagcagggccaggucgaccucaacgacgccguccaggcccucaccgaccucggccucaucuacaccgccaaguaccccaacaccuccgaccucgaccgccucacccagucccaccccauccucaacaugaucgacaccaagaaguccucccucaacgucuccggcuacaacuucucccucggcgccgccgucaaggccggcgccugcaugcucgacggcggcaacaugcucgagaccaucaaggucuccccccagaccauggacggcauccucaaguccauccucaaggucaagaaggcccucggcauguucaucuccgacacccccggcgagcgcaaccccuacgagaacauccucuacaagaucugccucuccggcgacggcuggcccuacaucgccucccgcaccuccaucaccggccgcgccugggagaacaccgucgucgaccucgaguccgacgagaagccccagaaggccggcuccaacaacuccaacaagucccuccaguccgccggcuucaccgccggccucaccuacucccagcucaugacccucaaggacgccaugcuccagcucgaccccaacgccaagaccuggauggacaucgagggccgccccgaggaccccgucgagaucgcccucuaccagcccuccuccggcugcuacauccacuucuuccgcgagcccaccgaccucaagcaguucaagcaggacgccaaguacucccacggcaucgacaucaccgaccucuucgccgcccagcccggccucaccuccgccgucaucgacgcccucccccgcaacauggucaucaccugccagggcuccgacgacauccgcaagcuccucgagucccagggccgcaaggacaucaagcucaucgacaucgcccucaacaaggccgacucccgcaaguacgagaacgccgucugggaccaguacaaggaccucugccacaugcacaccggcgucgucgucgagaagaagaagcgcggcggcaaggaggagaucaccccccacugcgcccucauggacugcaucauguucgacgccgccgucuccggcggccucaagacccucguccuccgcgccguccucccccgcgacauggucuuccgcaccuccaccccccgcgucguccucuga

SEQ ID NO: 8541 - RNA, 1710 nt, Artificial Sequence
  derived and/or modified CDS sequence (opt2) from LASV(Z0947-SLE-2011;Clade IV)__AIT17841__NP
auguccgccuccaaggagaucaaguccuuccucuggacccagucccuccgccgcgagcucuccggcuacugcuccaacaucaagcuccaggucgucaaggacgcccaggcccuccuccacggccucgacuucuccgaggucuccaacguccagcgccucaugcgcaaggagcgccgcgacgacaacgaccucaagcgccuccgcgaccucaaccaggccgucaacaaccucgucgagcucaaguccacccagcagaaguccauccuccgcgucggcacccucaccuccgacgaccuccucauccucgccgccgaccucgagaagcucaaguccaaggucacccgcaccgagcgcccccucuccgccggcgucuacaugggcaaccucuccucccagcagcucgaccagcgccgcgcccuccucaacaugaucggcauguccggcuccaaccagggcgcccgcaccggccgcgacggcgucguccgcgucugggacgucaagaacgccgagcuccucaacaaccaguucggcaccaugcccucccucacccucgccugccucaccaagcagggccaggucgaccucaacgacgccguccaggcccucaccgaccucggccucaucuacaccgccaaguaccccaacaccuccgaccucgaccgccucacccagucccaccccauccucaacaugaucgacaccaagaaguccucccucaacaucuccggcuacaacuucucccucggcgccgccgucaaggccggcgccugcaugcucgacggcggcaacaugcucgagaccaucaaggucuccccccagaccauggacggcauccucaaguccauccucaaggucaagaaggcccucggcauguucaucuccgacgcccccggcgagcgcaaccccuacgagaacauccucuacaagaucugccucuccggcgacggcuggcccuacaucgccucccgcaccuccaucaccggccgcgccugggagaacaccgucgucgaccucgaguccgacggcaagccccagaaggccggcuccaacggcuccaacaagucccuccaguccgccggcuucaccgccggccucaccuacucccagcucaugacccucaaggacgccaugcuccagcucgaccccaacgccaagaccuggauggacaucgagggccgccccgaggaccccgucgagaucgcccucuaccagcccuccuccggcugcuacauccacuucuuccgcgagcccaccgaccucaagcaguucaagcaggacgccaaguacucccacggcaucgacgucaccgaccucuucgccgcccagcccggccucaccuccgccgucaucgacgcccucccccgcaacauggucaucaccugccagggcuccgacgacauccgcaagcucuucgagucccagggccgcaaggacaucaagcucaucgacaucgcccucuccaagaccgacucccgcaaguacgagaacgccgucugggaccaguacaaggaccucugccacaugcacaccggcaucgucgucgagaagaagaagcgcggcggcaaggaggagaucaccccccacugcgcccucauggacugcaucauguucgacgccgccgucuccggcggccucaacaccuccguccuccgcgccguccucccccgcgacauggucuuccgcaccuccaccccccgcgucguccucuga

SEQ ID NO: 8542 - RNA, 1710 nt, Artificial Sequence
  derived and/or modified CDS sequence (opt2) from LASV(Z0948-SLE-2011;Clade IV)__AIT17845__NP
auguccgccuccaaggagaucaaguccuuccucuggacccagucccuccgccgcgagcucuccggcuacugcuccaacaucaagcuccaggucgucaaggacgcccaggcccuccuccacggccucgacuucuccgaggucuccaacguccagcgccucaugcgcaaggagcgccgcgacgacaacgaccucaagcgccuccgcgaccucaaccaggccgucaacaaccucgucgagcucaaguccacccagcagaaguccauccuccgcgucggcacccucaccuccgacgaccuccucauccucgccgccgaccucgagaagcucaaguccaaggucacccgcaccgagcgcccccucuccgccggcgucuacaugggcaaccucuccucccagcagcucgaccagcgccgcgcccuccucaacaugaucggcauguccggcuccaaccagggcgcccagaccggccgcgacggcgucguccgcgucugggacgucaagaacgccgagcuccucaacaaccaguucggcaccaugcccucccucacccucgccugccucaccaagcagggccaggucgaccucaacgacgccguccaggcccucaccgaccucggccucaucuacaccgccaaguaccccaacaccuccgaccucgaccgccucacccagucccaccccauccucaacaugaucgacaccaagaaguccucccucaacaucuccggcuacaacuucucccucggcgccgccgucaaggccggcgccugcaugcucgacggcggcaacaugcucgagaccaucaaggucuccccccagaccauggacggcauccucaaguccauccucaaggucaagaaggcccucggcauguucaucuccgacgcccccggcgagcgcaaccccuacgagaacauccucuacaagaucugccucuccggcgacggcuggcccuacaucgccucccgcaccuccaucaccggccgcgccugggagaacaccgucgucgaccucgaguccgacggcaagccccagaaggccggcuccaacggcuccaacaagucccuccaguccgccggcuucaccgccggccucaccuacucccagcucaugacccucaaggacgccaugcuccagcucgaccccaacgccaagaccuggauggacaucgagggccgccccgaggaccccgucgagaucgcccucuaccagcccuccuccggcugcuacauccacuucuuccgcgagcccaccgaccucaagcaguucaagcaggacgccaaguacucccacggcaucgacgucaccgaccucuucgccgcccagcccggccucaccuccgccgucaucgacgcccucccccgcaacauggucaucaccugccagggcuccgacgacauccgcaagcucuucgagucccagggccgcaaggacaucaagcucaucgacaucgcccucuccaagaccgacucccgcaaguacgagaacgccgucugggaccaguacaaggaccucugccacaugcacaccggcaucgucgucgagaagaagaagcgcggcggcaaggaggagaucaccccccacugcgcccucauggacugcaucauguucgacgccgccgucuccggcggccucaacaccuccguccuccgcgccguccucccccgcgacauggucuuccgcaccuccaccccccgcgucguccucuga

SEQ ID NO: 8543 - RNA, 1710 nt, Artificial Sequence
  derived and/or modified CDS sequence (opt2) from LASV(Z148;Clade IV)__AAT49007__NP
auguccgucuccaaggagaucaaguccuuccucuggacccagucccuccgccgcgagcucuccggcuacugcuccaacaucaagcuccaggucgucaaggacgcccaggcccuccuccacggccucgacuucuccgaggucuccaacguccagcgccucaugcgcaagcagcgccgcgacgacaacgaccucaagcgccuccgcgaccucaaccaggccgucaacaaccucgucgagcucaaguccacccagcagaaguccguccuccgcgucggcacccucaccuccgacgaccuccucauccucgccgccgaccucgagaagcucaaguccaaggucacccgcaccgagcgcccccucuccgccggcaucuacaugggcaaccucuccucccagcagcucgaccagcgccgcgcccuccucaacaugaucggcauguccggcggcaaccagggcgcccagaccggccgcgacggcgucguccgcaucugggacgucaagaacgccgagcuccucaacaaccaguucggcaccaugcccucccucacccucgccugccucaccaagcagggccaggucgaccucaacgacgucguccaggcccucaccgaccucggccucaucuacaccgccaaguaccccaacaccuccgaccucgaccgccucacccagucccaccccauccucaacaugaucgacaccaagaaguccucccucaacaucuccggcuacaacuucucccucggcgccgccgucaaggccggcgccugcaugcucgacggcggcaacaugcucgagaccaucaaggucuccccccagaccauggacggcauccucaaguccauccucaaggucaagaaggcccucggcauguucaucuccgacacccccggcgagcgcaaccccuacgagaacauccucuacaagaucugccucuccggcgacggcuggcccuacaucgccucccgcaccuccaucaccggccgcgccugggagaacaccgucgucgaccucgaguccggcgagaagccccagaagaucggcuccaacaacuccaacaagucccuccaguccgccggcuucaccgccggccucaccuacucccagcucaugacccucaaggacgccaugcuccagcucgaccccaacgccaagaccuggauggacaucgagggccgccccgaggaccccgucgagaucgcccucuaccagcccuccuccggcugcuacauccacuucuuccgcgagcccaccgaccucaagcaguucaagcaggacgccaaguacucccacggcaucgacgucaccgaccucuucgccgcccagcccggccucaccuccgccgucaucgaggcccucccccgcaacauggucaugaccugccagggcuccgacgacauccgcaagcuccucgagucccagggccgcaaggacaucaagcucaucgacaucgcccucuccaagaccgacucccgcaaguacgagaacgccgucugggaccaguacaaggaccucugccacaugcacaccggcgucgucgucgagaagaagaagaagggcggcaaggaggagaucaccccccacugcgcccucauggacugcaucauguucgacgccgccgccuccggcggccucaacacccucguccuccgcgccguccucccccgcgacauggucuuccgcaccuccacccccaaggucguccucuga

SEQ ID NO: 8544 - RNA, 1710 nt, Artificial Sequence
  derived and/or modified CDS sequence (opt2) from LASV(Bamba-R114;Clade V)__AHC95554__NP
auguccgccuccaaggagguccgcuccuuccucuggacccagucccuccgccgcgagcucuccggcuacugcuccaacaucaagcuccaggucgucaaggacgcccaggcccuccuccacggccucgacuucuccgaggucuccaacguccagcgccucaugcgcaagcagcgccgcgacgacggcgaccucaagcgccuccgcgaccucaaccaggccgucaacaaccucgucgagcucaaguccacccagcagaaguccguccuccgcgucggcacccucaacuccgacgaccuccucacccucgccgccgaccucgagaagcucaaguccaaggucacccgcaccgagcgcccccucuccuccggcgucuacaugggcaaccucuccucccagcagcucgaccagcgccgcgcccuccucaacaugaucggcaugaccggcggcaaccagggcgcccaggccggccgcgacggcgucguccgcgucugggacgucaagaacgccgagcuccucaacaaccaguucggcaccaugcccucccucacccucgccugccucaccaagcagggccaggucgaccucaacgacgucguccaggcccucaccgaccucggccucaucuacaccgccaaguaccccaacaccuccgaccucgaccgccucacccagucccaccccauccucaacaugaucgacaccaagaaguccucccucaacaucuccggcuacaacuucucccucggcgccgccgucaaggccggcgccugcaugcucgacggcggcaacaugcucgagaccaucaagaucuccccccaguccgucgacggcauccucaaguccauccucaaggucaagcgcucccucggcauguucgucuccgacacccccggcgagcgcaaccccuacgagaacauccucuacaagaucugccucuccggcgacggcuggcccuacaucgccucccgcaccuccaucgucggccgcgccugggagaacaccgucgucgaccucgaggccgacggcaagccccagaagcccaacuccggcuccuccaacaagucccuccaguccgccggcuuccccgccggccucaccuacucccagcucaugacccucaaggacgccaugcuccagcucgaccccaacgccaagaccuggauggacaucgagggccgccccgaggaccccgucgaggucgcccucuaccagcccuccuccggcugcuacauccacuucuuccgcgagcccaccgaccucaagcaguucaagcaggacgccaaguacucccacggcaucgacgucaccgaccucuucgccgcccagcccggccucaccuccgccgucaucgaggcccucccccgcaacauggucaucaccugccagggcuccgaggacaucaagaagcuccucgagucccagggccgcaaggacaucaagcucaucgacaucgcccucuccaagaucgacucccgcaaguucgagaacgccgucugggaccaguacaaggaccucugccacaugcacaccggcgucgucgucgagaagaagaagcgcggcggcaaggaggagaucaccccccacugcgcccucauggacugcaucauguucgacgccgccgucuccggcggccucaacgccuccguccuccgcgccguccucccccgcgacauggucuuccgcaccuccacccccaaggucguccucuga

SEQ ID NO: 8545 - RNA, 1710 nt, Artificial Sequence
  derived and/or modified CDS sequence (opt2) from LASV(Komina-R16;Clade V)__AHC95556__NP
auguccgccuccaaggaggucaaguccuuccucuggacccagucccuccgccgcgagcucuccggcuacugcuccaacaucaagcuccaggucgucaaggacgcccaggcccuccuccacggccucgacuucuccgaggucuccaacguccagcgccucaugcgcaagcagcgccgcgacgacggcgaccucaagcgccuccgcgaccucaaccaggccgucaacaaccucgucgagcucaaguccacccagcagaagaacguccuccgcgucggcacccucaacuccgacgaccuccucacccucgccgccgaccucgagaagcucaaguccaaggucacccgcaccgagcgcccccucuccuccggcgucuacaugggcaaccucuccucccagcagcucgaccagcgccgcgcccuccucaacaugaucggcaugaccggcggcaaccagggcacccagaccggccgcgacggcgucguccgcgucugggacgucaagaacgccgagcuccucaacaaccaguucggcaccaugcccucccucacccucgccugccucaccaagcagggccaggccgaccucaacgacgucguccaggcccucaccgaccucggccucaucuacaccgccaaguaccccaacgccuccgaccucgaccgccucacccagucccaccccauccucaacaugaucgacaccaagaaguccucccucaacaucuccggcuacaacuucucccucggcgccgccgucaaggccggcgccugcaugcucgacggcggcaacaugcucgagaccaucaaggucuccccccaguccauggacggcauccucaaguccauccucaaggucaagcgcgcccucggcauguucgucuccgacacccccggcgagcgcaaccccuacgagaacauccucuacaagaucugccucuccggcgacggcuggcccuacaucgccucccgcaccuccaucgucggccgcgccugggagaacaccgucgucgaccucgaggccgacggcaaccccaagaagcucaacuccaacggcuccaacaagucccuccaguccgccggcuuccccgccggccucaccuacucccagcucaugacccucaaggacgccaugcuccagcucgaccccaacgccaagaccuggauggacaucgagggccgccccgaggaccccgucgaggucgcccucuaccagcccaacuccggcugcuacauccacuucuuccgcgagcccaccgaccucaagcaguucaagcaggacgccaaguacucccacggcaucgacgucaccgaccucuucgccgcccagcccggccucaccuccgccgucaucgaggcccucccccgcaacauggucaucaccugccagggcuccgaggacauccgcaagcuccucgagucccagggccgcaaggacaucaagcucaucgacaucgcccucuccaagaccgacucccgcaaguucgagaacgccgucugggaccagcacaaggaccucugccacaugcacaccggcgucgucgucgagaagaagaagcgcggcggcaaggaggagaucaccccccacugcgcccucauggacugcaucauguucgacgccgccgucuccggcggccucaacacccucguccuccgcgccguccucccccgcgacauggucuuccgcaccuccacccccaaggucguccucuga

SEQ ID NO: 8546 - RNA, 1710 nt, Artificial Sequence
  derived and/or modified CDS sequence (opt2) from LASV(Ouoma-R123;Clade V)__AHC95558__NP
auguccgccuccaaggagguccgcuccuuccucuggacccagucccuccgccgcgagcucuccggcuacugcuccaacaucaagcuccaggucgucaaggacgcccaggcccuccuccacggccucgacuucuccgaggucuccaacguccagcgccucaugcgcaagcagcgccgcgacgacuccgaccucaagcgccuccgcgaccucaaccaggccgucaacaaccucgucgagcucaaguccacccagcagaaguccguccuccgcgucggcacccucuccuccgacgaccuccucacccucgccgccgaccucgagaagcucaaguccaaggucauccgcaccgagcgcccccucuccuccggcgucuacaugggcaaccucuccucccagcagcucgaccagcgccgcgcccuccucaacaugaucggcaugaccggcggcaaccagggcgcccaggccggccgcgacggcgucguccgcgucugggacguccgcaacgccgagcuccucaacaaccaguucggcaccaugcccucccucacccucgccugccucaccaagcagggccaggucgaccucaacgacgucguccaggcccucaccgaccucggccucaucuacaccgccaaguaccccaacaccuccgaccucgaccgccucacccagaaccaccccauccucaacaugaucgacaccaagaaguccucccucaacaucuccggcuacaacuucucccucggcgccgccgucaaggccggcgccugcaugcucgacggcggcaacaugcucgagaccaucaaggucuccccccaguccaucgacggcauccucaaguccauccucaaggucaagcgcacccucggcauguucgucuccgacacccccggcgagcgcaaccccuacgagaacauccucuacaagaucugccucuccggcgacggcuggcccuacaucgccucccgcaccuccaucgucggccgcgccugggagaacaccgucgucgaccucgagaccgaccgcaagucccagggccccaacuccggcaacuccaacaagucccuccaguccgccggcuucuccgccggccucaccuacucccagcucaugacccucaaggacgccaugcuccagcucgaccccaacgccaagaccuggauggacaucgagggccgccccgaggaccccgucgaggucgcccucuaccagcccaucuccggcugcuacauccacuucuuccgcgagcccaccgaccucaagcaguucaagcaggacgccaaguacucccacggcaucgacaucaccgaccucuucgccgcccagcccggccucaccuccgccgucaucgaggcccucccccgcaacauggucaucaccugccagggcuccgaggacaucaagaagcuccucgagucccagggccgcaaggacaucaagcucaucgacaucgcccucuccaagaucgacucccgcaaguucgagaacgccgucugggaccaguacaaggaccucugccacaugcacaccggcgucgucgucgagaagaagaagcgcggcggcaaggaggagaucaccccccacugcgcccucauggacugcaucauguucgacgccgccgucuccggcggccucaacgccuccguccuccgcgccguccucccccgcgacauggucuuccgcaccuccacccccaaggucguccucuga

SEQ ID NO: 8547 - RNA, 1710 nt, Artificial Sequence
  derived and/or modified CDS sequence (opt2) from LASV(Soromba-R;Clade V)__AHC95552__NP
auguccgccuccaaggaggucaaguccuuccucuggacccagucccuccgccgcgagcucuccggcuacugcuccaacaucaagcuccaggucgucaaggacgcccaggcccuccuccacggccucgacuucuccgaggucuccaacguccagcgccucaugcgcaagcagcgccgcgacgacggcgaccucaagcgccuccgcgaccucaaccaggccgucaacaaccucgucgagcucaaguccacccagcagaagaacguccuccgcgucggcacccucaacuccgacgaccuccucacccucgccgccgaccucgagaagcucaaguccaaggucacccgcaccgagcgcccccucuccuccggcgucuacaugggcaaccucuccucccagcagcucgaccagcgccgcgcccuccucaacaugaucggcaugaccggcggcaaccagggcacccaggccggccgcgacggcgucguccgcgucugggacgucaagaacgccgagcuccucaacaaccaguucggcaccaugcccucccucacccucgccugccucaccaagcagggccaggccgaccucaacgacgucguccaggcccucaccgaccucggccucaucuacaccgccaaguaccccaacgccuccgaccucgaccgccucacccagucccaccccauccucaacaugaucgacaccaagaaguccucccucaacaucuccggcuacaacuucucccucggcgccgccgucaaggccggcgccugcaugcucgacggcggcaacaugcucgagaccaucaaggucuccccccaguccauggacggcauccucaaguccauccucaaggucaagcgcgcccucggcauguucgucuccgacacccccggcgagcgcaaccccuacgagaacauccucuacaagaucugccucuccggcgacggcuggcccuacaucgccucccgcaccuccaucgucggccgcgccugggagaacaccgucgucgaccucgaggccgacggcaaccccaagaagcucaacuccaacggcuccaacaagucccuccaguccgccggcuuccccgccggccucaccuacucccagcucaugacccucaaggacgccaugcuccagcucgaccccaacgccaagaccuggauggacaucgagggccgccccgaggaccccgucgaggucgcccucuaccagcccaacuccggcugcuacauccacuucuuccgcgagcccaccgaccucaagcaguucaagcaggacgccaaguacucccacggcaucgacgucaccgaccucuucgccgcccagcccggccucaccuccgccgucaucgaggcccucccccgcaacauggucaucaccugccagggcuccgaggacauccgcaagcuccucgagucccagggccgcaaggacaucaagcucaucgacaucgcccucuccaagaccgacucccgcaaguucgagaacgccgucugggaccaguacaaggaccucugccacaugcacaccggcgucgucgucgagaagaagaagcgcggcggcaaggaggagaucaccccccacugcgcccucauggacugcaucauguucgacgccgccgucuccggcggccucaacacccucguccuccgcgccguccucccccgcgacauggucuuccgcaccuccaccccccgcgucguccucuga

SEQ ID NO: 8548 - RNA, 1710 nt, Artificial Sequence
  derived and/or modified CDS sequence (opt2) from LASV(Soromba-R30;Clade V)__AHC95560__NP
auguccgccuccaaggaggucaaguccuuccucuggacccagucccuccgccgcgagcucuccggcuacugcuccaacaucaagcuccaggucgucaaggacgcccaggcccuccuccacggccucgacuucuccgaggucuccaacguccagcgccucaugcgcaagcagcgccgcgacgacggcgaccucaagcgccuccgcgaccucaaccaggccgucaacaaccucgucgagcucaaguccacccagcagaagaacguccuccgcgucggcacccucaacuccgacgaccuccucacccucgccgccgaccucgagaagcucaaguccaaggucacccgcaccgagcgcccccucuccuccggcgucuacaugggcaaccucuccucccagcagcucgaccagcgccgcgcccuccucaacaugaucggcauguccggcggcaaccagggcacccaggucggccgcgacggcgucguccgcgucugggacgucaagaacgccgagcuccucaacaaccaguucggcaccaugcccucccucacccucgccugccucaccaagcagggccaggccgaccucaacgacgucguccaggcccucaccgaccucggccucaucuacaccgccaaguaccccaacgccuccgaccucgaccgccucacccagucccaccccauccucaacaugaucgacaccaagaaguccucccucaacaucuccggcuacaacuucucccucggcgccgccgucaaggccggcgccugcaugcucgacggcggcaacaugcucgagaccaucaaggucuccccccaguccauggacggcauccucaaguccauccucaaggucaagcgcgcccucggcauguucgucuccgacacccccggcgagcgcaaccccuacgagaacauccucuacaagaucugccucuccggcgacggcuggcccuacaucgccucccgcaccuccaucgucggccgcgccugggagaacaccgucgucgaccucgaggccgacggcaaccccaagaagcucaacuccaacggcuccaacaagucccuccaguccgccggcuuccccgccggccucaccuacucccagcucaugacccucaaggacgccaugcuccagcucgaccccaacgccaagaccuggauggacaucgagggccgccccgaggaccccgucgaggucgcccucuaccagcccaacuccggcugcuacauccacuucuuccgcgagcccaccgaccucaagcaguucaagcaggacgccaaguacucccacggcaucgacgucaccgaccucuucgccgcccagcccggccucaccuccgccgucaucgaggcccucccccgcaacauggucaucaccugccagggcuccgaggacauccgcaagcuccucgagucccagggccgcaaggacaucaagcucaucgacaucgcccucuccaagaccgacucccgcaaguucgagaacgccgucugggaccagcacaaggaccucugccacaugcacaccggcgucgucgucgagaagaagaagcgcggcggcaaggaggagaucaccccccacugcgcccucauggacugcaucauguucgacgccgccgucuccggcggccucaacacccucguccuccgcgccguccucccccgcgacauggucuuccgcaccuccacccccaaggucguccucuga

SEQ ID NO: 8549 - RNA, 1710 nt, Artificial Sequence; identical to SEQ ID NO: 8305
  derived and/or modified CDS sequence (opt2) from LASV(Alzey;Clade VI)__SCA79106__NP

SEQ ID NO: 8550 - RNA, 1710 nt, Artificial Sequence
  derived and/or modified CDS sequence (opt2) from LASV(NIGERIA IKEJI;Clade II)__AMZ00372__NP
auguccgucuccaaggaggucaaguccuuccucuggacccagucccuccgccgcgagcucuccggcuacugcuccaacaucaagcuccaggucgucaaggacgcccaggcccuccuccacggccucgacuucuccgaggucuccaacguccagcgccucaugcgcaagcagaagcgcgacgacaacgaccucaagcgccuccgcgaccucaaccaggccgucaacaaccucgucgagcucaaguccguccagcagaaguccauccuccgcgucggcacccucaccuccgacgaccuccucacccucgccgccgaccucgagaagcucaaguccaaggucauccgcaccgagcgcccccucuccuccggcgucuacaugggcaaccucuccucccagcagcucgagcagcgcaaggcccuccucaccaugaucggcaugaccggcggcucccaguccgcccagcccggccgcgacggcgucguccgcgucugggacgucaagaacuccgaccuccucaacaaccaguucggcaccaugcccucccucacccucgccugccucaccaagcagggccaggucgaccucaacgacgccguccucgcccucaccgaccucggccucaucuacaccgccaaguaccccaacaccuccgaccucgaccgccucucccagucccaccccauccucaacauggucgacaccaagaaguccucccucaacaucuccggcuacaacuucucccucggcgccgccgucaaggccggcgccugcaugcucgacggcggcaacaugcucgagaccaucaaggucaccccccagaccauggacggcauccucaaguccauccucaaggucaagcgcgcccucggcauguucgucuccgacacccccggcgagcgcaaccccuacgagaacauccucuacaagaucugccucuccggcgacggcuggcccuacaucgccucccgcaccuccaucgucggccgcgccugggagaacaccaucgucgaccucgaguccgacuccaagccccagaaggucggcgccaucggcuccaacaagucccuccaguccgccggcuuccccgccggccucaccuacucccagcucaugacccucaaggacuccaugaugcagcucgaccccuccgccaagaccuggaucgacaucgagggccgccccgaggaccccgucgagaucgcccucuaccagcccaucuccggcugcuacauccacuucuuccgcgagcccaccgaccucaagcaguucaagcaggacgccaaguacucccacggcaucgacgucgccgaccucuucuccgcccagcccggccucaccuccgccgucaucgaggcccucccccgcaacaugguccucaccugccagggcuccgacgacaucaagaagcuccucgacucccagggccgccgcgacaucaagcucaucgacaucucccucaacaaggccgacucccgccgcuucgagaacgccgucugggaccagugcaaggaccucugccacaugcacaccggcgucgucgucgagaagaagaagcgcggcggcaaggaggagaucaccccccacugcgcccucauggacugcaucauguucgacgccgccgucuccggcggccucaacauccccacccuccgcgccguccucccccgcgacauggucuuccgcaccuccucccccaaggucguccucuga

SEQ ID NO: 8551 - RNA, 1710 nt, Artificial Sequence
  derived and/or modified CDS sequence (opt3) from LASV(Josiah;Clade IV)__NP_694869__NP
augagcgccuccaaggagaucaaaucuuuccuguggacccagucacucagaagggaacuuaguggcuacugcagcaacauuaagcugcaaguggucaaagacgcucaggcauuguuacacgggcuggauuuuuccgagguuucuaaugugcagcggcuaaugcgcaaggaacgacgugacgauaacgaccucaaaagacugagggaucuuaaucaggccguaaacaaucugguggaguugaagucgacacaacagaagucaauacuccgggucggaacucugacgagcgacgaucugcucaucuuagcggcugaccuggaaaaacuuaagaguaaagugauucgcaccgagagacccuuguccgccgguguuuauaugggcaaccugucuagccagcagcuagaucaaaggcgggcacuccugaauaugaucgggauguccggaggcaaccagggugcccgcgcugggcgagacggaguggucagagugugggauguaaagaaugcagagcuucugaacaaucaguucggcacaaugccuucauugacucucgccugucugaccaaacagggccaaguugacuuaaacgaugcugugcaggcccugacagaccucgggcuuauuuacaccgcgaaguauccaaauacaagugaccuggauagguugacucagagccauccgauccuaaacaugauagacaccaagaaaucuucccugaauaucucaggauacaacuuuagccucggugcagccgucaaggcuggcgccugcaugcuggaugggggaaacaugcuugaaacgauuaaagugaguccccaaacuauggacggcauccugaagucuauuuugaaagugaagaaagcacucgguauguucaucuccgauaccccuggggagcggaauccauaugaaaacauacuguacaagauuuguuuaagcggagacggcuggcccuauaucgcuucgcguacaucuauuacuggccgcgccugggagaauaccgucguugaucuggaguccgacgggaagccucagaaagcggauucaaacaauaguagcaagucccuacagucugccggauuuacagcaggucucaccuacagccagcugaugacgcuuaaagacgcuauguugcaacuggauccaaacgccaagacuuggauggacaucgaaggcagacccgaggacccuguggaaaucgcucucuaccagccaucaagugggugcuauauucacuucuuuagggagccgacagaucugaaacaguucaagcaggacgccaaguacucccauggaauagauguaaccgaccuuuuugcaacucaacccggccugacaagcgccgugaucgaugcuuugccucggaauauggucauuaccugucaggguucugacgauauccgaaaacuccuggaaucacaggggcgcaaggacauaaaauuaauugauaucgcgcugaguaagacggacagcagaaaauaugagaacgcagugugggaucaguacaaggaccuaugccacaugcauaccggcguuguggucgagaagaaaaagaggggaggcaaagaagagaucacaccacacugugcccucauggauugcauuauguucgacgcugccguguccgggggacugaauacuucuguacuucgggcaguuuugccccgcgacaugguguuuagaaccucgacaccuagggucgugcuguga

SEQ ID NO: 8552 - RNA, 1710 nt, Artificial Sequence
  derived and/or modified CDS sequence (opt3) from LASV(LP;Clade I)__AAF86702__NP
augagcaacuccaaggagaucaaaucuuuccuguggacccagucacucagaagggaacuuaguggcuacugcagcaauauuaagcugcaaguggucaaagacgcccaggcuuuguuacacgggcuggauuuuuccgagguuucuaacgugcagcggcuaaugcgcaagcagaaacgagacgaugcagaccucaagcgucugagagaucuuaaucaagccguaaacaaucugguggaauugaagucgacacagcagaaaaacguccucagggugggaacucugucaagcgacgaucugauaacgcucgcggcugacuuagagaagcugaaaaguaagguuauccggaccgaacgcccccuuuccucugguguguauaugggcaauuugagcucccagcaacuggaucagagaagggcccuacucucaaugauugggaugaguggaggcccucaggguaaccggacagggggagacggcgucgugcgcguaugggauguuaaaaaugcagagcugcuuaacaaucaguucggcacuaugccaagccugaccuuggccugucucacaaagcaaggacagguggaccugaacgaugcuguccaggcauuaaccgaccuggggcucaucuacacugccaaguaucccaauucuuccgaccuugauaugcugacacaaucacauccgauuuuggguaugguggacaccaaaaagagcagucuaaacaucucuggcuacaauuuuucccugggggcugccgugaaagcgggagcaugcaugcucgauggcgguaacaugcuggagacgauaaaggucagcccucagacuauggacgggauccuuaaaucgauucugaagguuaaacgaucuuugggaauguucaucuccgauaccccaggcgaaagaaaccccuaugagaauauucucuacaagaucugucugucaggcgaaggguggccuuauauagccaguaggacaagcauuacuggacgggcuugggagaacaccuuaguggaccuggaguccgauaauaagccacccaaacuaaacucugccgguagcaauaagucacuccaggcagcuggccugaacgccgggcuuacauacagucaguugaugacccugaaagacugcaugcuccaacuggauccuuccagcaagacguggaucgacauugaaggacguccagaggauccgguagaaaucgcgcuuuuucagcccucuucaggcuguuacauccacuucuuucgcgagccuacugaccugaaacaguucaagcaggacgccaaguauagucaugguauugaugugacagacuuguuuagcacccaaccagggcucacuuccgcagucauagaagcucugcccagaaauaugguguuaacaugccagggcucugaugacaucaaaaagcugcuagagucgcagggaaggcgggauauuaaacucaucgacauaagccuguccaaggccgauucacgaaaauucgagaacgcuguuugggaccaguacaaggaucuuugucacaugcauaccggcguggucguggaaaagaaaaagcgcgggggaaaagaggaaauuacgccucacugcgccuugcuggacuguaucauguuugaugcagccaccacagguagucucaauaucacuacccugagagcuguauuaccaagggacaugguuuuccggacaucuacucccaaggugguccuguga

SEQ ID NO: 8553 - RNA, 1710 nt, Artificial Sequence
  derived and/or modified CDS sequence (opt3) from LASV(803213;Clade II)__AAF86704__NP
augagcgccuccaaggaggugaaaucuuuccuguggacccagucacucagaagggaacuuaguggcuacugcagcaacaucaagcugcaagucguuaaagacgcucaggcauuguuacacgggcuggauuuuuccgaggugaauaacguacagcggcuaaugcgcaagcagaaacgagacgauggagaccucaagcgucugagagaucuuaaucaagccgugaacaaucuggucgaauugaagucuacacagcagaaaucgauucucaggguggguacucugacgucagacgaucugcucaccuuagcggcugaccuggagaaacuuaagagcaagguuauacggacagaacgccccuugaguuccggcguguauauggggaaccugucuacucagcaacuagagcagagaagggcccuccugaauaugaucggaauggucggcggugcacaggggacccagccuggacgggauggcgugguacgcguuugggacgugaaaaacccagaucuucugaauaaccaauucggcacaaugccgagcuugacccucgccugucugacuaagcaggggcaggucgacuuaaaugaugcugugcuggcacucacagaccuuggacugauuuacaccgccaaguaucccaacuccucagacuuggaucgacuaagucaaagccauccuauccugaauaugguggacacgaaaaagucuucccucaacauuucagguuacaauuuuagccugggcgcugccgucaaagcgggggcaugcaugcuugauggaggcaacaugcuggagacuaucaagguuaccccacagacaauggacgguauauugaaaaguauccucaaggugaaaagaucucuggggauguucguauccgauacucccggagaaaggaacccuuaugagaauauuuuauacaagaucugucugagcggcgacggcuggccauauauugccucgcggaccucuaucguggggcgugcuugggaaaacacaaccgucgaucuagaguccgacggaaagccccagaaaguggguacggccggcucaaauaagagucuccagagcgcaggguuuccuacuggacugacauacucccaacuuaugaccuugaaagauucuaugaugcagcuggacccaagcgcuaagacuuggauagauauugagggccgcccggaagaccccguugagaucgcccucuaccagccuaugucagguugcuauauucacuucuuuagagaaccaacagaccugaaacaguucaagcaagaugcgaaguacagucaugggaucgacguggccgaucuuuuucccgcacagccuggccugaccuccgcugucaucgaggccuugccaaggaacauggugcucacgugucagggaagcgacgauauuaaaaagcuguuagacucucagggccggcgagauauaaaacugaucgacauuucacuaaguaagguagauagccgcaaauucgaaaaugcuguuugggaccaaugcaaggaucucugucacaugcauaccgggguggucguggagaagaaaaagagaggagguaaagaggaaaucacaccccacugcgcccugauggacuguauaauguuugaugcagccgucuccggcgggcuuaacauuccgguguugagggcuguucugccucgggacaugguguuccgcacuucuucgcccaagguaguccucuga

SEQ ID NO: 8554 - RNA, 1713 nt, Artificial Sequence
  derived and/or modified CDS sequence (opt3) from LASV(GA391;Clade III)__CAA36646__NP
augagcgccuccaaggaggugagaucuuuccuguggacccagucacucaggcgggaacuuaguggcuacugcagcaacaucaaacugcaagucguuaaggacgcucaggcauuguuacacgggcuggauuuuuccgaggugucuaauguacagcgccuaaugcgaaaacagaagcgugacgauggagaccucaaaagacugagggaucuuaaccaagccgugaauaaccuggucgaauugaagucgacacagcagaagucagugcuccggguugguacucugagcagugacgaucugcucauuuuagcggcugaccuggagaaacuuaaguccaaagugacgcgcaccgaaagacccuugucuagcggcgucuauauggggaaucuguccucacagcaacuagaucagaggcgggcccuccugaacaugauaggaaugacaggcgugaguggugggggaaagggcgcaagcgacggcaucguacgcguuugggaugugaaaaaugccgagcuucugaacaaucaguucgggacuaugccuucuuugacccucgcuugucugacaaagcagggacaagucgacuuaaacgaugcagugcaggcccugaccgaccucggucuuauuuacacugcuaaguauccaaauuccucagaccuggaucgauugagccagagucauccgauccuaaacaugauugacacuaaaaagucuucccugaauaucagcggcuacaacuuuucgcucggggccgcggugaaagcaggagccugcaugcuggauggcgguaauaugcuugagaccauaaaggucucuccccaaacgauggacgggauccugaaauccauuuugaagguuaaaaagucacucggaauguucgugagugauacuccuggcgaaagaaacccauaugagaacauccuguacaagauuuguuuaagcggcgacggguggcccuauaucgcuuccaggaccucuauaguaggacgggccugggaaaauacaguggucgaucuggagcaggacaacaaaccucagaagauugguaauggcgggagcaacaaaucacuacagagugcaggauuugcugccggccucacuuacucccaacugaugacccuuaaggauuucaaaugcuuuaauuugaucccaaacgcgaagacauggauggacauugagggucgucccgaagauccuguggagaucgcccuguaccagccaagcucuggguguuauguucacuucuuucgcgaaccgaccgaccucaagcaguucaaacaggacgcaaaguacucacauggcaucgaugugacggaccuguuugcugcccaacccggacuuacaagugcugucauugaggcccugccuagaaauauggugauaacaugccagggcagcgaagauaucaggaaauugcucgagucccaggggcggcgagacauuaagcugaucgauauaaccuuaucuaaagcagacucgcgcaaguucgagaacgccguaugggaucaguuuaaggaccugugucacaugcauacuggaguuguggucgagaaaaagaaaagagguggcaaggaagaaauuacaccacacugcgcucuaauggauuguaucauguucgacgcggcagugagcgggggacucgaugccaaaguccugagggugguucuuccccgggacaugguguuccgcaccuccacgccuaagguagucuuguga

SEQ ID NO: 8555 - RNA, 1710 nt, Artificial Sequence
  derived and/or modified CDS sequence (opt3) from LASV(AV;Clade V)__CCA30315__NP
augagcgccuccaaggaggugaaaucuuuccuguggacccagucacucagaagggaacuuaguggcuacugcagcaacaucaagcugcaagucguuaaagacgcucaggcauuguuacacgggcuggauuuuuccgaggugucuaauguacagcggcuaaugcgcaagcagcgacgugacgauucggaccucaaaagacugagggaucuuaaccaagccgugaauaaccuggucgaauugaagucaacacagcaaaagagcgugcuccggguuggaacucugaguuccgacgaucugcucacguuagcggcugaccuggagaaacuuaagucuaaagugacccgcacagaaagacccuugagcuccggugucuauaugggcaaucugucaagucagcagcuagaucagaggcgggcccuccugaaccuuauugggaugacuaauggaagccagggcucucaggcaggucgcgacggggugguacgaguuugggaugugaagaacgccgagcuguugaauaaccaauucggaaccaugccuucccucacacuggcuuguuuaaccaaacagggccaggucgaccugaaugauguggugcaagcacucacugaccuuggccugauauacacagccaaguauccaaacaccucagacuuggauagacuaacgcagagccauccgauccugaauaugauugacacuaagaaaaguucucucaacaucuccggguacaauuuuagccugggagcugccgucaaggcgggugcaugcaugcuugauggcgggaacaugcuggagaccauuaaaguuucgccccagucuauggacggaaucuugaaguccauacucaaagugaagagggcccugggcauguucguaucagauacaccuggugaacggaacccauaugagaauaucuuauacaaaauuugucugaguggggacggauggcccuauaucgcuagccguacuuccauugugggccgcgccugggaaaacaccgucguggaucuagagacagacggcaagccucagaagaucgggucuggaaauagcaacaaaucacuccaaagugcagguuuuuccgcuggccugaccuacagccagcuuaugacguugaaggaugccaugcugcagcucgacccaaaugcgaaaacuuggauggauauagaggggagacccgaagacccuguugagguggcccuguaccagccaauuucuggaugcuauauccacuucuuuagggaaccgacagaccuuaagcaauucaaacaggaugcaaaguacucacauggcauugacaucgcugaucuguuugccgcucagcccgguuugaccagugccgucaucgaggcacucccucggaacauggugauuacuugucaggggagcgaagacauaaagaaacuguuagagucccaaggccgaaaggauaucaaacugauugacaucgcccuaucuaagauagauucgcgcaaauucgagaaugcuguaugggaccaguauaaggaucucugccacaugcauacaggaguuguggucgaaaagaaaaagagaggcgggaaagaggaaauuaccccacacugugcgcugauggacugcaucauguuugaugcagccgugagcggaggucuuaacacguugguccugagggcugugcucccccgggacaugguuuuccgcaccuccacaccuagagugguacuguga

SEQ ID NO: 8556 - RNA, 1710 nt, Artificial Sequence
  derived and/or modified CDS sequence (opt3) from LASV(Togo/2016/7082;Clade VI)__AMR44578__NP
augagcaacuccaaggaggugaaaucuuuccuguggacccagucacucagaagggaacuuaguggcuacugcagcaauaucaagcugcaagucguuaaagacgcccaggcuuuguuacacgggcuggauuuuuccgaggugucuaacguacagcggcuaaugcgcaagcagaaacgagacgauggagaccucaagcgucugagagaucuuaaucaagcagugaacaaucuggucgaauugaagucggugcagcagaaaucaauucucaggguugguacacugacuagcgacgaucugcucacguuagccgcggaccuggagaaacuuaaaaguaaggugacccggacagaacgccccuuguccucuggcgucuauauggggaaccugagcucccagcaacuagaucagagaagggcucuccugucaaugauaggaaugaguggcgguaaucagaacagccagccuaaaggggacggagugguacggguuugggaugugaagaaugccgaccuucugaacaaucaauucggcacuaugccaucuuugacccucgcaugucugacaaagcagggccaggucgauuuaaacgacgccgugcaagcucugaccgaccucgggcuuaucuacacugcaaaauaucccaauuccucagaucuggaccgcuugagccagagucauccgauucuaaacaugaucgauacaaagaaaucuucccugaauauuagcggauacaacuuuucgcucggugccgcuaucaagaccggcgccugcaugcuggacgggggaaacaugcuugagacgauaaaagugacuccucagaccauggauggcauccugaagucuauuuugaaagucaagcgaucccucgguauguucaucucagacacaccaggggagagaaaucccuaugaaaacauucuguacaagaucuguuuaaguggagauggcuggccuuauauagcgagcaggacugcaauuaucggccgggccugggagaauaccguuguggaccuggaauccgauucuaaaccacagaagauugggagcaacggaucaaauaaaagucuacaauccgcugguuuugcccccggccucacauacagccagcugaugacccuuaaggacucuauguugcagcuggauccuaacgcaaaaacguggaucgacaucgaggggcguccagaggacccgguagaaguggcucucuuccagcccauuucaggaugcuacauacacuuuuuccgcgagccuacugaucugaagcaauuuaagcaggacgccaaauauagucauggcaucgaugucacagaccuuuucgcggcccagccaggucugaccagcgcagugauugaggcuuugcccagaaauaugguucucacuugucagggguccgaugacaucaagaaacuguuagauucucaaggcaggcgggacauaaagcugauugaugugucgcuaaacaaaaucgacagccgaaaguuugaaaaugccgucugggaucaguacaaggaccucugccacaugcauacaggagugguaguugaaaagaagaaaaagggcgggaaagaggagaucaccccucacugugcucugcuugauugcauuauguucgacgccgcaguguccggagguuugaacgccacgguccugcgcgcugugcucccaagagacauggucuuuaggaccucaagucccaaggugguucuguga

SEQ ID NO: 8557 - RNA, 1710 nt, Artificial Sequence
  derived and/or modified CDS sequence (opt3) from LASV(KAK-428;Clade n.d. (VII))__ANH09741__NP
augagcaacuccaaggaggugaaaucuuuccuguggacccagucacucagaagggaacuuaguggcuacugcacaaauaucaagcugcaagucguuaaagacgcccaggcuuuguuacacgggcuggauuuuagcgagguguccaacguacagcggcuaaugcgcaagcagaaacgagacgauaaugaccucaagcgucugagagaucuuaaccaagcagugaauaaccuggucgaauugaagucugugcagcagaaaucgguucucaaggugggaacucucaauucagacgaucugcugacguuagccgcggaccuggagaaacuuaagagcaaagucgugaggaccgaacggcccuugaguuccgguguauauaugggcaaccugucuagccagcaacuagaucagcgcagagcucuccugaauaugauugggauggccggaggcucccaggguaaccagccuucaagggacgggguugugcgggucugggaugugaagaaugcagaccuucugaacaaucaauucggaacaaugccaaguuugacucucgccugucugaccaagcagggccagguggauuuaaacgacgucguucuggcucucacagaccuuggccugauauacaccgcaaaauauccgaauagcucugauuuggaccgccuaucccaaaaccaucccgugcugaacaugaucgauguaaauaagucaagccucaacauuaguggguacaauuuuucucugggagccgcugugaaagccggugcgugcaugcuugacggcgggaacaugcuggagacuaucaagauuuccccucagacagucgauggaaucuugaaaagcauacucaaggugaaacgagcacugggcauguucguuucggacaccccaggugagagaaaucccuaugaaaacaucuuauacaaggugugucugucugggaauggauggccuuauauugccuccaggacgucaaucgucggccgggcuugggagaacacugugguagaucuagaaaguaauaagaaccagccaaaaguuggcaauaacgggagcaauaagaugcuccaguccucuggauuugccaccggucugacauacagccaacuuaugacuuugcgugacucaaugcugcagcucgaucccaccgcaaaaacauggauugacaucgagggccgcccugaggauccaguggaacuggcucuuuuccagccgaguuccgggugcuacauacacuuuuucagagagcccaccgaccugaagcaguuuaaacaagacgccaaguauagccauggaauugaugucaacgacuuguucucugcgcagccuggccucacgucagccgugcuggaagcauuaccaaggaauaugguccugacuugucaggguagugaugacauccggaagcuacucgauagccaggaccgaaaagauauuaagcugaucgacaucucccuuucuaaagcugaugcccgcaaguuugagaacgacgugugggaucaauucaaagacuugugccacaugcauacagggauuguuguggaaaagaagaaaaagggcggaaaacaggagaugacuccccacugugcucugcucgauugcauaauguuugacgccgcaguaucgggcgggcugaacgucccuaccuuaagagccgugcugccaacagacaugguuuucaggaccaucacgaccaaggugguccuuuga

SEQ ID NO: 8558 - RNA, 1710 nt, Artificial Sequence; identical to SEQ ID NO: 8552
  derived and/or modified CDS sequence (opt3) from LASV(Pinneo-NIG-1969;Clade I)__AIT17837__NP

SEQ ID NO: 8559 - RNA, 1710 nt, Artificial Sequence
  derived and/or modified CDS sequence (opt3) from LASV(ISTH0009-NIG-2011;Clade II)__AIT17405__NP
augagcguguccaaggaggucaaaucuuuccuguggacccagucacucagaagggaacuuaguggcuacugcagcaacaucaagcugcaaguugugaaagacgcccaggcuuuguuacacgggcuggauuuuuccgagguaucuaaugugcagcggcuaaugcgcaagcagaaacgagacgauucggaccucaagcgucugagagaucuuaaccaagcagucaauaaccugguggaauugaagucaacacagcagaaaagcauucucaggguuggaacucugacgagugacgaucugcucaccuuagccgcggaccuggagaaacuuaaguccaaggugauacggacagaacgccccuugucuagcggugucuauaugggcaaucuguccacucagcaacuagagcagagaagggcucuccugaacaugaucgggauggugggaggcgcccaggguacccagccugggcgggauggaguaguucgcgugugggacgucaaaaauccagaucuucugaacaaucaauucggcacaaugccgucauugacccucgcaugucugacuaagcagggccagguggacuuaaacgaugccgugcuggcucucacagaccuugggcugauuuacaccgcaaaguaucccaauaguagcgacuuggaucgacuaucucaaucccauccuauccugaacauggucgacauuaaaaagucaagccucaauaucaguggauacaacuuuucucugggugccgcuguuaaagccggcgcgugcaugcuugaugggggaaauaugcuggagacgauaaaggugacuccacagaccauggacggcaucuugaaauccauucucaagguaaaaagaagccuggguauguucgugucggauacacccggggaaaggaacccuuaugagaacaucuuauacaagauuugucugucuggagacggcuggccauauaucgcaucccggacuucaauagucggccgugccugggaaaauaccacaguggaucuagagagugacgggaagccccagaaaguuggaagcgcugguuccaacaagucucuccagagcgccggcuuuccuaccgggcugacguacucacaacuuaugacuuugaaagauaguaugaugcagcuggacccauccgcaaagacauggauugauaucgagggacgcccggaagaccccguggagauugcucucuaccagccuaugagcggcugcuauauccacuucuuuagagaaccaaccgaccugaaacaguucaagcaagaugccaaguacucucaugguaucgacgucgcggaucuuuuucccgcccagccugggcugacuucagcagugauugaggcuuugccaaggaauaugguacucacaugucagggcagugacgauauaaaacggcuguuagacagccagggacgacgcgauaucaagcugauugacaucgcccuauccaaagcugauucuagaagguucgaaaacgccguuugggaccaaugcaaggaucucugucacaugcauaccggcguggucguggagaaaaagaagcgcgggggaaaagaggaaauaacgccccacugcgcacugauggacuguauuauguaugaugccgcugucucggguggccuuaauaucccgguguugcgggcgguucugccuagagacaugguguuuaggaccagcucccccaagguaguccucuga

SEQ ID NO: 8560 - RNA, 1710 nt, Artificial Sequence
  derived and/or modified CDS sequence (opt3) from LASV(ISTH0012-NIG-2011;Clade II)__AIT17409__NP
augagcgccuccaaggaggugaaaucuuuccuguggacccagucacucagaagggaacuuaguggcuacugcagcaacaucaagcugcaagucguuaaagacgcucaggcauuguuacacgggcuggauuuuuccgaggugucuaauguacagcggcuaaugcgcaagcagaaacgagacgauggagaccucaagcgucugagagaucuuaaccaagccgugaauaaccuggucgaauugaagucgacacagcagaaaucaauucucaggguggguacucugacgagcgacgaucugcucaccuuagcggcugaccuggagaaacuuaagaguaagguuauacggacagaacgccccuuguccucuggcguguauauggggaaucugagcacucagcaacuagagcagagaagggcccuccugaacaugaucggaauggucggcggugcacaggggacccagccuggacgggauggcgugguacgcguuugggacgugaaaaauccagaucuucugaacaaucaauucggcacaaugccguccuugacccucgccugucugacuaagcaggggcaggucgacuuaaacgaugcugugcuggcacucacagaccuuggacugauuuacaccgccaaguaucccaauucaagugacuuggaucgacuaagccaaucucauccuauccugaacaugguggacacgaaaaaguccucacucaauauuagcgguuacaacuuuagucugggcgcugccgucaaagcgggggcaugcaugcuugauggaggcaauaugcuggagacuaucaagguuaccccacagacaauggacgguauauugaaaucuauccucaaggugaaaaagucccuggggauguucguaagcgauacucccggagaaagaaacccuuaugagaacauuuuauacaagaucugucugucgggcgacggcuggccauauauugccucuaggaccuccaucguggggcgggcuugggaaaauacaaccgucgaucuagagucagacggaaaaccccagaagguggguacggccggcaguaacaaaagccuccaguccgcaggguuuccuacuggacugacauacucucaacuuaugaccuugaaggauagcaugaugcagcuggacccaucagcuaaaacuuggauagauauugagggccguccggaagaccccguugagaucgcccucuaccagccuaugagugguugcuauauucacuucuuucgcgaaccaacagaccugaagcaguucaagcaagaugcgaaauacucccaugggaucgacgugaccgaucuuuuuagcgcccagcccggccugacgucugcagucaucgaggcuuugccuagaaauauggugcucaccugucagggaucagacgauauuaagaggcuguuagacagucagggccggcgagauauaaaacugaucgacauugcccuaaacaaggcugauagccgcagauucgaaaaugccguaugggaccaaugcaaagaucucugucacaugcauacagggguuguggucgagaagaagaaaaggggagguaaggaggaaaucacuccacacugcgcacugauggacuguauaauguaugaugccgcuguguccggcgggcuuaacauucccgucuugcgggcggugcugccgcgcgacaugguuuuuagaaccucuucgccuaaagugguacucuga

SEQ ID NO: 8561 - RNA, 1710 nt, Artificial Sequence
  derived and/or modified CDS sequence (opt3) from LASV(ISTH0047-NIG-2011;Clade II)__AIT17413__NP
augagcgccuccaaggaggugaaaucuuuccuguggacccagucacucagaagggaacuuaguggcuacugcagcuccaucaagcugcaagucguuaaagacgcucaggcauuguuacacgggcuggauuuuucugaggugucgaacguacagcggcuaaugcgcaagcagaaacgagacgauucagaccucaagcgucugagagaucuuaaucaagccgugaacaaucuggucgaacuuaagagcacacagcagaaaaguauucucagggugggaacucugacguccgacgaucugcucaccuuagcggcugaccuggagaaguugaaaucuaagguuauacggacagaacgccccuugagcuccgguguguauaugggcaaccugucaacucagcaacuagagcagagaagggcccuccugaauaugaucgggauggucggaggcgcacaggguacccagccugggcgggauggagugguacgcguuugggacgugaaaaacccagaucuucugaauaaccaauucggcacaaugccgaguuugacccucgccugucugacuaagcagggccaggucgacuuaaaugaugcugugcuggcacucacagaccuugggcugauuuacaccgccaaguaucccaacagcucugacuuggaucgacuaucccaaucacauccuauccugaauaugguggacacgaaaaagagcagucucaacauuucuggauacaauuuuucccugggugcugccgucaaagcgggcgcaugcaugcuugaugggggaaacaugcuggagacuaucaagguuaccccacagacaauggacggcauauugaaaagcauccucaaggugaaaagaucgcuggguauguucguaucugaugcccccggggaaaggaauccuuaugagaacauuuuauacaagaucugucuguccggagacggcuggccauauauugcuucacggaccaguaucgugggccgugccugggaaaacaccacagucgaucuagagagcgacgggaagccccagaaaaugggaaccgcagguuccaauaagucucuccagagcgcuggcuuuccuacggggcugacuuacucacaacuuaugacauugaaagauaguaugaugcagcuggacccauccgccaagaccuggauagauauugagggacgcccggaagaccccguggagaucgcgcucuaccagccuaugagcggcugcuauauucacuucuuuagagaaccaacugaccugaaacaguucaagcaagaugccaaguacucucaugguaucgacguugcagaucuuuuucccgcucagccugggcugacaucagccgugaucgaggcuuugccaaggaacaugguccucaccugucagggcagugacgauauuaaaaagcuguuagacagccagggacggcgagauauaaaacugaucgacauugcccuauccaaggcagauucucgcagauucgaaaaugccgugugggaccaaugcaaagaucucugucacaugcauacgggcguaguuguggagaagaagaaaaggggagggaaggaggaaaucacuccccacugcgcucugauggacuguauaauguaugaugcggcagucucggguggccuuaacauuccgguguugcgggccguccugccucgcgacaugguguuuagaacaagcucccccaaaguugugcucuga

SEQ ID NO: 8562 - RNA, 1710 nt, Artificial Sequence
  derived and/or modified CDS sequence (opt3) from LASV(ISTH0230-NIG-2011;Clade II)__AIT17421__NP
augagcgccuccaaggaggugaaaucuuuccuguggacccagucacucagaagggaacuuaguggcuacugcagcaacaucaagcugcaagucguuaaagacgcucaggcauuguuacacgggcuggauuuuuccgaggugucuaauguacagcggcuaaugcgcaagcagaaacgagacgauucggaccucaagcgucugagagaucuuaaccaagccgugaauaaccuggucgaauugaagucaacacagcagaaaagcauucucagggugggaacucugacgagugacgaucugcucaccuuagcggcugaccuggagaaacuuaaguccaagguuauacggacagaacgccccuugucuagcgguguguauaugggcaaucuguccacucagcaacuagagcagagaagggcccuccugaacaugaucgggauggucucaggagcacagggcacccagccuggucgggauggggugguacgcguuugggacgugaaaaauccagaucuucugaacaaucaauucggaacaaugccgaguuugacccucgccugucugacuaagcagggccaggucgacuuaaacgaugcugugcuggcacucacagaccuuggccugauuuacaccgccaaguaucccaauagcucugacuuggaucgacuaucccaaucacauccuauccugaacaugguggacauuaaaaagagcagucucaauaucucuggguacaacuuuucccugggagcugccgucaaagcgggugcaugcaugcuugauggcgggaauaugcuggagacgauaaagguuacuccacagaccauggacggaaucuugaaaagcauucucaaggugaaaagaucgcugggcauguucguaucugauacacccggugaaaggaacccuuaugagaacaucuuauacaagauuugucuguccggggacggauggccauauaucgccucacggaccaguauagugggccgugcuugggaaaauacuacagucgaucuagagagcgacggcaagccccagaaaaugggguccgccggaucuaacaagagccuccagucagcagguuuuccuaccggccugacguacagucaacuuaugacuuugaaagauuccaugaugcagcuggacccaagcgcuaagacauggauugauaucgaggggcgcccggaagaccccguggagauugcccucuaccagccuaugucuggaugcuauauccacuucuuuagagaaccaaccgaccugaaacaguucaagcaagaugcgaaguacucacauggcaucgacguugccgaucuuuuucccgcacagccuggucugacaagugcugugauugaggccuugccaaggaauaugguccucacuugucaggggagcgacgauauaaaacggcuguuagacucccagggccgacgcgauaucaagcugauugacaucgcucuaucuaaagccgauucgagaagguucgaaaacgcagugugggaccaaugcaaggaucucugucacaugcauaccggaguaguuguggagaaaaagaagcggggcgggaaagaggaaauaacgccccacugcgcccugauggacuguauuauguaugaugcugcggucagcggaggucuuaauaucccgguguugcgcgcaguccugccuagagacaugguguuuaggaccuccucacccaagguugugcucuga

SEQ ID NO: 8563 - RNA, 1710 nt, Artificial Sequence
  derived and/or modified CDS sequence (opt3) from LASV(ISTH0531-NIG-2011;Clade II)__AIT17425__NP
augagcgccuccaaggaggugaaaucuuuccuguggacccagucacucagaagggaacuuaguggcuacugcagcuccaucaagcugcaagucguuaaagacgcucaggcauuguuacacgggcuggauuuuucugaggugucgaacguacagcggcuaaugcgcaagcagaaacgagacgauucagaccucaagcgucugagagaucuuaaucaagccgugaacaaucuggucgaacuuaagagcacacagcagaaaaguauucucagggugggaacucugacguccgacgaucugcucaccuuagcggcugaccuggagaaguugaaaucuaagguuauacggacagaacgccccuugagcuccgguguguauaugggcaaccugucaacucagcaacuagagcagagaagggcccuccugaauaugaucgggauggucggaggcgcacaggguacccagccugggcgggauggagugguacgcguuugggacgugaaaaacccagaucuucugaauaaccaauucggcacaaugccgaguuugacccucgccugucugacuaagcagggccaggucgacuuaaaugaugcugugcuggcacucacagaccuugggcugauuuacaccgccaaguaucccaacagcucugacuuggaucgacuaucccaaucacauccuauccugaauaugguggacacgaaaaagagcagucucaacauuucuggauacaauuuuucccugggugcugccgucaaagcgggcgcaugcaugcuugaugggggaaacaugcuggagacuaucaagguuaccccacagacaauggacggcauauugaaaagcauccucaaggugaaaaagucgcuggguauguucguaucugauacucccggggaaagaaauccuuaugagaacauuuuauacaagaucugucuguccggagacggcuggccauauauugccucaaggaccaguaucgugggccgggcuugggaaaacacaauagucgaucuagagagcgacgggaaaccccagaaggugggaaccgccgguuccaauaaaucucuccagagcgcaggcuuuccuacggggcugacuuacucacaacuuaugacauugaaggauaguaugaugcagcuggacccauccgcuaaaaccuggauugauaucgagggacguccggaagaccccguugagauugcccucuaccagccuaugagcggcugcuauauccacuucuuucgcgaaccaacugaccugaagcaguucaagcaagaugcgaaauacucucaugguaucgacguggccgaucuuuuucccgcacagccugggcugacaucagcugucauugaggccuugccaagaaacauggugcucaccugucagggcagugacgauauaaagaggcuguuagacagccagggacggcgagauaucaaacugauugacaucgcucuauccaaggccgauucucgcagauucgaaaaugcaguaugggaccaaugcaaagaucucugucacaugcauacgggcguuguggucgagaagaagaaaaggggagggaaggaggaaauaacaccccacugcgcccugauggacuguauuauguaugaugcugcggugucggguggccuuaacaucccggucuugcgggcagugcugccucgcgacaugguuuuuagaaccagcucccccaaagugguacucuga

SEQ ID NO: 8564 - RNA, 1710 nt, Artificial Sequence
  derived and/or modified CDS sequence (opt3) from LASV(ISTH0595-NIG-2011;Clade II)__AIT17429__NP
augagcgccuccaaggaggugaaaucuuuccuguggacccagucacucagaagggaacuuaguggcuacugcagcaacaucaagcugcaagucguuaaagacgcucaggcauuguuacacgggcuggauuuuuccgaggugucuaauguacagcggcuaaugcgcaagcagaaacgagacgauucggaccucaagcgucugagagaucuuaaccaagccgugaauaaccuggucgaauugaagucaacacagcagaaaagcauucucagggugggaacucugacgagugacgaucugcucaccuuagcggcugaccuggagaaacuuaaguccaagguuauacggacagaacgccccuugucuagcgguguguauaugggcaaucuguccgcccagcaacuagagcagagaagggcacuccugaacaugaucgggauggucggaggcgcccaggguacucagccugggcgggauggagugguacgcguuugggacgugaaaaauccagaucuucugaacaaucaauucggcaccaugccgucauugacacucgcuugucugaccaagcagggccaggucgacuuaaacgaugcagugcuggcccucacugaccuugggcugauuuacacagcuaaguaucccaauaguagcgacuuggaucgacuaucucaaucccauccuauccugaacaugguggacaccaaaaagucaagccucaauauuaguggauacaacuuuucucugggugccgcggucaaagcaggcgccugcaugcuugaugggggaaauaugcuggagacgaucaagguuacuccacagaccauggacggcauauugaaauccauccucaaggugaaaagaagccuggguauguucguaucggaugcucccggggaaaggaacccuuaugagaacauuuuauacaagaucugucugucuggagacggcuggccauauauugccucccggacaucaaucgugggccgugcaugggaaaauacuaccgucgaucuagagagugacgggaagccccagaaagugggaacagcugguagcaacaagucccuccagucugccggcuuuccuaccgggcugacguacagccaacuuaugacuuugaaagauucaaugaugcagcuggacccaagugcgaagacauggauagauauugagggacgcccggaagaccccguugagaucgcccucuaccagccuauguccggcugcuauauucacuucuuuagagaaccaaccgaccugaaacaguucaagcaagaugcaaaguacagccaugguaucgacguggcugaucuuuuucccgcccagccugggcugacuucugcugucaucgaggccuugccaaggaauauggugcucacaugucagggcucagacgauauuaaacggcuguuagacagucagggacgacgcgauauaaagcugaucgacauugcacuaagcaaagccgauuccagaagguucgaaaacgcuguaugggaccaaugcaaggaucucugucacaugcauaccggcguuguggucgagaaaaagaagcgcgggggaaaagaggaaaucacgccccacugcgcgcugauggacuguauaauguaugaugcagccgugucugguggccuuaauauuccggucuugcgggcugugcugccuagagacaugguuuuuaggaccucgagccccaaggugguacucuga

SEQ ID NO: 8565 - RNA, 1710 nt, Artificial Sequence
  derived and/or modified CDS sequence (opt3) from LASV(ISTH0964-NIG-2011;Clade II)__AIT17431__NP
augagcgccuccaaggaggugaaaucuuuccuguggacccagucacucagaagggaacuuaguggcuacugcagcaacaucaagcugcaagucguuaaagacgcucaggcauuguuacacgggcuggauuuuuccgaggugucuaauguacagcggcuaaugcgcaagcagaaacgagacgauucggaccucaagcgucugagagaucuuaaccaagccgugaauaaccuggucgaauugaagucaacacagcagaaaagcauucucagggugggaacucugacgagugacgaucugcucaccuuagcggcugaccuggagaaacuuaaguccaagguuauacggacagaacgccccuugucuagcgguguguauaugggcaaucuguccacucagcaacuagagcagagaagggcccuccugaacaugaucgggauggucggaggcgcacaggguacccagccugggcgggauggagugguacgcguuugggacgugaaaaauccagaucuucugaacaaucaauucggcacaaugccgucauugacccucgccugucugacuaagcagggccaggucgacuuaaacgaugcugugcuggcacucacagaccuugggcugauuuacaccgccaaguaucccaauaguagcgacuuggaucgacuaucucaaucccauccuauccugaacaugguggacacgaaaaagucaagccucaauauuaguggauuuaacuucucucugggugcugccgucaaagcgggcgcaugcaugcuugaugggggaaauaugcuggagacuaucaagguuaccccacagacaauggacggcauauugaaauccauccucaaggugaaaaagagccuggguauguuuguaucggauacucccggggaaagaaacccuuacgagaacauuuuauauaagaucugucugucuggagacggcuggccauacauugccuccaggaccucaaucgugggccgggcuugggaaaauacaaccgucgaucuagagagugacgggaaaccccagaaggugggaacggccgguagcaacaaaucccuccagucugcaggcuucccuacugggcugacauauagccaacuuaugaccuugaaggauucaaugaugcagcuggacccaagugcuaaaacuuggauagauauugagggacguccggaagaccccguugagaucgcccucuaccagccuauguccggcugcuacauucacuuuuuccgcgaaccaacagaccugaagcaguuuaagcaagaugcgaaauauagccaugguaucgacguggccgaucuuuuccccgcacagccugggcugaccucugcugucaucgaggccuugccaagaaauauggugcucacgugucagggcucagacgauauuaagaggcuguuagacagucagggacggcgagauauaaaacugaucgacauugcucuaagcaaggccgauucccgcagauuugaaaacgcaguaugggaccaaugcaaagaucucugucacaugcauaccggcguuguggucgagaagaagaaaaggggagggaaggaggaaaucacaccccacugcgcccugauggacuguauaauguacgaugcugcggugucugguggccuuaauauuccggucuugcgggcagugcugccucgcgacaugguuuucagaacugccucgcccaaagugguacucuga

SEQ ID NO: 8566 - RNA, 1710 nt, Artificial Sequence
  derived and/or modified CDS sequence (opt3) from LASV(ISTH1038-NIG-2011;Clade II)__AIT17439__NP
augagcgccuccaaggaggugaaaucuuuccuguggacccagucacucagaagggaacuuaguggcuacugcagcuccaucaagcugcaagucguuaaagacgcucaggcauuguuacacgggcuggauuuuucugaggugucgaacguacagcggcuaaugcgcaagcagaaacgagacgauucagaccucaagcgucugagagaucuuaaucaagccgugaacaaucuggucgaacuuaagagcacacagcagaaaaguauucucagggugggaacucugacguccgacgaucugcucaccuuagcggcugaccuggagaaguugaaaucuaagguuauacggacagaacgccccuugagcuccgguguguauaugggcaaccugucaacucagcaacuagagcagagaagggcccuccugaauaugaucgggauggucggaggcgcacaggguacccagccugggcgggauggagugguacgcguuugggacgugaaaaacccagaucuucugaauaaccaauucggcacaaugccgaguuugacccucgccugucugacuaagcagggccaggucgacuuaaaugaugcugugcuggcacucacagaccuugggcugauuuacaccgccaaguaucccaacagcucugacuuggaucgacuaucccaaucacauccuauccugaauaugguggacacgaaaaagagcagucucaacauuucuggauuuaauuucucccugggugcugccgucaaagcgggcgcaugcaugcuugaugggggaaacaugcuggagacuaucaagguuaccccacagacaauggacggcauauugaaaagcauccucaaggugaaaagaucgcuggguauguuuguaucugauacucccggggaaaggaauccuuacgagaacauuuuauauaagaucugucuguccggagacggcuggccauacauugccucacggaccaguaucgugggccgugcuugggaaaacacaaccgucgaucuagagagcgacgggaagccccagaaaaugggaacggccgguuccaauaagucucuccagagcgcaggcuucccuacugggcugacauauucacaacuuaugaccuugaaagauaguaugaugcagcuggacccauccgcuaagacuuggauagauauugagggacgcccggaagaccccguggagaucgcccucuaccagccuguuagcggcugcuacauucacuuuuucagagaaccaacagaccugaaacaguuuaagcaagaugcgaaguauucucaugguaucgacguggccgaucuuuucucagcacagcccgggcugaccagugcugucaucgaggccuugccuaggaacauggugcucacgugucagggcagcgacgauauuaaacggcuguuagacucccagggacgacgcgauauaaagcugaucgacauugcucuaucuaaagccgauucgagaagguuugaaaaugcaguaugggaccaaugcaaggaucucugucacaugcauaccggcguuguggucgagaaaaagaagcgcgggggaaaagaggaaaucacaccacacugcgcccugauggacuguauaauguacgaugcugcggugagcgguggccuuaacauucccgucuuccgggcaguguugccgagagacaugguuuuuaggacuuccucaccuaaggugguacuguga

SEQ ID NO: 8567 - RNA, 1710 nt, Artificial Sequence
  derived and/or modified CDS sequence (opt3) from LASV(ISTH1048-NIG-2011;Clade II)__AIT17443__NP
augagcgccuccaaggaggugaaaucuuuccuguggacccagucacucagaagggaacuuaguggcuacugcagcuccaucaagcugcaagucguuaaagacgcucaggcauuguuacacgggcuggauuuuucugaggugucgaacguacagcggcuaaugcgcaagcagaaacgagacgauucagaccucaagcgucugagagaucuuaaucaagccgugaacaaucuggucgaacuuaagagcacacagcagaaaaguauucucagggugggaacucugacguccgacgaucugcucaccuuagcggcugaccuggagaaguugaaaucuaagguuauacggacagaacgccccuugagcuccgguguguauaugggcaaccugucaacucagcaacuagagcagagaagggcccuccugaauaugaucgggauggucggaggcgcacaggguacccagccugggcgggauggagugguacgcguuugggacgugaaaaacccagaucuucugaauaaccaauucggcacaaugccgaguuugacccucgccugucugacuaagcagggccaggucgacuuaaaugaugcugugcuggcacucacagaccuugggcugauuuacaccgccaaguaucccaacagcucugacuuggaucgacuaucccaaucacauccuauccugaauaugguggacacgaaaaagagcagucucaacauuucuggauacaauuuuucccugggugcugccgucaaagcgggcgcaugcaugcuugaugggggaaacaugcuggagacuaucaagguuaccccacagacaauggacggcauauugaaaagcauccucaaggugaaaagaucgcuggguauguucguaucugaugcccccggggaaaggaauccuuaugagaacauuuuauacaagaucugucuguccggagacggcuggccauauauugcuucacggaccaguaucgugggccgugccugggaaaacaccacagucgaucuagagagcgacgggaagccccagaaagugggaaccgcagguuccaauaagucucuccagagcgcuggcuuuccuacggggcugacuuacucacaacuuaugacauugaaagauaguaugaugcagcuggacccauccgccaagaccuggauagauauugagggacgcccggaagaccccguugagaucgcgcucuaccagccuaugagcggcugcuauauucacuucuuuagagaaccaacugaccugaaacaguucaagcaagaugccaaguacucucaugguaucgacguggcagaucuuuuucccgcucagccugggcugacaucagccgucaucgaggcuuugccaaggaacauggugcucaccugucagggcagugacgauauuaaaaagcuguuagacagccagggacggcgagauauaaaacugaucgacauugcccuauccaaggcagauucucgcagauucgaaaaugccguaugggaccaaugcaaagaucucugucacaugcauacgggcguuguggucgagaagaagaaaaggggagggaaggaggaaaucacuccccacugcgcucugauggacuguauaauguaugaugcggcagugucggguggccuuaacauuccggucuugcgggccgugcugccucgcgacaugguuuuuagaacaagcucccccaaagugguacucuga

SEQ ID NO: 8568 - RNA, 1710 nt, Artificial Sequence
  derived and/or modified CDS sequence (opt3) from LASV(ISTH1058-NIG-2011;Clade II)__AIT17447__NP
augagcgccuccaaggaggugaaaucuuuccuguggacccagucacucagaagggaacuuaguggcuacugcagcaacaucaagcugcaagucguuaaagacgcucaggcauuguuacacgggcuggauuuuuccgaggugucuaauguacagcggcuaaugcgcaagcagaaacgagacgauucggaccucaagcgucugagagaucuuaaccaagccgugaauaaccuggucgaauugaagucaacacagcagaaaagcauucucagggugggaacucugacgagugacgaucugcucaccuuagcggcugaccuggagaaacuuaaguccaagguuauacggacagaacgccccuugucuagcgguguguauaugggcaaucuguccacucagcaacuagagcagagaagggcccuccugaacaugaucgggauggucggaggcgcacaggguacccagccugggcgggauggagugguacgcguuugggacgugaaaaauccagaucuucugaacaaucaauucggcacaaugccgucauugacccucgccugucugacuaagcagggccaggucgacuuaaacgaugcugugcuggcacucacagaccuugggcugauuuacaccgccaaguaucccaauaguagcgacuuggaucgacuaucucaaucccauccuauccugaacaugguggacacgaaaaagucaagccucaauauuaguggauacaacuuuucucugggugcugccgucaaagcgggcgcaugcaugcuugaugggggaaauaugcuggagacuaucaagguuaccccacagacaauggacggcauauugaaauccauccucaaggugaaaaagagccuggguauguucguaucggauacucccggggaaagaaacccuuaugagaacauuuuauacaagaucugucugucuggagacggcuggccauauauugccuccaggaccucaaucgugggccgggcuugggaaaauacaaccgucgaucuagagagugacgggaaaccccagaaggugggaacgacugguagcaacaaaucccuccagucugccggcuuuccuacagggcugaccuacagccaacuuaugacuuugaaggauucaaugaugcagcuggacccaagugcaaaaacauggauagauauugagggacguccggaagaccccguugagaucgcucucuaccagccuauguccggcugcuauauucacuucuuucgcgaaccaaccgaccugaagcaguucaagcaagaugccaaauacagccaugguaucgacgugacggaucuuuuucccgcgcagccugggcugaccucugccgucaucgaggcauugccaagaaauauggugcucacaugucagggcucagacgauauuaagaggcuguuagacagucagggacggcgagauauaaaacugaucgacauugcucuaagcaaggccgauucccgcagauucgaaaacgcuguaugggaccaaugcaaagaucucugucacaugcauacuggcguuguggucgagaagaagaaaaggggagggaaggaggaaaucacaccccacugcgcccugauggacuguauaauguaugaugcagccgugucugguggccuuaauauuccggucuugcgggcugugcugccucgcgacaugguuuuuagaaccucgagccccaaagugguacucuga

SEQ ID NO: 8569 - RNA, 1710 nt, Artificial Sequence
  derived and/or modified CDS sequence (opt3) from LASV(ISTH1064-NIG-2011;Clade II)__AIT17451__NP
augagcgccuccaaggaggugaaaucuuuccuguggacccagucacucagaagggaacuuaguggcuacugcagcaacaucaagcugcaagucguuaaagacgcucaggcauuguuacacgggcuggauuuuuccgaggugucuaauguacagcggcuaaugcgcaagcagaaacgagacgauucggaccucaagcgucugagagaucuuaaccaagccgugaauaaccuggucgaauugaagucaacacagcagaaaagcauucucagggugggaacucugacgagugacgaucugcucaccuuagcggcugaccuggagaaacuuaaguccaagguuauacggacagaacgccccuugucuagcgguguguauaugggcaaucuguccacucagcaacuagagcagagaagggcccuccugaacaugaucgggauggucggaggcgcacaggguacccagccugggcgggauggagugguacgcguuugggacgugaaaaauccagaucuucugaacaaucaauucggcacaaugccgucauugacccucgccugucugacuaagcagggccaggucgacuuaaacgaugcugugcuggcacucacagaccuugggcugauuuacaccgccaaguuucccaauaguagcgacuuggaucgacuaucucaaucccauccuauccugaacaugguggacacgaaaaagucaagccucaauauuaguggauauaacuucucucugggugcugccgucaaagcgggcgcaugcaugcuugaugggggaaauaugcuggagacuaucaagguuaccccacagacaauggacggcauauugaaauccauccucaaggugaaaaagagccuggguauguuuguaucggauacucccggggaaagaaacccuuacgagaacauuuuauauaagaucugucugucuggagacggcuggccauacauugccuccaggaccucaaucgugggccgggcuugggaaaauacaaccgucgaucuagagagugacgggaaaccccagaaggugggaacgacugguagcaacaaaucccuccagucugccggcuucccuacagggcugaccuauagccaacuuaugacuuugaaggauucaaugaugcagcuggacccaagugcaaaaacauggauagauauugagggacguccggaagaccccguugagaucgcucucuaccagccuauguccggcugcuacauucacuuuuuccgcgaaccaaccgaccugaagcaguuuaagcaagaugccaaauauagccaugguaucgacguggcggaucuuuuccccgcccagccugggcugacgucugcagucaucgaggcuuugccaagaaauauggugcucaccugucagggcucagacgauauuaagaggcuguuagacagucagggacggcgagauauaaaacugaucgacauugcccuaagcaaggcugauucccgcagauuugaaaacgccguaugggaccaaugcaaagaucucugucacaugcauacaggcguuguggucgagaagaagaaaaggggagggaaggaggaaaucacuccccacugcgcacugauggacuguauaauguacgaugccgcugugucugguggccuuaauauuccggucuugcgggcggugcugccucgcgacaugguuuucagaaccucgagccccaaagugguacucuga

SEQ ID NO: 8570 - RNA, 1710 nt, Artificial Sequence
  derived and/or modified CDS sequence (opt3) from LASV(ISTH1069-NIG-2011;Clade II)__AIT17455__NP
augagcgccuccaaggaggugaaaucuuuccuguggacccagucacucagaagggaacuuaguggcuacugcagcuccaucaagcugcaagucguuaaagacgcucaggcauuguuacacgggcuggauuuuucugaggugucgaacguacagcggcuaaugcgcaagcagaaacgagacgauucagaccucaagcgucugagagaucuuaaucaagccgugaacaaucuggucgaacuuaagagcacacagcagaaaagugugcucaggguuggaacucugacguccgacgaucugcucaccuuagcggcugaccuggagaaguugaaaucuaaggugauucggacagaacgccccuugagcuccggugucuauaugggcaaccugucaacucagcaacuagagcagagaagggcccuccugaguaugauagggauggugggaggcgcacaggguacccagccugggcgggauggaguaguucgcgugugggacgucaaaaauccagaucuucugaacaaucaauucggcacaaugccgagcuugacccucgccugucugacuaagcagggccagguggacuuaaacgaugcugugcuggcacucacagaccuugggcugaucuacaccgccaaguaucccaauucuuccgacuuggaucgacuaucacaaagccauccuauucugaacauggucgacacgaaaaagaguucucucaauaucuccggauacaacuuuagccugggugcugccguuaaagcgggcgcaugcaugcuugaugggggaaauaugcuggagacuauuaaggugaccccacagacaauggacggcaucuugaaaucgauacucaagguaaaaagaucucuggguauguucguguccgauacucccggggaaaggaacccuuaugagaauaucuuauacaagauuugucugucaggagacggcuggccauauaucgccagucggaccagcauugucggccgugcuugggaaaacacaaccguggaucuagaguccgacgggaagccccagaaaguuggaacggccgguucuaacaagagccuccagucagcaggcuuuccuacugggcugacauacagucaacuuaugaccuugaaagauuccaugaugcagcuggacccaagcgcuaagacuuggaucgauauagagggacgcccggaagaccccguggagauugcccucuaccagccuaugucuggcugcuauauccacuucuuuagagaaccaacagaccugaaacaguucaagcaagaugcgaaguacucacaugguauugacgucgccgaucuuuuucccgcacagccugggcugaccagugcugugaucgaggccuugccaaggaauaugguacucacgugucagggcagcgacgauaucaaacggcuguuagacucccagggacgacgcgauauuaagcugauagacaucgcucuaucuaaagccgauucgagaagguucgaaaacgcaguuugggaccaaugcaaggaucucugucacaugcauaccggcguggucguggagaaaaagaagcgcgggggaaaagaggaaauuacaccccacugcgcccugauggacuguaucauguaugaugcugcggucagcgguggccuuaauauaccgguguugcgggcaguucugccuagagacaugguguuuaggacuuccucacccaagguaguccucuga

SEQ ID NO: 8571 - RNA, 1710 nt, Artificial Sequence
  derived and/or modified CDS sequence (opt3) from LASV(ISTH1096-NIG-2012;Clade II)__AIT17459__NP
augagcgccuccaaggaggugaaaucuuuccuguggacccagucacucagaagggaacuuaguggcuacugcagcuccaucaagcugcaagucguuaaagacgcucaggcauuguuacacgggcuggauuuuucugaggugucgaacguacagcggcuaaugcgcaagcagaaacgagacgauucagaccucaagcgucugagagaucuuaaucaagccgugaacaaucuggucgaacuuaagagcacacagcagaaaaguauucucagggugggaacucugacguccgacgaucugcucaccuuagcggcugaccuggagaaguugaaaucuaagguuauacggacagaacgccccuugagcuccgguguguauaugggcaaccugucaacucagcaacuagagcagagaagggcccuccugaauaugaucgggauggucggaggcgcacaggguacccagccugggcgggauggagugguacgcguuugggacgugaaaaacccagaucuucugaauaaccaauucggcacaaugccgaguuugacccucgccugucugacuaagcagggccaggucgacuuaaaugaugcugugcuggcacucacagaccuugggcugauuuacaccgccaaguaucccaacagcucugacuuggaucgacuaucccaaucacauccuauccugaauaugguggacacgaaaaagagcagucucaacauuucuggauacaauuuuucccugggugcugccgucaaagcgggcgcaugcaugcuugaugggggaaacaugcuggagacuaucaagguuaccccacagacaauggacggcauauugaaaagcauccucaaggugaaaagaucgcuggguauguucguaucugauacucccggggaaaggaauccuuaugagaacauuuuauacaagaucugucuguccggagacggcuggccauauauugccucacggaccaguaucgugggccgugcuugggaaaacacaaccgucgaucuagagagcgacgggaagccccagaaaaugggaacggccgguuccaauaagucucuccagagcgcaggcuuuccuacugggcugacauacucacaacuuaugaccuugaaagauaguaugaugcagcuggacccauccgcuaagacuuggauagauauugagggacgcccggaagaccccguggagaucgcccucuaccagccuguuagcggcugcuauauucacuucuuuagagaaccaacagaccugaaacaguucaagcaagaugcgaaguacucucaugguaucgacguggccgaucuuuuucccgcacagccugggcugaccucagcugucaucgaggccuugccaaggaacauggugcucacgugucagggcagugacgauauuaaacggcuguuagacagccagggacgacgcgauauaaagcugaucgacauugcucuauccaaagccgauucuagaagguucgaaaaugcaguaugggaccaaugcaaggaucucugucacaugcauaccggcguuguggucgagaaaaagaagcgcgggggaaaagaggaaaucacaccccacugcgcccugauggacuguauaauguaugaugcugcggugucggguggccuuaacauuccggucuugcgggcagugcugccuagagacaugguuuuuaggacuagcucccccaaggugguacucuga

SEQ ID NO: 8572 - RNA, 1710 nt, Artificial Sequence
  derived and/or modified CDS sequence (opt3) from LASV(ISTH1107-NIG-2012;Clade II)__AIT17463__NP
augagcgccuccaaggaggugaaaucuuuccuguggacccagucacucagaagggaacuuaguggcuacugcagcuccaucaagcugcaagucguuaaagacgcucaggcauuguuacacgggcuggauuuuucugaggugucgaacguacagcggcuaaugcgcaagcauaaacgagacgauucagaccucaagcgucugagagaucuuaaucaggccgugaacaaucuggucgaacucaagagcacacaacagaaaaguauuuugagggugggaacucugacguccgacgaucugcucaccuuagcggcugaccuggagaaacuuaaaucuaagguuauacggacagaacgccccuugagcuccgguguguauaugggcaaccugucaacucagcagcuagagcaaagaagggcccuccugaauaugaucgggauggucggaggcgcacagaguacccagccuggucgggauggggugguacgcguuugggacgugaaaaacccagaucuucugaauaaccaguucggaacaaugccgagcuugacccucgccugucugacuaagcaaggccaggucgacuuaaaugaugcugugcuggcacucacagaccuuggccugauuuacaccgccaaguaucccaacucuuccgacuuggaucgacuaucacagagccacccuauccugacgaugguggacacuaaaaagaguucucucaauauuuccggguuuaacuucagccugggagcugccgucaaagcgggugcaugcaugcuugauggcgggaauaugcuggagaccaucaagguuacaccacaaacuauggacggaauauugaaaucgauccucaaggugaaaaagucucugggcauguuuguauccgauacccccggugaaagaaacccuuacgagaauauuuuauauaagaucugucugucaggggacggauggccauacauugccaguaggacaagcaucgugggccgggcuugggaaaacaccauagucgaucuagagacggacggcaaaccccagaagguggggacugccggauccucucguagccuccagucagcagguuucccuacaggccugaccuauagucagcuuaugacuuugaaagauuccaugaugcaacuggacccaagcgcuaagacauggauugauaucgaggggcgcccggaagaccccguugagauugcccucuaccagccuaugucuggaugcuacauccacuuuuucagagaaccaaccgaccugaaacaguuuaagcaggaugcgaaguauucacauggcaucgacguggccgaucuuuuccccgcacaaccuggucugacgagugcugucauugaggccuugccaaggaacauggugcucaccugucaggggagcgacgauauaaagaagcuguuagacucccagggccggcgagauaucaaacugauugacaucgcucuaucuaaggccgauucgcgcagauuugaaaaugcaguaugggaccagugcaaagaucucugucauaugcacacaggaguuguggucgagaagaagaaaaggggcgggaaggaggaaauaacuccccacugcgcccugauggacuguauuauguacgaugcugcggugagcggaggucuuaacaucccggucuugcgggcagugcugccucgcgacaugguuuucagaaccuccucacccaaagugguacucuga

SEQ ID NO: 8573 - RNA, 1710 nt, Artificial Sequence
  derived and/or modified CDS sequence (opt3) from LASV(ISTH1111-NIG-2011;Clade II)__AIT17467__NP
augagcgccuccaaggaggugaaaucuuuccuguggacccagucacucagaagggaacuuaguggcuacugcagcuccaucaagcugcaagucguuaaagacgcucaggcauuguuacacgggcuggauuuuucugaggugucgaacguacagcggcuaaugcgcaagcagaaacgagacgauucagaccucaagcgucugagagaucuuaaucaagccgugaacaaucuggucgaacuuaagagcacacagcagaaaaguauucucagggugggaacucugacguccgacgaucugcucaccuuagcggcugaccuggagaaguugaaaucuaagguuauacggacagaacgccccuugagcuccgguguguauaugggcaaccugucaacucagcaacuagagcagagaagggcccuccugaauaugaucgggauggucggaggcacccaggguacacagccugggcgggauggagugguacgcguuugggacgugaaaaacccagaucuucugaauaaccaauucggcaccaugccgaguuugacucucgcaugucugacaaagcagggccaggucgacuuaaaugaugccgugcuggcucucaccgaccuugggcugauuuacacggcaaaguaucccaacagcucugacuuggaucgacuaucccaaucacauccuauccugaauaugguggacacuaaaaagagcagucucaacauuucuggauacaauuuuucccugggugccgcugucaaagccggcgcgugcaugcuugaugggggaaacaugcuggagaccaucaagguuacaccacagacuauggacggcauauugaaaagcauccucaaggugaaaaagucgcuggguauguucguaucugauacccccggggaaagaaauccuuaugagaacauuuuauacaagaucugucuguccggagacggcuggccauauauugcaucaaggacaaguaucgugggccgggccugggaaaacaccacggucgaucuagagagcgacgggaaaccccagaaggugggaacugcugguuccaauaaaucucuccagagcgccggcuuuccuacagggcugaccuacucacaacuuaugacuuugaaggauaguaugaugcagcuggacccauccgcaaaaacauggauagauauugagggacguccggaagaccccguugagaucgcucucuaccagccuaugagcggcugcuauauucacuucuuucgcgaaccaaccgaccugaagcaguucaagcaagaugccaaauacucucaugguaucgacguggcggaucuuuuucccgcccagccugggcugacgucagcagucaucgaggcuuugccaagaaacauggugcucaccugucagggcagugacgauauuaagaggcuguuagacagccagggacggcgagauauaaaacugaucgacauuucccuaucuaaggccgauucgcgcagauucgaaaaugcuguaugggaccaaugcaaagaucucugucacaugcauacaggcguuguggucgagaagaagaaaaggggagggaaggaggaaaucacuccccacugcgcccugauggacuguauaauguaugaugcagccgugagcgguggccuuaacauuccggucuugcgggcugugcugccucgcgacaugguuuuuagaaccuccucacccaaagugguacucuga

SEQ ID NO: 8574 - RNA, 1710 nt, Artificial Sequence
  derived and/or modified CDS sequence (opt3) from LASV(ISTH1121-NIG-2012;Clade II)__AIT17471__NP
augagcgccuccaaggaggugaaaucuuuccuguggacccagucacucagaagggaacuuaguggcuacugcagcuccaucaagcugcaagucguuaaagacgcucaggcauuguuacacgggcuggauuuuucugaggugucgaacguacagcggcuaaugcgcaagcagaaacgagacgauucagaccucaagcgucugagagaucuuaaucaagccgugaacaaucuggucgaacuuaagagcacacagcagaaaaguauucucagggugggaacucugacguccgacgaucugcucaccuuagcggcugaccuggagaaguugaaaucuaagguuauacggacagaacgccccuugagcuccgguguguauaugggcaaccugucaacucagcaacuagagcagagaagggcccuccugaauaugaucgggauggucggaggcgcacaggguacccagccugggcgggauggagugguacgcguuugggacgugaaaaacccagaucuucugaauaaccaauucggcacaaugccgaguuugacccucgccugucugacuaagcagggccaggucgacuuaaaugaugcugugcuggcacucacagaccuugggcugauuuacaccgccaaguaucccaacagcucugacuuggaucgacuaucccaaucacauccuauccugaauaugguggacacgaaaaagagcagucucaacauuucuggauacaauuuuucccugggugcugccgucaaagcgggcgcaugcaugcuugaugggggaaacaugcuggagacuaucaagguuaccccacagacaauggacggcauauugaaaagcauccucaaggugaaaagaucgcuggguauguucguaucugauacucccggggaaaggaauccuuaugagaacauuuuauacaagaucugucuguccggagacggcuggccauauauugccucacggaccaguaucgugggccgugcuugggaaaacacaaccgucgaucuagagagcgacgggaagccccagaaaaugggaacgacugguuccaauaagucucuccagagcgccggcuuuccuacagggcugaccuacucacaacuuaugacuuugaaagauaguaugaugcagcuggacccauccgcaaagacauggauagauauugagggacgcccggaagaccccguggagaucgcucucuaccagccuaugagcggcugcuauauucacuucuuuagagaaccaaccgaccugaaacaguucaagcaagaugccaaguacucucaugguaucgacguugcggaucuuuuucccgcccagccugggcugacgucagcagugaucgaggcuuugccaaggaacaugguccucaccugucagggcagugacgauauuaaaaagcuguuagacagccagggacggcgagauauaaaacugaucgacauugcccuauccaaggcugauucucgcaaauucgaaaaugugguaugggaccaaugcaaggaucucugucacaugcauacaggcguuguggucgagaagaaaaagagagggggaaaagaggaaaucacuccccacugcgcccugauggacuguauaauguaugaugcagccgugucggguggccuuaacauuccggucuugagggcugugcugccucgggacaugguuuuucgcaccagcucccccaaggugguacucuga

SEQ ID NO: 8575 - RNA, 1710 nt, Artificial Sequence
  derived and/or modified CDS sequence (opt3) from LASV(ISTH1129-NIG-2012;Clade II)__AIT17475__NP
augagcgccuccaaggaggugaaaucuuuccuguggacccagucacucagaagggaacuuaguggcuacugcagcuccaucaagcugcaagucguuaaagacgcucaggcauuguuacacgggcuggauuuuucugaggugucgaacguacagcggcuaaugcgcaagcagaaacgagacgauucagaccucaagcgucugagagaucuuaaucaagccgugaacaaucuggucgaacuuaagagcacacagcagaaaagugugcucaggguuggaacucugacguccgacgaucugcucaccuuagcggcugaccuggagaaguugaaaucuaaggugauucggacagaacgccccuugagcuccggugucuauaugggcaaccugucagcccagcaacuagagcagagaagggcacuccugaguaugauagggauggugggaggcgcccaggguacucagccugggcgggauggaguaguucgcgugugggacgucaaaaauccagaucuucugaacaaucaauucggcaccaugccgagcuugacacucgcuugucugaccaagcagggccagguggacuuaaacgauacugugcuggcacucacagaccuugggcugaucuacaccgccaaguaucccaauucuuccgacuuggaucgacuaucacaaagccauccuauucugaacauggucgacacgaaaaagaguucucucaauaucuccggauacaacuuuagccugggugcugccguuaaagcgggcgcaugcaugcuugaugggggaaauaugcuggagacuauuaaggugaccccacagacaauggacggcaucuugaaaucgauacucaagguaaaaagaucucuggguauguucguguccgauacucccggggaaaggaacccuuaugagaauaucuuauacaagauuugucugucaggagacggcuggccauauaucgccagucggaccagcauugucggccgugcuugggaaaacacaaccguggaucuagaguccgacgggaagccccagaaaguuggaacggccgguucuaacaagagccuccagucagcaggcuuuccuacugggcugacauacagucaacuuaugaccuugaaagauuccaugaugcagcuggacccaagcgcuaagacuuggaucgauauagagggacgcccggaagaccccguggagauugcccucuaccagccuaucucuggcugcuauauucacuucuuuagagaaccaacagaccugaaacaguucaagcaagaugcgaaguacucacaugguaucgacgucaccgaucuuuuucccgcccagccugggcugacgagugcagugaucgaggcuuugccaaggaauaugguacucaccugucagggcagcgacgauauuaaacggcuguuagacucccagggacgacgcgauauaaagaucauugacaucgcccugucuaaagcugauucgagaagguucgaaaacgccguuugggaccaaugcaaggaucuaugucacaugcauacaggcguggucguggagaaaaagaagcgcgggggaaaagaggaaauaacuccccacugcgcacucauggacuguauuauguaugaugccgcugucagcgguggccugaauaucccggugcuucgggcgguuuugccuagagacaugguguuuaggaccuccucacccaagguaguccuguga

SEQ ID NO: 8576 - RNA, 1710 nt, Artificial Sequence
  derived and/or modified CDS sequence (opt3) from LASV(ISTH1137-NIG-2011;Clade II)__AIT17479__NP
augagcgccuccaaggaggugaaaucuuuccuguggacccagucacucagaagggaacuuaguggcuacugcagcaacaucaagcugcaagucguuaaagacgcucaggcauuguuacacgggcuggauuuuuccgaggugucuaauguacagcggcuaaugcgcaagcagaaacgagacgauucggaccucaagcgucugagagaucuuaaccaagccgugaauaaccuggucgaauugaagucaacacagcagaaaagcgugcucaggguuggaacucugacgagugacgaucugcucaccuuagcggcugaccuggagaaacuuaaguccaaggugauucggacagaacgccccuugucuagcggugucuauaugggcaaucuguccacucagcaacuagagcagagaagggcccuccugaacaugauagggauggugggaggcgcacaggguacccagccugggcgggauggaguaguucgcgugugggacgucaaaaauccagaucuucugaacaaucaauucggcacaaugccgucauugacccucgccugucugacuaagcagggccagguggacuuaaacgaugcugugcuggcacucacagaccuugggcugaucuacaccgccaaguaucccaauaguagcgacuuggaucgacuaucucaaucccauccuauucugaacauggucgacacgaaaaagucaagccucaauaucaguggauacaacuuuucucugggugcugccguuaaagcgggcgcaugcaugcuugaugggggaaauaugcuggagacuauuaaggugaccccacagacaauggacggcaucuugaaauccauacucaagguaaaaagaagccuggguauguucgugucggauacucccggggaaaggaacccuuaugagaacaucuuauacaagauuugucugucuggagacggcuggccauauaucgccucccggaccucaauugucggccgugcuugggaaaauacaaccguggaucuagagagugacgggaagccccagaaaguuggaacggccgguagcaacaagucccuccagucugcaggcuuuccuacugggcugacauacagccaacuuaugaccuugaaagauucaaugaugcagcuggacccaagugcuaagacuuggaucgauauagagggacgcccggaagaccccguggagauugcccucuaccagccuauguccggcugcuauauccacuucuuuagagaaccaacagaccugaaacaguucaagcaagaugcgaaguacagccaugguauugacgucgccgaucuuuuucccgcacagccugggcugaccucugcugugaucgaggccuugccaaggaauaugguacucacgugucagggcucagacgauaucaaaaagcuguuagacagucagggacggaaagauauuaagcugauagacaucgcucuaagcaaaguugauucccgacgcuucgaaaacgccgugugggaccaaugcaaggaucucugucacaugcauaccggcgucguggucgagaagaaaaagagagggggaaaagaggaaauuacaccccacugcgcacugauggacuguaucauguaugaugccgcugugucugguggccuuaauauaccgguuuugagggcggugcugccucgggacaugguauuucgcacuucgagccccaaggucgugcucuga

SEQ ID NO: 8577 - RNA, 1710 nt, Artificial Sequence
  derived and/or modified CDS sequence (opt3) from LASV(ISTH2010-NIG-2012;Clade II)__AIT17483__NP
augagcgccuccaaggaggugaaaucuuuccuguggacccagucacucagaagggaacuuaguggcuacugcagcaacaucaagcugcaagucguuaaagacgcucaggcauuguuacacgggcuggauuuuuccgaggugucuaauguacagcggcuaaugcgcaagcagaaacgagacgauucggaccucaagcgucugagagaucuuaaccaagccgugaauaaccuggucgaauugaagucaacacagcagaaaagcauucucagggugggaacucugacgagugacgaucugcucaccuuagcggcugaccuggagaaacuuaaguccaagguuauacggacagaacgccccuugucuagcgguguguauaugggcaaucuguccacucagcaacuagagcagagaagggcccuccugaaccuuaucgggauggucggaggcgcacaggguacccagccugggcgggauggagugguacgcguuugggacgugaaaaauccagaucuguugaacaaucaauucggcacaaugccgucacucacccuggccuguuuaacuaagcagggccaggucgaccugaacgaugcugugcucgcacuuacagaccugggguugauuuacaccgccaaguaucccaauaguagcgaccuagaucgacugucucaaucccauccuauccucaacaugguggacacgaaaaagucaagccugaauauuaguggauuuaacuucucucuuggugcugccgucaaagcgggcgcaugcaugcuggaugggggaaauauguuggagacuaucaagguuaccccacagacaauggacggcauacucaaauccauccugaaggugaaaaagagcuuagguauguuuguaucggauacucccggggaaagaaacccuuacgagaacauucuguauaagaucugucuaucuggagacggcuggccauacauugccuccaggaccucaaucgugggccgggcuugggaaaauacaaccgucgaucucgagagugacgggaaaccccacaaggugggaacggccgguagcaacaaaucccugcagucugcaggcuucccuacugggcuuacauauagccaguugaugacccugaaggauucaaugaugcaacucgacccaagugcuaaaacuuggauagauauugagggacguccggaagaccccguugagaucgcccuguaccagccuauguccggcugcuacauucacuuuuuccgcgaaccaacagaccuuaagcaguuuaagcaggaugcgaaauauagccaugguaucgacguggccgaucuguuccccgcacaaccuggguugaccucugcugucaucgaggcccucccaagaaauauggugcugacgugucagggcucagacgauauuaagagguuacuggacagucagggacggcgagauauaaaacuaaucgacauugcucucagcaaggccgauucccgcagauuugaaaacgcaguaugggaccagugcaaagaucugugucauaugcacaccggcguuguggucgagaagaagaaaaggggagggaaggaggaaaucacaccccacugcgcccuuauggacuguauaauguacgaugcugcggugucugguggcuugaauauuccgguccugcgggcagugcucccucgcgacaugguuuucagaacuucgagccccaaagugguacuguga

SEQ ID NO: 8578 - RNA, 1710 nt, Artificial Sequence
  derived and/or modified CDS sequence (opt3) from LASV(ISTH2020-NIG-2012;Clade II)__AIT17491__NP
augagcgccuccaaggaggugaaaucuuuccuguggacccagucacucagaagggaacuuaguggcuacugcagcaacaucaagcugcaagucguuaaagacgcucaggcauuguuacacgggcuggauuuuuccgaggugucuaauguacagcggcuaaugcgcaagcagaaacgagacgauggagaccucaagcgucugagagaucuuaaccaagccgugaauaaccuggucgaauugaagucgacacagcagaaaucagugcucaggguugguacucugacgagcgacgaucugcucaccuuagcggcugaccuggagaaacuuaagaguaaggugauucggacagaacgccccuuguccucuggcgucuauauggggaaucugagcacucagcaacuagagcagagaagggcccuccuguccaugauaggaauggugggcggugcacgggggacccagccuggacgcgauggcguaguucgagugugggacgucaaaaacccagaucuucugaauaaccaguucggcacaaugccgucauugacccucgccugucugacuaagcaaggacagguggacuuaaaugaugugguccuggcucucacagaccuugggcugaucuacaccgcaaaguaucccaacaguagcgacuuggauagacuaucucagucccauccuauucugaauaugguugacacgaaaaagucaagccucaacaucagugguuacaauuuuucucugggcgccgcugugaaagccggggcgugcaugcuugauggaggcaacaugcuggagacuauuaagguaaccccacaaacaauggacgguaucuugaaauccauacucaaggugaaaaagagccuggggauguucgucucggauacucccggagaaaggaauccuuaugagaacaucuuauacaagauuugucugucuggcgacggcuggccauauaucgcaucccggaccucaauuguggggcgugccugggaaaacacaaccguugaucuagagagugacggaaaaccccagaaggugggugcugccggcagcaauaaaucccuccagucugcaggguuuccuacgggacugacuuacagccagcuuaugacauugaaggauucaaugaugcaacuggacccaagugcuaaaaccuggaucgauauagagggccgcccggaagaccccgucgagauugcccucuaccagccuauguccgguugcuauauccacuucuuuagagaaccaacugaccugaagcaguucaagcaggaugcgaaauacagccaugggauugacgugacagaucuguuuucugcccaacccggccuuaccucagcaguaaucgaggcuuugccuaggaacaugguucucacgugucagggaagugacgauaucaagcggcuguuagacagccagggccgacgcgauauuaaacugauagacaucgcccuauccaaggcugauucuagaagguucgaaaaugccgugugggaccagugcaaagaucucugucacaugcauaccggggucguggucgagaagaagaaacggggagguaaggaggaaauuacaccacacugcgcacugauggacuguaucauguaugaugccgcugugucgggcgggcuuaacauacccguuuugcgcgcggugcugccgagagacaugguauuuaggacuagcuccccuaaagucgugcucuga

SEQ ID NO: 8579 - RNA, 1710 nt, Artificial Sequence
  derived and/or modified CDS sequence (opt3) from LASV(ISTH2025-NIG-2012;Clade II)__AIT17495__NP
augagcgccuccaaggaggugaaaucuuuccuguggacccagucacucagaagggaacuuaguggcuacugcagcaacaucaagcugcaagucguuaaagacgcucaggcauuguuacacgggcuggauuuuuccgaggugucuaauguacagcggcuaaugcgcaagcagaaacgagacgauucggaccucaagcgucugagagaucuuaaccaagccgugaauaaccuggucgaauugaagucaacacagcagaaaagcauucucagggugggaacucugacgagugacgaucugcucaccuuagcggcugaccuggagaaacuuaaguccaagguuauacggacagaacgccccuugucuagcgguguguauaugggcaaucuguccacucagcaacuagagcagagaagggcccuccugaacaugaucgggauggucggaggcgcacagucagcccagccuggucgggauggggugguacgcguuugggacgugaaaaauccagaucuucugaacaaucaauucggaaccaugccgaguuugacacucgcuugucugaccaagcagggccaggucgacuuaaacgaugcagugcuggcccucacugaccuuggccugauuuacacagcuaaguaucccaauagcucugacuuggaucgacuaucccaaucacauccuauccugaacaugguggacaccaaaaagagcagucucaauauuucuggguuuaacuucucccugggagccgcggucaaagccggugcaugcaugcuugauggcgggaauaugcuggagacgaucaagguuacuccacagaccauggacggaauauugaaaagcauccucaaggugaaaagaucgcugggcauguuuguaucugaugcucccggugaaaggaacccuuacgagaacauuuuauauaagaucugucuguccggggacggauggccauacauugccucacggacaaguaucgugggccgugcaugggaaaauacuaccgucgaucuagagagcgacggcaagccccagaaaguggggacagcuggauccaacaagucucuccagagcgccgguuucccuaccggccugacguauucacaacuuaugacuuugaaagauaguaugaugcagcuggacccauccgcgaagacauggauagauauugaggggcgcccggaagaccccguugagaucgcccucuaccagccuaugagcggaugcuacauucacuuuuucagagaaccaaccgaccugaaacaguuuaagcaagaugcaaaguauucucauggcaucgacguggcugaucuuuuccccgcccagccuggucugacuucagcugucaucgaggccuugccaaggaauauggugcucacaugucaggggagugacgauauuaaaaagcuguuagacagccagggccggcgagauauaaaacugaucgacauugcacuauccaaggccgauucucgcagauuugaaaacgcuguaugggaccaaugcaaagaucucugucacaugcauaccggaguuguggucgagaagaagaaaaggggcgggaaggaggaaaucacgccccacugcgcgcugauggacuguauaauguacgaugcagccgugucgggaggucuuaauauuccggucuugcgggcugugcugccucgcgacaugguuuucagaaccagcucccccaaagugguacucuga

SEQ ID NO: 8580 - RNA, 1710 nt, Artificial Sequence
  derived and/or modified CDS sequence (opt3) from LASV(ISTH2031-NIG-2012;Clade II)__AIT17499__NP
augagcgccuccaaggaggugaaaucuuuccuguggacccagucacucagaagggaacuuaguggcuacugcagcuccaucaagcugcaagucguuaaagacgcucaggcauuguuacacgggcuggauuuuucugaggugucgaacguacagcggcuaaugcgcaagcagaaacgagacgauucagaccucaagcgucugagagaucuuaaucaagccgugaacaaucuggucgaacuuaagagcacacagcagaaaaguauucucagggugggaacucugacguccgacgaucugcucaccuuagcggcugaccuggagaaguugaaaucuaagguuauacggacagaacgccccuugagcuccgguguguauaugggcaaccugucaacucagcaacuagagcagagaagggcccuccugaauaucauugggauggucggaggcgcacaggguacccagccugggcgggauggagugguacgcguuugggacgugaaaaacccagaucuucugaauaaccaauucggcacaaugccgaguuugacccucgccugucugacuaagcagggccaggucgacuuaaaugaugcugugcuggcacucacagaccuugggcugaucuacaccgccaaguaucccaacagcucugacuuggaucgacuaucccaaucacauccuauucugaauaugguggacacgaaaaagagcagucucaacaucucuggauacaauuuuucccugggugcugccgucaaagcgggcgcaugcaugcuugaugggggaaacaugcuggagacuauaaagguuaccccacagacaauggacggcaucuugaaaagcauucucaaggugaaaagaucgcuggguauguucguaucugauacucccggggaaaggaauccuuaugagaacaucuuauacaagauuugucuguccggagacggcuggccauauaucgccucacggaccaguauagugggccgugcuugggaaaacacaaccgucgaucuagagagcgacgggaagccccagaaagugggagccgcagguuccaauaagucucuccagagcgcuggcuuuccuacggggcugacuuacucacaacuuaugacauugaaagauaguaugaugcagcuggacccauccgccaagaccuggauugauaucgagggacgcccggaagaccccguugagauugcgcucuaccagccuaugagcggcugcuauauccacuucuuuagagaaccaacugaccugaaacaguucaagcaagaugccaaguacucucaugguaucgacguggcagaucuuuuucccgcucagccugggcugacaucagccgucauugaggcuuugccaaggaacauggugcucaccugucagggcagugacgauguaaaacggcuguuagacagccagggacgacgcgauauaaagcugaucgacauugcccuauccaaagcagauucuagaagguucgaaaaugccguuugggaccaaugcaaggaucucugucacaugcauacgggcguggucguggagaaaaagaagcgcgggggaaaagaggaaaucacaccccacugcgcucugauggacuguauaauguaugaugcggcagucucggguggccuuaacauuccgguguugcgggccguucugccuagagacaugguguuuaggaccagcucccccaagguaguccucuga

SEQ ID NO: 8581 - RNA, 1710 nt, Artificial Sequence
  derived and/or modified CDS sequence (opt3) from LASV(ISTH2037-NIG-2012;Clade II)__AIT17503__NP
augagcuccucuaaggaggugaaaucauuccuguggacccagagucucagaagggaacuuagcggcuacugcuccucuaucaagcugcaagucguuaaagacgcccaggcuuuguuacacgggcuggauuuuucggaggugucaaacguacagcggcuaaugcgcaagcagaaacgagacgauagcgaccucaagcgucugagagaucuuaaucaagcagugaacaaucuggucgaauugaagaguacacagcagaaauccauucucagggugggaacucugacgucugacgaucugcucaccuuagccgcggaccuggagaaacuuaagagcaagguuauacggacagaacgccccuuguccucagguguguauaugggcaaccugagugcucagcaacuagagcagagaagggcccuccugaauaugaucgggauggucggaggcgcacaggguacucagccugggcgggauggagugguacgcguuugggacgugaaaaacccagaucuucugaauaaccaauucggcaccaugccgagcuugacacucgccugucugaccaagcagggccaggucgacuuaaaugaugcugugcuggcacucacugaccuugggcugauuuacacagccaaguaucccaacucuuccgacuuggaucgacuaucacaaagccauccuauccugaauaugguggacaccaaaaagaguucucucaacauuuccggauacaauuuuagccugggugcugccgucaaagcgggcgcaugcaugcuugaugggggaaacaugcuggagacgaucaagguuacuccacagaccauggacggcauauugaaaucgauccucaaggugaaaaagucucuggguauguucguauccgauacacccggggaaagaaauccuuaugagaacauuuuauacaagaucugucugucaggagacggcuggccauauauugccaguaggacuagcaucgugggccgggcuugggaaaacaccacagucgaucuagaguccgacgggaaaccccagaaggugggaaccgccgguucuaauaaaagccuccagucagcaggcuuuccuacggggcugacuuacagucaacuuaugacauugaaggauuccaugaugcagcuggacccaagcgcuaaaaccuggauagauauugagggacguccggaagaccccguugagaucgcccucuaccagccuaugucuggcugcuauauucacuucuuucgcgaaccaacugaccugaagcaguucaagcaagaugcgaaauacucacaugguaucgacguggccgaucuuuuucccgcacagccugggcugacaagugcugucaucgaggccuugccaagaaacauggugcucaccugucagggcagcgacgauauuaagaggcuguuagacucccagggacggcgagauauaaaacugaucgacauugcucuaucuaaggccgauucgcgcagauucgaaaaugcaguaugggaccaaugcaaagaucucugucacaugcauacgggcguuguggucgagaagaagaaaaggggagggaaggaggaaaucacaccccacugcgcccugauggacuguauaauguaugaugcugcggugagcgguggccuuaacauuccggucuugcgggcagugcugccucgcgacaugguuuuuagaaccuccucacccaaagugguacucuga

SEQ ID NO: 8582 - RNA, 1710 nt, Artificial Sequence
  derived and/or modified CDS sequence (opt3) from LASV(ISTH2042-NIG-2012;Clade II)__AIT17507__NP
augagcgccuccaaggaggugaaaucuuuccuguggacccagucacucagaagggaacuuaguggcuacugcagcaacaucaagcugcaagucguuaaagacgcucaggcauuguuacacgggcuggauuuuuccgaggugucuaauguacagcggcuaaugcgcaagcagaaacgagacgauucggaccucaagcgucugagagaucuuaaccaagccgugaauaaccuggucgaauugaagucaacacagcagaaaagcauucucagggugggaacucugacgagugacgaucugcucaccuuagcggcugaccuggagaaacuuaaguccaagguuauacggacagaacgccccuugucuagcgguguguauaugggcaaucuguccacucagcaacuagagcagagaagggcccuccugaaccuuaucgggauggucggaggcgcacaggguacccagccugggcgggauggagugguacgcguuugggacgugaaaaauccagaucuguugaacaaucaauucggcacaaugccgucacucacccuggccuguuuaacuaagcagggccaggucgaccugaacgaugcugugcucgcacuuacagaccugggguugauuuacaccgccaaguaucccaauaguagcgaccuagaucgacugucucaaucccauccuauccucaacaugguggacacgaaaaagucaagccugaauauuaguggauuuaacuucucucuuggugcugccgucaaagcgggcgcaugcaugcuggaugggggaaauauguuggagacuaucaagguuaccccacagacaauagacggcauccucaaauccauucugaaggugaaaaagagcuuagguauguuuguaucggauacucccggggaaagaaacccuuacgagaacauccuguauaagauuugucuaucuggagacggcuggccauacaucgccuccaggaccucaauagugggccgggcuugggaaaauacaaccgucgaucucgagagugacgggaaaccccacaaggugggaacggccgguagcaacaaaucccugcagucugcaggcuucccuacugggcuuacauauagccaguugaugacccugaaggauucaaugaugcaacucgacccaagugcuaaaacuuggauugauaucgagggacguccggaagaccccguugagauugcccuguaccagccuauguccggcugcuacauccacuuuuuccgcgaaccaacagaccuuaagcaguuuaagcaggaugcgaaauauagccaugguaucgacguggccgaucuguuccccgcacaaccuggguugaccucugcugucauugaggcccucccaagaaauauggugcugacgugucagggcucagacgauauaaagagguuacuggacagucagggacggcgagauaucaaacuaauugacaucgcucucagcaagguagauucccgcagauuugaaaacgccguuugggaccagugcaaagaucugugucauaugcacaccggcguggucguggagaagaagaaaaggggagggaaggaggaaauaacaccccacugcgcacuuauggacuguauuauguacgaugccgcugucucugguggcuugaauaucccggugcugcgggcgguucucccucgcgacaugguguucagaacuucgagccccaaaguaguccuguga

SEQ ID NO: 8583 - RNA, 1710 nt, Artificial Sequence
  derived and/or modified CDS sequence (opt3) from LASV(ISTH2046-NIG-2012;Clade II)__AIT17511__NP
augagcgccuccaaggaggugaaaucuuuccuguggacccagucacucagaagggaacuuaguggcuacugcagcaacaucaagcugcaagucguuaaagacgcucaggcauuguuacacgggcuggauuuuuccgaggugucuaauguacagcggcuaaugcgcaagcagaaacgagacgauggagaccucaagcgucugagagaucuuaaccaagccgugaauaaccuggucgaauugaagucgacacagcagaaaucaauucucaggguggguacucugacgagcgacgaucugcucaccuuagcggcugaccuggagaaacuuaagaguaagguuauacggacagaacgccccuuguccucuggcguguauauggggaaucugagcacucagcaacuagagcagagaagggcccuccugaacaugaucggaauggucggcggugcacaggggacccagccuggacgggauggcgugguacgcguuugggacgugaaaaauccagaucuucugaacaaucaauucggcacaaugccguccuugacccucgccugucugacuaagcaggggcaggucgacuuaaacgaugcugugcuggcacucacagaccuuggacugauuuacaccgccaaguaucccaauucaagugacuuggaucgacuaagccaaucucauccuauccugaacaugguggacacgaaaaaguccucacucaauauuagcgguuacaacuuuagucugggcgcugccgucaaagcgggggcaugcaugcuugauggaggcaauaugcuggagacuaucaagguuaccccacagacaauagacgguaucuugaaaucuauucucaaggugaaaaagucccuggggauguucguaagcgauacucccggagaaagaaacccuuaugagaacaucuuauacaagauuugucugucgggcgacggcuggccauauaucgccucuaggaccuccauaguggggcgggcuugggaaaauacaaccgucgaucuagagucagacggaaaaccccagaagguggguacggccggcaguaacaaaagccuccaguccgcaggguuuccuacuggacugacauacucucaacuuaugaccuugaaggauagcaugaugcagcuggacccaucagcuaaaacuuggauugauaucgagggccguccggaagaccccguugagauugcccucuaccagccuaugagugguugcuauauccacuucuuucgcgaaccaacagaccugaagcaguucaagcaagaugcgaaauacucccaugggaucgacgugaccgaucuuuuuagcgcccagcccggccugacgucugcagucauugaggcuuugccuagaaauauggugcucaccugucagggaucagacgauauaaagaggcuguuagacagucagggccggcgagauaucaaacugauugacaucgcccuaagcaaggcugauucccgcagauucgaaaacgccguaugggaccaaugcaaagaucucugucacaugcauacagggguuguggucgagaagaagaaaaggggagguaaggaggaaauaacuccacacugcgcacugauggacuguauuauguaugaugccgcugugucuggcgggcuuaauauccccgucuugcgggcggugcugccgcgcgacaugguuuuuagaaccucgagcccuaaagugguacucuga

SEQ ID NO: 8584 - RNA, 1710 nt, Artificial Sequence
  derived and/or modified CDS sequence (opt3) from LASV(ISTH2050-NIG-2012;Clade II)__AIT17515__NP
augagcgccuccaaggaggugaaaucuuuccuguggacccagucacucagaagggaacuuaguggcuacugcagcuccaucaagcugcaagucguuaaagacgcucaggcauuguuacacgggcuggauuuuucugaggugucgaacguacagcggcuaaugcgcaagcagaaacgagacgauucagaccucaagcgucugagagaucuuaaucaagccgugaacaaucuggucgaacuuaagagcacacagcagaaaaguauucucagggugggaacucugacguccgacgaucugcucaccuuagcggcugaccuggagaaguugaaaucuaagguuauacggacagaacgccccuugagcuccgguguguauaugggcaaccugucaacucagcaacuagagcagagaagggcccuccugaauaugaucgggauggucggaggcgcacaggguacccagccugggcgggauggagugguacgcguuugggacgugaaaaacccagaucuucugaauaaccaauucggcacaaugccgaguuugacccucgccugucugacuaagcagggccaggucgacuuaaaugaugcugugcuggcacucacagaccuugggcugauuuacaccgccaaguaucccaacagcucugacuuggaucgacuaucccaaucacauccuauccugaauaugguggacacgaaaaagagcagucucaacauuucuggauacaauuuuucccugggugcugccgucaaagcgggcgcaugcaugcuugaugggggaaacaugcuggagacuaucaagguuaccccacagacaauggacggcauauugaaaagcauccucaaggugaaaagaucgcuggguauguucguaucugauacucccggggaaaggaauccuuaugagaacauuuuauacaagaucugucuguccggagacggcuggccauauauugccucacggaccaguaucgugggccgugcuugggaaaacacaaccgucgaucuagagagcgacgggaagccccagaaagugggagccgcagguuccucuaagagccuccagucagcuggcuuuccuacggggcugacuuacagucaacuuaugacauugaaagauuccaugaugcagcuggacccaagcgccaagaccuggauagauauugagggacgcccggaagaccccguugagaucgcgcucuaccagccugugucuggcugcuauauucacuucuuuagagaaccaacugaccugaaacaguucaagcaagaugccaaguacucacaugguaucgacgucgcagaucuuuuucccgcucagccugggcugacaagugccgugaucgaggcuuugccaaggaauaugguacucaccugucagggcagcgacgauauuaaacggcuguuagacucccagggacgacgcgauauaaagcugaucgacauugcccuaucuaaagcagauucgagaagguucgaaaacgccguuugggaccaaugcaaggaucucugucacaugcauacgggcguggucguggagaaaaagaagcgcgggggaaaagaggaaaucacaccccacugcgcucugauggacuguauaauguaugaugcggcagucagcgguggccuuaauauuccgguguugcgggccguucugccuagagacaugguguuuaggaccuccucacccaagguaguccucuga

SEQ ID NO: 8585 - RNA, 1710 nt, Artificial Sequence
  derived and/or modified CDS sequence (opt3) from LASV(ISTH2057-NIG-2012;Clade II)__AIT17519__NP
augagcgccuccaaggaggugaaaucuuuccuguggacccagucacucagaagggaacuuaguggcuacugcagcaacaucaagcugcaagucguuaaagacgcucaggcauuguuacacgggcuggauuuuuccgaggugucuaauguacagcggcuaaugcgcaagcagaaacgagacgauucggaccucaagcgucugagagaucuuaaccaagccgugaauaaccuggucgaauugaagucaacacagcagaaaagcauucucagggugggaacucugacgagugacgaucugcucaccuuagcggcugaccuggagaaacuuaaguccaagguuauacggacagaacgccccuugucuagcgguguguauaugggcaaucuguccgcccagcaacuagagcagagaagggcacuccugaacaugaucgggauggucggaggcgcccaggguacucagccugggcgggauggagugguacgcguuugggacgugaaaaauccagaucuucugaacaaucaauucggcaccaugccgucauugacacucgcuugucugaccaagcagggccaggucgacuuaaacgaugcagugcuggcccucacugaccuugggcugauuuacacagcuaaguaucccaauaguagcgacuuggaucgacuaucucaaucccauccuauccugaacaugguggacaccaaaaagucaagccucaauauuaguggauuuaacuucucucugggugccgcggucaaagcaggcgccugcaugcuugaugggggaaauaugcuggagacgaucaagguuacuccacagaccauggacggcauauugaaauccauccucaaggugaaaagaagccuggguauguuuguaucggauacacccggggaaaggaacccuuacgagaacauuuuauauaagaucugucugucuggagacggcuggccauacauugcuucccggacuucaaucgugggccgugccugggaaaauaccacagucgaucuagagagugacgggaagccccagaaagugggaaccgcagguagcaacaagucccuccagucugcuggcuucccuacggggcugacuuauagccaacuuaugacauugaaagauucaaugaugcagcuggacccaagugccaagaccuggauagauauugagggacgcccggaagaccccguugagaucgcgcucuaccagccuauguccggcugcuacauucacuuuuucagagaaccaacugaccugaaacaguuuaagcaagaugccaaguauagccaugguaucgacguggcagaucuuuuccccgcucagccugggcugacaucugccgucaucgaggcuuugccaaggaauauggugcucaccugucagggcucagacgauauuaaacggcuguuagacagucagggacgacgcgauauaaagcugaucgacauugcccuaagcaaagcagauuccagaagguuugaaaacgccguaugggaccaaugcaaggaucucugucacaugcauacgggcguuguggucgagaaaaagaagcgcgggggaaaagaggaaaucacaccccacugcgcucugauggacuguauaauguacgaugcggcagugucugguggccuuaauauuccggucuugcgggccgugcugccuagagacaugguuuucaggaccucgagccccaaggugguacucuga

SEQ ID NO: 8586 - RNA, 1710 nt, Artificial Sequence
  derived and/or modified CDS sequence (opt3) from LASV(ISTH2064-NIG-2012;Clade II)__AIT17525__NP
augagcgccuccaaggaggugaaaucuuuccuguggacccagucacucagaagggaacuuaguggcuacugcagcuccaucaagcugcaagucguuaaagacgcucaggcauuguuacacgggcuggauuuuucugaggugucgaacguacagcggcuaaugcgcaagcagcgacgugacgauucagaccucaaaagacugagggaucuuaaucaagccgugaacaaucuggucgaacucaagagcacacagcagaagaguauuuugcgggugggaacucugacguccgacgaucugcucaccuuagcggcugaccuggagaaacuuaagucuaaaguuauacgcacagaaagacccuugagcuccgguguguauaugggcaaccugucaacucagcaacuagagcagaggcgggcccuccugaauaugaucgggauggucggaggcgcacaggguacccagccugggcgcgauggagugguacgaguuugggacgugaagaacccagaucuucugaauaaccaauucggcacaaugccgaguuugacccucgccugucugacuaaacagggccaggucgacuuaaaugaugcugugcuggcacucacagaccuugggcugauuuacaccgccaaguaucccaacagcucugacuuggauagacuaucccaaucacauccuauccugaauaugguggacacgaagaaaagcagucucaacauuucuggauacaauuuuucccugggugcugccgucaaggcgggcgcaugcaugcuugaugggggaaacaugcuggagacuaucaaaguuaccccacagacaguggacggcauacucaagagcaucuugaaaguaaagaggucgcuggguauguucgugucugauacucccggggaacggaauccuuaugagaacauuuuauacaaaaucugucuguccggagacggcuggccauauauugccucacguaccaguaucgucggccgcgcuugggaaaacacaaccguggaucuagagagcgacgggaagccccagaagguuggaacggccgguuccaauaaaucucuccagagcgcaggcuuuccuacugggcugacauacucacaacuuaugaccuugaaggauaguaugaugcagcuggacccauccgcuaaaacuuggauagauauugagggaagaccggaagaccccguggagaucgcccucuaccagccuaugagcggcugcuauauucacuucuuuagggaaccaacagaccugaagcaguucaaacaagaugcgaaguacucucaugguaucgacgucgccgaucuuuuucccacccagccugggcugacgucagcagugaucgaggcuuugccacggaacaugguacucaccugucagggcagugacgauauuaagcgacuguuagacagccagggacgcagagauauaaaacugaucgacauugcccuauccaaggcugauucuaggaaauucgaaaaugccguuugggaccaaugcaaggaucucugucacaugcauacaggcguggucguggagaaaaagaagcgcgggggaaaagaggaaaucacuccccacugcgcacugauggacuguauaauguaugaugccgcugucucggguggccuuaacauuccgguguugcgggcgguucugccuagagacaugguguuuaggaccagcucccccaagguaguccucuga

SEQ ID NO: 8587 - RNA, 1710 nt, Artificial Sequence
  derived and/or modified CDS sequence (opt3) from LASV(ISTH2065-NIG-2012;Clade II)__AIT17529__NP
augagcgccuccaaggaggugaaaucuuuccuguggacccagucacucagaagggaacuuaguggcuacugcagcaacaucaagcugcaagucguuaaagacgcucaggcauuguuacacgggcuggauuuuuccgaggugaauaacguacagcggcuaaugcgcaagcagaaacgagacgauucugaccucaagcgucugagagaucuuaaucaagccgugaacaaucuggucgaauugaagucgacacagcagaaaucaauucucagggugggaacucugacgagcgacgaucugcucaccuuagcggcugaccuggagaaacuuaagaguaagguuauacggacagaacgccccuuguccucugguguguauaugggcaaccugagcacucagcaacuagagcagagaagggcccuccugaauaugaucgggauggcaggaggcacccaggguacacagccugggcgggauggagucgugcgcguaugggacguuaaaaacccagaucuucugaauaaccaauucggcaccaugccguccuugacucucgccugucugacaaagcagggccagguggacuuaaaugaugcuguccuggcacucaccgaccuugggcugauuuacacggccaaguaucccaacucaagugacuuggaucgacuaagccaaucucauccuauccugaauaugguggacacuaaaaaguccucacucaacauuagcggauacaauuuuagucugggugcugccgugaaagcgggcgcaugcaugcuugaugggggaaacaugcuggagaccaucaaggucacaccacagacuauggacggcauauugaaaucuauccucaagguuaaaagaucccuggguauguucgugagcgauacccccggggaaaggaacccuuaugagaauauuuuauacaagaucugucugucgggagacggcuggccauauauugccucucggacauccaucguaggccgugcuugggaaaacaccacgguggaucuagagucagacgggaagccccagaaagucggaacugccgguaguaauaagagccuccaguccgcaggcuuuccuacagggcugaccuacucucaacuuaugacuuugaaagauagcaugaugcagcuggacccaucagcuaagacauggauagauauugagggacgcccggaagaccccguggagaucgcccucuaccagccuaugaguggcugcuauauucacuucuuuagagaaccaaccgaccugaaacaguucaagcaagaugcgaaguacucccaugguaucgacguugccgaucuuuuucccgcacagccugggcugacgagcgcugugaucgaggccuugccaaggaacaugguccucaccugucagggcucugacgauauuaaaaagcuguuagacucacagggacggcgagauauaaaacugaucgacauuagucuaagcaagaucgauucccgcaaauucgaaaaugcugugugggaccaaugcaaggaucucugucacaugcauacaggcguaguuguggagaagaaaaagagagggggaaaagaggaaauaacuccccacugcgcccugauggacuguauuauguuugaugcagccgucucugguggccuuaacaucccgguguugagggcuguccugccucgggacaugguguuccgcaccucgagccccaagguugugcucuga

SEQ ID NO: 8588 - RNA, 1710 nt, Artificial Sequence
  derived and/or modified CDS sequence (opt3) from LASV(ISTH2094-NIG-2012;Clade II)__AIT17539__NP
augagcgccuccaaggaggugaaaucuuuccuguggacccagucacucagaagggaacuuaguggcuacugcagcaacaucaagcugcaagucguuaaagacgcucaggcauuguuacacgggcuggauuuuuccgaggugucuaauguacagcggcuaaugcgcaagcagaaacgagacgauggagaccucaagcgucugagagaucuuaaccaagccgugaauaaccuggucgaauugaagucgacacagcagaaaucagugcucaggguugguacucugacgagcgacgaucugcucauuuuagcggcugaccuggagaaacuuaagaguaaggugauacggaccgaacgccccuuguccucuggcgucuauauggggaaucugagcacacagcaacuagagcagagaaaagcccuccuguccaugaucggaauggugggcggugcacaggggacucagccuggaagggauggcguaguucgggugugggacgucaagaacccagaucuucugaauaaccaauucggcaccaugccgucauugacacucgccugucugaccaagcagggacagguggacuuaaaugaugcugugcuggcacucacugaccuugggcugauuuacacagccaaauaucccaacaguagcgacuuggaucgccuaucucaaucccauccuauccugaauauggucgacaccaagaaaucaagccucaacauuagugguuacaauuuuucucugggcgcugccguuaaggcgggggcaugcaugcuugauggaggcaacaugcuggagacgaucaaagugacuccacagaccauggacgguauauugaaguccauccucaaaguaaagcgaagccuggggauguucgugucggauacacccggagaaagaaauccuuaugagaacauuuuauacaagaucugucugucuggcgacggcuggccauauauugccuccaggacuucaaucgucgggcgggcuugggaaaacaccacaguggaucuagagagugacggaaaaccccagaagguugguagcgccggcuccaauaaaucucuccagagcgcaggguuuccuaccggacugacguacucacaacuuaugacuuugaaggauaguaugaugcagcuggacccauccgcuaaaacauggauagauauugagggccguccggaagaccccguggagaucgcccucuaccagccuaugagcgguugcuauauucacuucuuucgcgaaccaaccgaccugaagcaguucaagcaagaugcgaaauacucucaugggaucgacgucacugaucuguuuucagcccagcccggccuuacaagugcagugaucgaggcuuugccuagaaacaugguacucaccugucagggaagcgacgauauuaagaaacuguuagacucccagggcaggcgggauauaaagcugaucgacauuucucuagggaaagccgauucgcgacgcuucgaaaaugcuguuugggaccaaugcaaggaucucugucacaugcauacgggaguggucguggagaagaaaaagagagguggcaaagaggaaaucaccccacacugcgcccugauggacuguauaauguuugaugcagccgucagcgggggacuuaacauucccaucuugagggcugugcugccgcgggacaugguuuuccgcacauccucaccuaaggugguacucuga

SEQ ID NO: 8589 - RNA, 1710 nt, Artificial Sequence
  derived and/or modified CDS sequence (opt3) from LASV(ISTH2129-NIG-2012;Clade II)__AIT17545__NP
augagcgccuccaaggaggugaaaucuuuccuguggacccagucacucagaagggaacuuaguggcuacugcagcaacaucaagcugcaagucguuaaagacgcucaggcauuguuacacgggcuggauuuuuccgaggugucuaauguacagcggcuaaugcgcaagcagaaacgagacgauucggaccucaagcgucugagagaucuuaaccaagccgugaauaaccuggucgaauugaagucaacacagcagaaaagcgugcucaggguuggaacucugacgagugacgaucugcucaccuuagcggcugaccuggagaaacuuaaguccaaggugauucggacagaacgccccuugucuagcggugucuauaugggcaaucuguccacucagcaacuagagcagagaagggcccuccugaacaugauagggauggugggaggcgcacaggguacccagccugggcgggauggaguaguucgcgugugggacgucaaaaauccagaucuucugaacaaucaauucggcacaaugccgucauugacccucgccugucugacuaagcagggccagguggacuuaaacgaugcugugcuggcacucacagaccuugggcugaucuacaccgccaaguaucccaauaguagcgacuuggaucgacuaucucaaucccauccuauucugaacauggucgacacgaaaaagucaagccucaauaucaguggauacaacuuuucucugggugcugccguuaaagcgggcgcaugcaugcuugaugggggaaauaugcuggagacuauuaaggugaccccacagacaauggacggcaucuugaaauccauacucaaggugaaaaagagccuggguauguucguaucggauacucccggggaaagaaacccuuaugagaacaucuuauacaagauuugucugucuggagacggcuggccauauaucgccuccaggaccucaauugucggccgggcuugggaaaauacaaccguggaucuagagagugacgggaaaccccagaagguuggaaucgccgguagcaacaaaucccuccagucugcaggcuuuccuacggggcugacuuacagccaacuuaugacauugaaggauucaaugaugcagcuggacccaagugcuaaaaccuggauagauauugagggacguccggaagaccccguggagaucgcccucuaccagccuauguccggcugcuauauucacuucuuucgcgaaccaacugaccugaagcaguucaagcaagaugcgaaauacagccaugguaucgacgucgccgaucuguuuucugcacagcccgggcuuacaucagcugugaucgaggccuugccuagaaauaugguacucaccugucagggcagugacgauauuaagaggcuguuagacagccagggacggcgagauauaaaacugaucgacauugcucuauccaaggccgauucucgcaaauucgaaaacgcaguuugggaccaaugcaaggaucucugucacaugcauacgggcguggucguggagaagaaaaagagagggggaaaagaggaaaucaccccacacugcgcccugauggacuguauaauguaugaugcugcggucucggguggccuugacauucccguguugagggcaguucugccgcgggacaugguguuucgcacaagcuccccuaagguaguccucuga

SEQ ID NO: 8590 - RNA, 1710 nt, Artificial Sequence
  derived and/or modified CDS sequence (opt3) from LASV(ISTH2217-NIG-2012;Clade II)__AIT17549__NP
augagcgccuccaaggaggugaaaucuuuccuguggacccagucacucagaagggaacuuaguggcuacugcagcaacaucaagcugcaagucguuaaagacgcucaggcauuguuacacgggcuggauuuuuccgaggugucuaauguacagcggcuaaugcgcaagcagaaacgagacgauucggaccucaagcgucugagagaucuuaaccaagccgugaauaaccuggucgaauugaagucaacacagcagaaaagcauucucagggugggaacucugacgagugacgaucugcucaccuuagcggcugaccuggagaaacuuaaguccaagguuauacggacagaacgccccuugucuagcgguguguauaugggcaaucuguccacucagcaacuagagcagagaagggcccuccugaacaugaucgggauggucggaggcgcacaggguacccagccugggcgggauggagugguacgcguuugggacgugaaaaauccagaucuucugaacaaucaauucggcacaaugccgucauugacccucgccugucugacuaagcagggccaggucgacuuaaacgauguggugcuggcucucacagaccuugggcugauuuacaccgcaaaguaucccaauaguagcgacuuggaucgacuaucucaaucccauccuauccugaacauggucgacacgaaaaagucaagccucaauauuaguggauacaacuuuucucugggugccgcuguuaaagccggcgcgugcaugcuugaugggggaaauaugcuggagacuaucaaggugaccccacagacaauggacggcauauugaaauccauccucaaggugaaaaagagccuggguauguucguaucggauacucccggggaaagaaacccuuaugagaacauuuuauacaagaucugucugucuggagacggcuggccauauauugcauccaggaccucaaucgucggccgggccugggaaaauacaaccguggaucuagagagugacgggaaaccccagaagguuggaacgguggguagcaacaaaucccuccagucugcuggcuuuccuacugggcugacauacagccaacuuaugaccuugaaggauucaaugaugcagcuggacccaagugccaaaacuuggauagauauugagggacguccggaagaccccgucgagaucgcacucuaccagccuauguccggcugcuauauucacuucuuucgcgaaccaacagaccugaagcaguucaagcaagaugcuaaauacagccaugguaucgacguggccgaucuuuuucccgcgcagccugggcugaccucugccguaaucgaggcauugccaagaaauaugguucucacgugucagggcucagacgauauuaagaaacuguuagacagucagggaaggcgggauauaaagcugaucgacauugcucuaagcaaagccgauucccgaaaguucgaaaacgcugugugggaccaaugcaaggaucucugucacaugcauaccggcgucguggucgagaaaaagaaacgcgggggaaaggaggaaaucacaccccacugcgcccugauggacuguauaauguaugaugcagccgugucugguggccuuaauauuccgguuuugagagcugugcugccuagggacaugguauuucggacuucgagccccaaagucgugcucuga

SEQ ID NO: 8591 - RNA, 1710 nt, Artificial Sequence
  derived and/or modified CDS sequence (opt3) from LASV(ISTH2271-NIG-2012;Clade II)__AIT17553__NP
augagcgccuccaaggaggugaaaucuuuccuguggacccagucacucagaagggaacuuaguggcuacugcagcuccaucaagcugcaagucguuaaagacgcucaggcauuguuacacgggcuggauuuuucugaggugucgaacguacagcggcuaaugcgcaagcagaaacgagacgauucagaccucaagcgucugagagaucuuaaucaagccgugaacaaucuggucgaacuuaagagcacacagcagaaaaguauucucagggugggaacucugacguccgacgaucugcucaccuuagcggcugaccuggagaaguugaaaucuaagguuauacggacagaacgccccuugagcuccgguguguauaugggcaaccugucaacucagcaacuagagcagagaagggcccuccugaauaugaucgggauggucggaggcgcacaggguacccagccugggcgggauggagugguacgcguuugggacgugaaaaacccagaucuucugaauaaccaauucggcacaaugccgaguuugacccucgccugucugacuaagcagggccaggucgacuuaaaugaugcugugcuggcacucacagaccuugggcugauuuacaccgccaaguaucccaacagcucugacuuggaucgacuaucccaaucacauccuauccugaauaugguggacacgaaaaagagcagucucaacauuucuggauacaauuuuucccugggugcugccgucaaagcgggcgcaugcaugcuugaugggggaaacaugcuggagacuaucaagguuaccccacagacaauggacggcauauugaaaagcauccucaaggugaaaagaucgcuggguauguucguaucugauacucccggggaaaggaauccuuaugagaacauuuuauacaagaucugucuguccggagacggcuggccauauauugccucacggaccaguaucgugggccgugcuugggaaaacacaaccgucgaucuagagagcgacgggaagccccagaaaaugggaacggccgguuccaauaagucucuccagagcgcaggcuuuccuacugggcugacauacucacaacuuaugaccuugaaagauaguaugaugcagcuggacccauccgcuaagacuuggauagauauugagggacgcccggaagaccccguggagaucgcccucuaccagccuaugagcggcugcuauauucacuucuuuagagaaccaacagaccugaaacaguucaagcaagaugcgaaguacucucaugguaucgacguugccgaucuuuuucccgcacagccugggcugaccucagcugugaucgaggccuugccaaggaacaugguccucacgugucagggcagugacgauauuaaaaagcuguuagacagccagggacggcgagauauaaaacugaucgacauugcucuauccaaggccgauucucgcagauucgaaaaugcagugugggaccaaugcaaagaucucugucacaugcauaccggcguaguuguggagaagaagaaaaggggagggaaggaggaaaucacaccccacugcgcccugauggacuguauaauguaugaugcugcggucucggguggccuuaacauuccgguguugcgggcaguccugccucgcgacaugguguuuagaacuagcucccccaaaguugugcucuga

SEQ ID NO: 8592 - RNA, 1710 nt, Artificial Sequence
  derived and/or modified CDS sequence (opt3) from LASV(ISTH2312-NIG-2012;Clade II)__AIT17561__NP
augagcgccuccaaggaggugaaaucuuuccuguggacccagucacucagaagggaacuuaguggcuacugcagcaacaucaagcugcaagucguuaaagacgcucaggcauuguuacacgggcuggauuuuuccgaggugucuaauguacagcggcuaaugcgcaagcagaaacgagacgauucggaccucaagcgucugagagaucuuaaccaagccgugaauaaccuggucgaauugaagucaacacagcagaaaagcauucucagggugggaacucugacgagugacgaucugcucaccuuagcggcugaccuggagaaacuuaaguccaagguuauacggacagaacgccccuugucuagcgguguguauaugggcaaucuguccacucagcaacuagagcagagaagggcccuccugaacaugaucgggauggucggaggcgcacaggguacccagccugggcgggauggagugguacgcguuugggacgugaaaaauccagaucuucugaacaaucaauucggcacaaugccgucauugacccucgccugucugacuaagcagggccaggucgacuuaaacgaugcugugcuggcacucacagaccuugggcugauuuacaccgccaaguaucccaauaguagcgacuuggaucgacuaucucaaucccauccuauccugaacaugguggacacgaaaaagucaagccucaauauuaguggauacaacuuuucucugggugcugccgucaaagcgggcgcaugcaugcuugaugggggaaauaugcuggagacuaucaagguuaccccacagacaauagacggcaucuugaaauccauucucaaggugaaaaagagccuggguauguucguaucggauacucccggggaaagaaacccuuaugagaacaucuuauacaagauuugucugucuggagacggcuggccauauaucgccuccaggaccucaauagugggccgggcuugggaaaauacaaccgucgaucuagagagugacgggaaaccccagaaggugggaacgguugguagcaacaaaucccuccagucugccggcuuuccuacugggcugacauacagccaacuuaugaccuugaaggauucaaugaugcagcuggacccaagugcaaaaacuuggauugauaucgagggacguccggaagaccccguggagauugcucucuaccagccuauguccggcugcuauauccacuucuuucgcgaaccaacagaccugaagcaguucaagcaagaugccaaauacagccaugguaucgacgucgcggaucuuuuucccgcccagccugggcugaccucugcagugauugaggcuuugccaagaaauaugguacucacgugucagggcucagacgauauaaagaggcuguuagacagucagggacggcgagauaucaaacugauugacaucgcccuaagcaaggcugauucccgcagauucgaaaacgccguuugggaccaaugcaaagaucucugucacaugcauaccggcguggucguggagaagaagaggcgcgggggaaaagaggaaauaacaccccacugcgcacugauggacuguauuauguaugaugccgcugucucugguggccuuaauaucccgguguugcgggcgguucugccuagagacaugguguuuaggacuucgagccccaagguaguccucuga

SEQ ID NO: 8593 - RNA, 1710 nt, Artificial Sequence
  derived and/or modified CDS sequence (opt3) from LASV(ISTH2316-NIG-2012;Clade II)__AIT17565__NP
augagcgccuccaaggagaucaaaucuuuccuguggacccagucacucagaagggaacuuaguggcuacugcagcuccauuaagcugcaaguggucaaagacgcucaggcauuguuacacgggcuggauuuuucugagguuucgaacgugcagcggcuaaugcgcaagcagaaacgagacgauucagaccucaagcgucugagagaucuuaaucaagccguaaacaaucugguggaacuuaagagcacacagcagaaaaguauacucagggucggaacucugacguccgacgaucugcucaccuuagcggcugaccuggagaaguugaaaucuaaggugauccggacagaacgccccuugagcuccgguguuuauaugggcaaccugucaacucagcaacuagagcagagaagggcccuccugaauaugauugggauggugggaggcgcacaggguacccagccugggcgggauggagucgugcgcguaugggacguuaaaaacccagaucuucugaauaaccaauucggcacaaugccgaguuugacccucgccugucugacuaagcagggccagguggacuuaaaugaugcuguccuggcacucacagaccuugggcugaucuacaccgccaaguaucccaacagcucugacuuggaucgacuaucccaaucacauccuauucugaauaugguggacacgaaaaagagcagucucaacaucucuggauacaauuuuucccugggugcugccgugaaagcgggcgcaugcaugcuugaugggggaaacaugcuggagacuauaaaggucaccccacagacaauggacggcaucuugaaaagcauucucaagguuaaaagaucgcuggguauguucgugucugaugcccccggggaaaggaauccuuaugagaacaucuuauacaagauuugucuguccggagacggcuggccauauaucgcuucacggaccaguauaguaggccgugccugggaaaacaccacaguggaucuagagagcgacgggaagccccagaaagucggaaccgcagguuccaauaagucucuccagagcgcuggcuuuccuacggggcugacuuacucacaacuuaugacauugaaagauaguaugaugcagcuggacccauccgccaagaccuggauugauaucgagggacgcccggaagaccccguggagauugcgcucuaccagccuaugagcggcugcuauauccacuucuuuagagaaccaacugaccugaaacaguucaagcaagaugccaaguacucucaugguaucgacguugcagaucuuuuucccgcucagccugggcugacaucagccgugauugaggcuuugccaaggaacaugguccucaccugucagggcagugacgauauaaaacggcuguuagacagccagggacgacgcgauaucaagcugauugacaucgcccuauccaaagcagauucuagaaaguucgaaaaugccgugugggaccaaugcaaagaucucugucacaugcauacgggcguaguuguggagaagaagaaaaggggagggaaggaggaaauaacuccccacugcgcucugauggacuguauuauguaugaugcggcagucucggguggccuuaacaucccgguguugcgggccguccugccucgcgacaugguguuuagaacaagcucccccaaaguugugcucuga

SEQ ID NO: 8594 - RNA, 1710 nt, Artificial Sequence
  derived and/or modified CDS sequence (opt3) from LASV(ISTH2334-NIG-2012;Clade II)__AIT17569__NP
augagcgccuccaaggaggugaaaucuuuccuguggacccagucacucagaagggaacuuaguggcuacugcagcaacaucaagcugcaagucguuaaagacgcucaggcauuguuacacgggcuggauuuuuccgaggugucuaauguacagcggcuaaugcgcaagcagaaacgagacgauucggaccucaagcgucugagagaucuuaaccaagccgugaauaaccuggucgaauugaagucaacacagcagaaaagcauucucagggugggaacucugacgagugacgaucugcucaccuuagcggcugaccuggagaaacuuaaguccaagguuauacggacagaacgccccuugucuagcgguguguauaugggcaaucuguccacucagcaacuagagcagagaagggcccuccugaacaugaucgggauggucggaggcgcacaggguacccagccugggcgggauggagugguacgcguuugggacgugaaaaauccagaucuucugaacaaucaauucggcacaaugccgucauugacccucgccugucugacuaagcagggccaggucgacuuaaacgaugcugugcuggcacucacagaccuugggcugauuuacaccgccaaguuucccaauaguagcgacuuggaucgacuaucucaaucccauccuauccugaacaugguggacacgaaaaagucaagccucaauauuaguggauauaacuucucucugggugcugccgucaaagcgggcgcaugcaugcuugaugggggaaauaugcuggagacuaucaagguuaccccacagacaauggacggcauauugaaauccauccucaaggugaaaaagagccuggguauguuuguaucggauacucccggggaaagaaacccuuacgagaacauuuuauauaagaucugucugucuggagacggcuggccauacauugccuccaggaccucaaucgugggccgggcuugggaaaauacaaccgucgaucuagagagugacgggaaaccccagaaggugggaacgacugguagcaacaaaucccuccagucugccggcuucccuacagggcugaccuauagccaacuuaugacuuugaaggauucaaugaugcagcuggacccaagugcaaaaacauggauagauauugagggacguccggaagaccccguugagaucgcucucuaccagccuauguccggcugcuacauucacuuuuuccgcgaaccaaccgaccugaagcaguuuaagcaagaugccaaauauagccaugguaucgacguggcggaucuuuuccccgcccagccugggcugacgucugcagucaucgaggcuuugccaagaaauauggugcucaccugucagggcucagacgauauuaagaggcuguuagacagucagggacggcgagauauaaaacugaucgacauugcccuaagcaaggcugauucccgcagauuugaaaacgccguaugggaccaaugcaaagaucucugucacaugcauacaggcguuguggucgagaagaagaaaaggggagggaaggaggaaaucacuccccacugcgcacugauggacuguauaauguacgaugccgcugugucugguggccuuaauuugccgguccugcgggcggugcucccucgcgacaugguuuucagaaccucgagccccaaagugguacuguga

SEQ ID NO: 8595 - RNA, 1710 nt, Artificial Sequence
  derived and/or modified CDS sequence (opt3) from LASV(ISTH2358-NIG-2012;Clade II)__AIT17573__NP
augagcgccuccaaggaggugaaaucuuuccuguggacccagucacucagaagggaacuuaguggcuacugcagcaacaucaagcugcaagucguuaaagacgcucaggcauuguuacacgggcuggauuuuuccgaggugucuaauguacagcggcuaaugcgcaagcagaaacgagacgauucggaccucaagcgucugagagaucuuaaccaagccgugaauaaccuggucgaauugaagucaacacagcagaaaagcauucucagggugggaacucugacgagugacgaucugcucaccuuagcggcugaccuggagaaacuuaaguccaagguuauacggacagaacgccccuugucuagcgguguguauaugggcaaucuguccacucagcaacuagagcagagaagggcccuccugaacaugaucgggauggucggaggcgcacaggguacccagccugggcgggauggagugguacgcguuugggacgugaaaaauccagaucuucugaacaaucaauucggcacaaugccgucauugacccucgccugucugacuaagcagggccaggucgacuuaaacgaugcugugcuggcacucacagaccuugggcugauuuacaccgccaaguaucccaauaguagcgacuuggaucgacuaucucaaucccauccuauccugaacaugguggacacgaaaaagucaagccucaauauuaguggauacaacuuuucucugggugcugccgucaaagcgggcgcaugcaugcuugaugggggaaauaugcuggagacuaucaagguuaccccacagacaauggacggcauauugaaauccauccucaaggugaaaaagagccuggguauguucguaucggauacucccggggaaagaaacccuuaugagaacauuuuauacaagaucugucugucuggagacggcuggccauauauugccuccaggaccucaaucgugggccgggcuugggaaaauacaaccgucgaucuagagagugacgggaaaccccagaaggugggaacggccgguagcaacaaaucccuccagucugcaggcuuuccuacugggcugacauacagccaacuuaugaccuugaaggauucaaugaugcagcuggacccaagugcuaaaacuuggauagauauugagggacguccggaagaccccguugagaucgcccucuaccagccuauguccggcugcuauauucacuucuuucgcgaaccaacagaccugaagcaguucaagcaagaugcgaaauacagccaugguaucgacaucgccgaucuuuuucccgcacagccugggcugaccucugcugugauugaggccuugccaagaaauaugguccucacgugucagggcucagacgauauaaagaggcuguuagacagucagggacggcgagauaucaaacugauugacaucgcucuaagcaaggccgauucccgcagauucgaaaacgcagugugggaccaaugcaaagaucucugucacaugcauaccggcguaguuguggagaagaagaaaaggggagggaaggaggaaauaacaccccacugcgcccugauggacuguauuauguaugaugcugcggucucugguggccuuaauaucccgguguugcgggcaguccugccucgcgacaugguguuuagaacuucgagccccaaaguugugcucuga

SEQ ID NO: 8596 - RNA, 1710 nt, Artificial Sequence
  derived and/or modified CDS sequence (opt3) from LASV(ISTH2376-NIG-2012;Clade II)__AIT17577__NP
augagcgccuccaaggaggugaaaucuuuccuguggacccagucacucagaagggaacuuaguggcuacugcagcuccaucaagcugcaagucguuaaagacgcucaggcauuguuacacgggcuggauuuuucugaggugucgaacguacagcggcuaaugcgcaagcagaaacgagacgauucagaccucaagcgucugagagaucuuaaucaagccgugaacaaucuggucgaacuuaagagcacacagcagaaaaguauucucagggugggaacucugacguccgacgaucugcucaccuuagcggcugaccuggagaaguugaaaucuaagguuauacggacagaacgccccuugagcuccgguguguauaugggcaaccugucaacucagcaacuagagcagagaagggcccuccugaauaugaucgggauggucggaggcgcacaggguacccagccugggcgggauggagugguacgcguuugggacgugaaaaacccagaucuucugaauaaccaauucggcacaaugccgaguuugacccucgccugucugacuaagcagggccaggucgacuuaaaugaugcugugcuggcacucacagaccuugggcugauuuacaccgccaaguaucccaacagcucugacuuggaucgacuaucccaaucacauccuauccugaauaugguggacacgaaaaagagcagucucaacauuucuggauacaauuuuucccugggugcugccgucaaagcgggcgcaugcaugcuugaugggggaaacaugcuggagacuaucaagguuaccccacagacaauggacggcauauugaaaagcauccucaaggugaaaagaucgcuggguauguucguaucugauacucccggggaaaggaauccuuaugagaacauuuuauacaagaucugucuguccggagacggcuggccauauauugccucacggaccaguaucgcuggccgugccugggaaaacacaaccguggaucuagagagcgacgggaagccccagaaagucggagcagcugguuccaauaagucucuccagagcgccggcuuuccuacggggcugacuuacucacaacuuaugacauugaaagauaguaugaugcagcuggacccauccgcgaagaccuggauagauauugagggacgcccggaagaccccguggagaucgcccucuaccagccuaugagcggcugcuauauucacuucuuuagagaaccaacugaccugaaacaguucaagcaagaugcaaaguacucucaugguaucgacguugcugaucuuuuucccgcccagccugggcugacaucagcugugaucgaggccuugccaaggaacaugguccucaccugucagggcagugacgauauuaaacggcuguuagacagccagggacgacgcgauauaaagcugaucgacauugcacuauccaaagccgauucuagaagguucgaaaaugcugugugggaccaaugccgggaucucugucacaugcauacgggcguaguuguggagaagaaaaagcgcgggggaaaggaggaaaucacaccccacugcgcgcugauggacuguauaauguaugaugcagccgucucggguggccuuaacauuccgguguugagagcuguccugccuagggacaugguguuucguaccagcucccccaaaguugugcucuga

SEQ ID NO: 8597 - RNA, 1710 nt, Artificial Sequence
  derived and/or modified CDS sequence (opt3) from LASV(Lassa virus/H.sapiens-wt/NGA/2015/ISTH_0543;Clade II)__AVO03640__NP
augagcgccuccaaggaggugaaaucuuuccuguggacccagucacucagaagggaacuuaguggcuacugcagcaacaucaagcugcaagucguuaaagacgcucaggcauuguuacacgggcuggauuuuuccgaggugucuaauguacagcggcuaaugcgcaagcagaaacgagacgauucggaccucaagcgucugagagaucuuaaccaagccgugaauaaccuggucgaauugaagucaacacagcagaaaagcauucucagggugggaacucugacgagugacgaucugcucaccuuagcggcugaccuggagaaacuuaaguccaagguuauacggacagaacgccccuugucuagcgguguguauaugggcaaucuguccacucagcaacuagagcagagaagggcccuccugaacaugaucgggauggucggaggcgcacaggguacccagccugggcgggauggagugguacgcguuugggacgugaaaaauccagaucuucugaacaaucaauucggcacaaugccgucauugacccucgccugucugacuaagcagggccaggucgacuuaaacgaugcugugcuggcacucacagaccuugggcugauuuacaccgccaaguaucccaauaguagcgacuuggaucgacuaucucaaucccauccuauccugaacaugguggacacgaaaaagucaagccucaauauuaguggauacaacuuuucucugggugcugccgucaaagcgggcgcaugcaugcuugaugggggaaauaugcuggagacuaucaagguuaccccacagacaauggacggcauauugaaauccauccucaaggugaaaaagagccuggguauguucguaucggauacucccggggaaagaaacccuuaugagaacauuuuauacaagaucugucugucuggagacggcuggccauauauugccuccaggaccucaaucgugggccgggcuugggaaaauacaaccgucgaucuagagagugacgggaaaccccagaaggugggaagcgccgguuccaacaaaucucuccagagcgcaggcuuuccuacggggcugacuuacucacaacuuaugacauugaaggauaguaugaugcagcuggacccauccgcuaaaaccuggauagauauugagggacguccggaagaccccguugagaucgcccucuaccagccuaugagcggcugcuauauucacuucuuucgcgaaccaacugaccugaagcaguucaagcaagaugcgaaauacucucaugguaucgacguggccgaucuuuuucccgcacagccugggcugacaucagcugucaucgaggccuugccaagaaauauggugcucaccugucagggcagugacgauauuaagaggcuguuagacagccagggacggaaagauauaaagcugaucgacauugcucuauccaaagccgauucucgacgcuucgaaaacgcaguaugggaccaaugcaaggaucucugucacaugcauacgggcguuguggucgagaagaaaaagagagggggaaaagaggaaaucacaccccacugcgcccugauggacuguauaauguaugaugcugcggugucggguggccuuaauauuccggucuugagggcagugcugccucgggacaugguuuuucgcaccagcucccccaaggugguacucuga

SEQ ID NO: 8598 - RNA, 1710 nt, Artificial Sequence
  derived and/or modified CDS sequence (opt3) from LASV(Lassa virus/H.sapiens-wt/NGA/2015/ISTH_0547;Clade II)__AVO03584__NP
augagcgccuccaaggaggugaaaucuuuccuguggacccagucacucagaagggaacuuaguggcuacugcagcuccaucaagcugcaagucguuaaagacgcucaggcauuguuacacgggcuggauuuuucugaggugucgaacguacagcggcuaaugcgcaagcagaaacgagacgauucagaccucaagcgucugagagaucuuaaucaagccgugaacaaucuggucgaacuuaagagcacacagcagaaaaguauucucagggugggaacucugacguccgacgaucugcucaccuuagcggcugaccuggagaaguugaaaucuaagguuauacggacagaacgccccuugagcuccgguguguauaugggcaaccugucaacucagcaacuagagcagagaagggcccuccugaauaugaucgggauggucggaggcgcacaggguacccagccugggcgggauggagugguacgcguuugggacgugaaaaacccagaucuucugaauaaccaauucggcacaaugccgaguuugacccucgccugucugacuaagcagggccaggucgacuuaaaugaugcugugcuggcacucacagaccuugggcugauuuacaccgccaaguaucccaacagcucugacuuggaucgacuaucccaaucacauccuauccugaauaugguggacacgaaaaagagcagucucaacauuucuggauacaauuuuucccugggugcugccgucaaagcgggcgcaugcaugcuugaugggggaaacaugcuggagacuaucaagguuaccccacagacaauggacggcauauugaaaagcauccucaaggugaaaagaucgcuggguauguucguaucugauacucccggggaaaggaauccuuaugagaacauuuuauacaagaucugucuguccggagacggcuggccauauauugccucacggaccaguaucgugggccgugcuugggaaaacacaaccgucgaucuagagagcgacgggaagccccagaaagugggaguugccgguuccaauaagucucuccagagcgcaggcuuuccuacggggcugacuuacucacaacuuaugacauugaaagauaguaugaugcagcuggacccauccgcuaagaccuggauagauauugagggacgcccggaagaccccguggagaucgcccucuaccagccuaugagcggcugcuauauucacuucuuuagagaaccaacugaccugaaacaguucaagcaagaugcgaaguacucucaugguaucgacgucgccgaucuuuuucccgcacagccugggcugacaucagcugugaucgaggccuugccaaggaacaugguacucaccugucagggcagugacgauauuaaacggcuguuagacagccagggacgacgcgauauaaagcugaucgacauugcucuauccaaagccgauucuagaagguucgaaaaugcaguuugggaccaaugcaaggaucucugucacaugcauacgggcguggucguggagaaaaagaagcgcgggggaaaagaggaaaucacaccccacugcgcccugauggacuguauaauguaugaugcugcggucucggguggccuuaacauuccgguguugcgggcaguucugccuagagacaugguguuuaggaccagcucccccaagguaguccucuga

SEQ ID NO: 8599 - RNA, 1710 nt, Artificial Sequence
  derived and/or modified CDS sequence (opt3) from LASV(Lassa virus/H.sapiens-wt/NGA/2015/ISTH_0574;Clade II)__AVO03658__NP
augagcgccuccaaggaggugaaaucuuuccuguggacccagucacucagaagggaacuuaguggcuacugcagcaacaucaagcugcaagucguuaaagacgcucaggcauuguuacacgggcuggauuuuuccgaggugucuaauguacagcggcuaaugcgcaagcagaaacgagacgauucggaccucaagcgucugagagaucuuaaccaagccgugaauaaccuggucgaauugaagucaacacagcagaaaagcauucucagggugggaacucugacgagugacgaucugcucaccuuagcggcugaccuggagaaacuuaaguccaagguuauacggacagaacgccccuugucuagcgguguguauaugggcaaucuguccacucagcaacuagagcagagaagggcccuccugaacaugaucgggauggucggaggcacccaggguacacagccugggcgggauggagugguacgcguuugggacgugaaaaauccagaucuucugaacaaucaauucggcaccaugccgucauugacucucgcaugucugacaaagcagggccaggucgacuuaaacgaugccgugcuggcucucaccgaccuugggcugauuuacacggcaaaguaucccaauaguagcgacuuggaucgacuaucucaaucccauccuauccugaacaugguggacacuaaaaagucaagccucaauauuaguggauacaacuuuucucugggugccgcugucaaagccggcgcgugcaugcuugaugggggaaauaugcuggagaccaucaagguuacaccacagacuauggacggcauauugaaauccauccucaaggugaaaaagagccuggguauguucguaucggauacccccggggaaagaaacccuuaugagaacauuuuauacaagaucugucugucuggagacggcuggccauauauugcauccaggacaucaaucgugggccgggccugggaaaauaccacggucgaucuagagagugaggggaaaccccagaaggugggaacugcugguagcaacaaaucccuccagucugccggcuuuccuacagggcugaccuacagccaacuuaugacuuugaaggacucaaugaugcagcuggauccaagugcaaaaacauggauagacauugaaggacguccggaggaucccguugaaaucgcucucuaccagccuauguccggcugcuauauucacuucuuucgcgagccaaccgaccugaagcaguucaagcaagacgccaaauacagccaugguaucgauguggcggaccuuuuucccgcccagccugggcugacgucugcagucaucgaggcuuugccaagaaauauggugcucaccugucagggcucagaugacauuaagaggcuguuagauagucagggacggcgagacauaaaacugaucgauauuagccuauccaaggccgacucucgcagauucgaaaacgcuguaugggaucaaugcaaagaccucugucacaugcauacaggcguuguggucgagaagaagaaaaggggagggaaggaagagaucacuccccacugcgcccugauggauuguauaauguaugacgcagccgugucggguggccuuaauauuccggucuugcgggcugugcugccucgcgauaugguuuuuagaaccagcucccccaaagugguacucuga

SEQ ID NO: 8600 - RNA, 1710 nt, Artificial Sequence
  derived and/or modified CDS sequence (opt3) from LASV(Lassa virus/H.sapiens-wt/NGA/2015/ISTH_0682;Clade II)__AVO03626__NP
augagcgccuccaaggaggugaaaucuuuccuguggacccagucacucagaagggaacuuaguggcuacugcagcuccaucaagcugcaagucguuaaagacgcucaggcauuguuacacgggcuggauuuuucugaggugucgaacguacagcggcuaaugcgcaagcagaaacgagacgauucagaccucaagcgucugagagaucuuaaucaagccgugaacaaucuggucgaacucaagagcacacagcagaaaaguguguugaggguuggaacucugacguccgacgaucugcucaccuuagcggcugaccuggagaaacuuaaaucuaaggugauucggacagaacgccccuugagcuccggugucuauaugggcaaccugucaacucagcaacuagagcagagaagggcccuccugaguaugauagggauggugggaggcacccaggguacacagccugggcgggauggaguaguucgcgugugggacgucaaaaauccagaucuucugaacaaucaauucggcaccaugccgagcuugacucucgcaugucugacaaagcagggccagguggacuuaaacgaugccgugcuggcucucaccgaccuugggcugaucuacacggcaaaguaucccaauucuuccgacuuggaucgacuaucacaaagccauccuauucugaacauggucgacacuaaaaagaguucucucaauaucuccggauacaacuuuagccugggugccgcuguuaaagccggcgcgugcaugcuugaugggggaaauaugcuggagaccauuaaggugacaccacagacuauggacggcaucuugaaaucgauacucaagguaaagaagucucuggguauguucguguccgauacccccggggaaagaaacccuuaugagaauaucuuauacaagauuugucugucaggagacggcuggccauauaucgcaaguaggacaagcauugucggccgggccugggaaaacaccacgguggaucuagaguccaacgggaaaccccagaagguuggaacugcugguucuaauaaaagccuccagucagccggcuuuccuacagggcugaccuacagucaacuuaugacuuugaaggacuccaugaugcagcuggauccaagcgcaaaaacauggaucgacauagagggacguccggaagaucccguggagauugcucucuaccagccuaugucuggcugcuauauccacuucuuucgcgaaccaaccgaccugaagcaguucaagcaagacgccaaauacucacaugguauugaugucgcggaccuuuuucccgcccagccugggcugacgagugcagugaucgaggcuuugccaagaaacaugguacucaccugucagggcagcgaugacaucaagaggcuguuagauucccagggacggcgagacauuaaacugauagauaucucucuaucgaaggccgacagccgcaaauucgaaaaugcuguuugggaucaaugcaaggaccucugucacaugcauacaggcguggucguggagaagaaaaagagagggggaaaagaggaaauuacuccccacugcgcccugauggauuguaucauguaugacgcagccgucuccgguggccuuaacauaccgguguugagggcuguucugccucgggauaugguguuucgcaccucaagucccaagguaguccucuga

SEQ ID NO: 8601 - RNA, 1710 nt, Artificial Sequence
  derived and/or modified CDS sequence (opt3) from LASV(Lassa virus/H.sapiens-wt/NGA/2015/ISTH_0687;Clade II)__AVO03582__NP
augagcgccuccaaggaggugaaaucuuuccuguggacccagucacucagaagggaacuuaguggcuacugcagcuccaucaagcugcaagucguuaaagacgcucaggcauuguuacacgggcuggauuuuucugaggugucgaacguacagcggcuaaugcgcaagcagaaacgagacgauucagaccucaagcgucugagagaucuuaaucaagccgugaacaaucuggucgaacuuaagagcacacagcagaaaaguauucucagggugggaacucugacguccgacgaucugcucaccuuagcggcugaccuggagaaguugaaaucuaagguuauacggacagaacgccccuugagcuccgguguguauaugggcaaccugucaacucagcaacuagagcagagaagggcccuccugaauaugaucgggauggucggaggcgcacagaguacccagccuggucgggauggggugguacgcguuugggacgugaaaaacccagaucuucugaauaaccaauucggaacaaugccgagcuugacccucgccugucugacuaagcagggccaggucgacuuaaaugaugcugugcuggcacucacagaccuuggccugauuuacaccgccaaguaucccaacucuuccgacuuggaucgacuaucacaaagccauccuauccugaauaugguggacacgaaaaagaguucucucaacauuuccggguacaauuuuagccugggagcugccgucaaagcgggugcaugcaugcuugauggcgggaacaugcuggagacuaucaagguuaccccacagacaauggacggaauauugaaaucgauccucaaggugaaaagaucucugggcauguucguauccgauacucccggugaaaggaauccuuaugagaacauuuuauacaagaucugucugucaggggacggauggccauauauugccagucggaccagcaucgugggccgugcuugggaaaacacaaccgucgaucuagaguccgacggcaagccccagaaagugggggccacgggaucuaauaagagccuccagucagcagguuuuccuacuggccugacauacagucaacuuaugaccuugaaagauuccaugaugcagcuggacccaagcgcuaagacuuggauagauauugaggggcgcccggaagaccccguugagaucgcccucuaccagccuauuucuggaugcuauauccacuucuuuagagaaccaacagaccugaaacaguucaagcaagaugcgaaguacucacauggcaucgacguggccgaucuuuuucccgcacagccuggucugaccagugcugucauugaggccuugccaaggaacauggugcucacgugucaggggagcgacgauauaaaacggcuguuagacucccagggccgacgcgauaucaagcugauugacaucgcucuaucuaaagccgauucgagaagguucgaaaaugcaguaugggaccaaugcaaggaucucugucacaugcauaccggaguuguggucgagaaaaagaagcggggcgggaaagaggaaauaacaccccacugcgcccugauggacuguauuauguaugaugcugcggugagcggaggucuuaacaucccggucuugcgcgcagugcugccuagagacaugguuuuuaggacuuccucacccaaggugguacucuga

SEQ ID NO: 8602 - RNA, 1710 nt, Artificial Sequence
  derived and/or modified CDS sequence (opt3) from LASV(Lassa virus/H.sapiens-wt/NGA/2015/ISTH_0736;Clade II)__AVO03574__NP
augagcgccuccaaggaggugaaaucuuuccuguggacccagucacucagaagggaacuuaguggcuacugcagcaacaucaagcugcaagucguuaaagacgcucaggcauuguuacacgggcuggauuuuuccgaggugucuaauguacagcggcuaaugcgcaagcagaaacgagacgauucggaccucaagcgucugagagaucuuaaccaagccgugaauaaccuggucgaauugaagucaacacagcagaaaagcgugcucaggguuggaacucugacgagugacgaucugcucaccuuagcggcugaccuggagaaacuuaaguccaaggugauucggacagaacgccccuugucuagcggugucuauaugggcaaucuguccacucagcaacuagagcauagaagggcccuccugaacaugauagggauggugggaggcgcacaggguacccagccugggcgggauggaguaguucgcgugugggacgucaaaaauccagaucuucugaacaaucaguucggcacaaugccgucauugacccucgccugucugacuaagcaaggccagguggacuuaaacgaugcugugcuggcacucacagaccuugggcugaucuacaccgccaaguaucccaauaguagcgacuuggaucgacuaucucagucccacccuauucugaacauggucgacacgaaaaagucaagccucaauaucaguggauacaacuuuucucugggugcugccguuaaagcgggcgcaugcaugcuugaugggggaaauaugcuggagacuauuaaggugaccccacaaacaauggacggcaucuugaaauccauacucaagguaaaaagaagccuggguauguucgugucggauacucccggggaaaggaacccuuaugagaacaucuuauacaagauuugucugucuggagacggcuggccauauaucgccucccggaccucaauugucggccgugcuugggaaaauacaaccguggaucuagagagugacgggaagccccagaaaguuggaacggccgguagcaacaagucccuccagucugcaggcuuuccuacugggcugacauacagccagcuuaugaccuugaaagauucaaugaugcaacuggacccaagugcuaagacuuggaucgauauagagggacgcccggaagaccccguggagauugcccucuaccagccuaucuccggcugcuauauucauuucuuuagagaaccaacagaccugaaacaguucaagcaggaugcgaaguacagccacgguaucgacgucgccgaucuuuuucccgcacaaccugggcugaccucugcugugaucgaggccuugccaaggaauaugguacucacgugucagggcucagacgauauuaaacggcuguuagacagucagggacgacgcgauauaaagcugaucgacauugcucuaagcaaagccgauuccagaagguucgaaaacgcaguuugggaccagugcaaggaucucugucauaugcacaccggcguggucguggagaaaaagaagcgcgggggaaaagaggaaaucacaccccacugcgcccugauggacuguauaauguaugaugcugcggucucugguggccuuaauauuccgguguugcgggcaguucugccuagagacaugguguuuaggacuucgagccccaagguaguccucuga

SEQ ID NO: 8603 - RNA, 1710 nt, Artificial Sequence
  derived and/or modified CDS sequence (opt3) from LASV(Lassa virus/H.sapiens-wt/NGA/2015/ISTH_0789;Clade II)__AVO03552__NP
augagcgccuccaaggaggugaaaucuuuccuguggacccagucacucagaagggaacuuaguggcuacugcagcaacaucaagcugcaagucguuaaagacgcucaggcauuguuacacgggcuggauuuuuccgaggugucuaauguacagcggcuaaugcgcaagcagaaacgagacgauggagaccucaagcgucugagagaucuuaaccaagccgugaauaaccuggucgaauugaagucgacacagcagaaaucagugcucaggguugguacucugagcagugacgaucugcucauuuuagcggcugaccuggagaaacuuaaguccaaggugauacggacggaacgccccuugucuagcggcgucuauauggggaaucuguccucacagcaacuagaucagagaagggcccuccugaacaugaucggaaugaccggcggugggcagggagcaaaugccggccgggacggcauugugcgcguaugggauguuaaaaacgcugagcuucugaauaaccaguucgggacaaugccuaguuugacucucgcaugucugaccaagcaaggacagguggacuuaaaugaugccguccaggcucugacagaccucggucuuaucuacaccgccaaguauccaaacagcucugaccuggaucgauugucccaaucacauccgauucuaaauaugaucgacacuaaaaagagcagucugaacauaucuggcuacaauuuuucccucggggcggcagugaaagccggagcuugcaugcuggauggcgguaacaugcuugagacaaucaaggugagcccccagaccauggacgggauucugaaaucgaucuugaaggucaaaagaucucucggaauguucguuuccgaugccccuggcgaaaggaacccauaugagaauauucuguacaagaucuguuuaucaggcgacggguggcccuauauagcaagucggacgagcauuaucggacgugcuugggaaaacacugugguagaucuggaguccgacaauaagccucagaaacuagguaacucuggcagcaaucgcucacuccagagugccggguacccagcgggacugaccuacucccaacuuaugacauugaaggauagcaugcugcagcucgaccccaacgccaaaacuuggauggauguggagggcagaccugacgacccagucgaaauugcacuguaucagccgucuucagguugcuacauccacuuuuucagggagcccaccgaucuuaagcaguuuaaacaagacgcuaaguauagucaugggaucgaugugggcgaccuguucgccgcucagccuggauugacaagcgccguuauugaagcacucccacggaauauggugauaaccugucagggcuccgaggauaucaagaaacuguuagaaucucaggggcgaaaggacauuaaacuggucgauaucucgaugagcaagcuagacucccgcaaauuugagaacgccgugugggaucaauacaaggaccucugccacaugcauacgggaauaguaguugagaagaaaaagagagguggcaaagaagagauuacuccccacugugcucugauggauugcaucauguucgacgcggcaguggucgggggacuugaugccaagaucuugagggcugugcugccucgggacauggucuuucgcacaucaaccccaaaagugguucucuga

SEQ ID NO: 8604 - RNA, 1710 nt, Artificial Sequence
  derived and/or modified CDS sequence (opt3) from LASV(Lassa virus/H.sapiens-wt/NGA/2015/ISTH_0821;Clade II)__AVO03642__NP
augagcgccuccaaggaggugaaaucuuuccuguggacccagucacucagaagggaacuuaguggcuacugcagcaacaucaagcugcaagucguuaaagacgcucaggcauuguuacacgggcuggauuuuuccgaggugucuaauguacagcggcuaaugcgcaagcagaaacgagacgauucggaccucaagcgucugagagaucuuaaccaagccgugaauaaccuggucgaauugaagucaacacagcagaaaagcauucucagggugggaacucugacgagugacgaucugcucaccuuagcggcugaccuggagaaacuuaaauccaagguuauacggacagaacgccccuugucuagcgguguguauaugggcaaucuguccacucagcaacuagagcagagaagggcccuccugaacaugaucgggauggucggaggcgcacaggguacccagccugggcgggauggagugguacgcguuugggacgugaaaaauccagaucuucugaacaaucaauucggcacaaugccgucauugacccucgccugucugacuaagcagggccaggucgacuuaaacgaugcugugcuggcacucacagaccuugggcugauuuacaccgccaaguaucccaauaguagcgacuuggaucgacuaucucaaucccauccuauccugaacaugguggacacgaaaaagucaagccucaauauuaguggauacaacuuuucucugggugcugccgucaaagcgggcgcaugcaugcuugaugggggaaauaugcuggagacuaucaagguuaccccacagacaauggacggcauauugaaauccauccucaaggugaaaagaagccuggguauguucguaucggauacucccggggaaaggaacccuuaugagaacauuuuauacaagaucugucugucuggagacggcuggccauauauugccucccggaccucaaucgugggccgugcuugggaaaauacaaccgucgaucuagagagugacgggaagccccagaaagugggaauagccgguagcaacaagucccuccagucugcaggcuuuccuacggggcugacuuacagccaacuuaugacauugaaagauucaaugaugcagcuggacccaagugcuaagaccuggauugauaucgagggacgcccggaagaccccguugagauugcccucuaccagccuauguccggcugcuauauccacuucuuuagagaaccaacugaccugaaacaguucaagcaagaugcgaaguacagccaugguaucgacguggccgaucuuuuucccgcacagccugggcugacaucugcugucauugaggccuugccaaggaauauggugcucaccugucagggcucagacgauauaaagaagcuguuagacagucagggacggaaagauaucaagcugauugacaucgcucuaagcaaaguagauucccgacgcuucgaaaacgccguuugggaccaaugcaaggaucucugucacaugcauacgggcguggucguggagaagaaaaagagagggggaaaagaggaaauaacaccccacugcgcacugauggacuguauuauguaugaugccgcugucucugguggccuuaauaucccgguguugagggcgguucugccucgggacaugguguuucgcaccucgagccccaagguaguccucuga

SEQ ID NO: 8605 - RNA, 1710 nt, Artificial Sequence
  derived and/or modified CDS sequence (opt3) from LASV(Lassa virus/H.sapiens-wt/NGA/2015/ISTH_0831;Clade II)__AVO03546__NP
augagcgccuccaaggaggugaaaucuuuccuguggacccagucacucagaagggaacuugcuggcuacugcaguaacaucaagcugcaagucguuaaagacgcacaggccuuguuacacgggcuggauuuuagcgagguguccaauguacagcggcuaaugcgcaagcagaaacgagacgauucugaccucaagcgucugagagaucuuaaccaagcggugaauaaccuggucgaauugaagucgacacagcagaaaucaauucucagggugggaacucugagcagugacgaucugcucacguuagcugccgaccuggagaaguugaaauccaagguuauacggaccgaacgccccuugucuagcgguguguauaugggcaaucuguccacacagcaacuagaucagagaagggcacuccugaacaugaucgggauggucggaggcucacaggguacuucugccgggcgggacggaauugugcgcguaugggauguucgaaauccugagcuucugaacaaucaguucggcaccaugccaagccuuacacucgcuugucugaccaaacaaggccagguggacuuaaacgaugcaguccaggcccugacugaccucgggcuuaucuacacagcuaaguauccgaauaguuccgaccuggauagauugucacaaagccaucccauucuaaacaugaucgacaccaagaaaaguucuauaaauaucuccggauacaacuuuagccugggugccgcggugaaggcaggcgccugcaugcucgaugggggaaauaugcuggagacgauuaaagugucgccucagucuauggacggcauccuuaaguccauucugaaagucaagaggucauuggguauguucguuagugauacuccaggggaacggaaccccuaugagaacauccucuacaaaauaugucugagcggagacggcuggccuuauauugcuucccguaccucuaucacaggccgcgccugggaaaauacugugguagauuuagagagcgacaacaagccaaagaaacccgggaauaacgagucaaauagaagucugcaguccgcaggauuuccugcuggucuaaccuacagccagcucaugacacugaaggauucuaugcuucaauuggacccaaacgccaaaaccuggauggauauugaaggcaggccggacgaccccguggagaucgcgcuguaccagccuaauucagggugcuauauccacuucuuucgggaaccaacggaucucaagcaguucaaacaggacgccaaguacagucauggaauugauauaagcgaccuguuugcagcucaacccggccuuacuuccgccgucaucgaggcucugccucgaaacauggugauuacaugucaggguucugaagauaucaagaaauugcucgagucgcaggggcgcaaggacauaagacugguugauauuagcuuauccaaagccgacucaaggaaguucgagaaugcagugugggaucaguauaaagaccugugccacaugcauaccggcaucgucguggaaaagaagaaaaagggaggcaaagaggaaaucacuccacacugugcccuaauggauugcauuauguuugacgcugcgguaaugaacgggcucgaugcacggguucugcgcgccgugcuucccagagacauggucuucaggacaaguaccccgcguguggucuuguga

SEQ ID NO: 8606 - RNA, 1710 nt, Artificial Sequence
  derived and/or modified CDS sequence (opt3) from LASV(Lassa virus/H.sapiens-wt/NGA/2016/ISTH_0009;Clade II)__AVO03572__NP
augagcgccuccaaggaggugaaaucuuuccuguggacccagucacucagaagggaacuuaguggcuacugcagcaacaucaagcugcaagucguuaaagacgcucaggcauuguuacacgggcuggauuuuuccgaggugucuaauguacagcggcuaaugcgcaagcagaaacgagacgauucggaccucaagcgucugagagaucuuaaccaagccgugaauaaccuggucgaauugaagucaacacagcagaaaagcauucucagggugggaacucugacgagugacgaucugcucaccuuagcggcugaccuggagaaacuuaaguccaagguuauacggacagaacgccccuugucuagcgguguguauaugggcaaucuguccacucagcaacuagagcagagaagggcccuccugaacaugaucgggauggucggaggcgcacaggguacccagccugggcgggauggagugguacgcguuugggacgugaaaaauccagaucuucugaacaaucaauucggcacaaugccgucauugacccucgccugucugacuaagcagggccaggucgacuuaaacgaugcugugcuggcacucacagaccuugggcugauuuacaccgccaaguaucccaauaguagcgacuuggaucgacuaucucaaucccauccuauccugaacaugguggacacgaaaaagucaagccucaauauuaguggauacaacuuuucucugggugcugccgucaaagcgggcgcaugcaugcuugaugggggaaauaugcuggagacuaucaagguuaccccacagacaauggacggcauauugaaauccauccucaaggugaaaaagagccuggguauguucguaucggauacucccggggaaagaaacccuuaugagaacauuuuauacaagaucugucugucuggagacggcuggccauauauugccuccaggaccucaaucgugggccgggcuugggaaaauacaaccgucgaucuagagagugacgggaaaccccagaaggugggaagcgccgguuccaacaaaucucuccagagcgcaggcuuuccuacggggcugacuuacucacaacuuaugacauugaaggauaguaugaugcagcuggacccauccgcuaaaaccuggauagauauugagggacguccggaagaccccguugagaucgcccucuaccagccuaugagcggcugcuauauucacuucuuucgcgaaccaacugaccugaagcaguucaagcaagaugcgaaauacucucaugguaucgacguggccgaucuuuuucccgcacagccugggcugacaucagcugucaucgaggccuugccaagaaauauggugcucaccugucagggcagugacgauauuaagaggcuguuagacagccagggacggcgagauauaaaacugaucgacauugcucuauccaaggccgauucucgcagauucgaaaacgcaguaugggaccaaugcaaagaucucugucacaugcauacgggcguuguggucgagaagaagaaaaggggagggaaggaggaaaucacaccccacugcgcccugauggacuguauaauguaugaugcugcggugucggguggccuuaauauuccggucuugcgggcagugcugccucgcgacaugguuuuuagaaccagcucccccaaagugguacucuga

SEQ ID NO: 8607 - RNA, 1710 nt, Artificial Sequence
  derived and/or modified CDS sequence (opt3) from LASV(Lassa virus/H.sapiens-wt/NGA/2016/ISTH_0017;Clade II)__AVO03568__NP
augagcgccuccaaggaggugaaaucuuuccuguggacccagucacucagaagggaacuuaguggcuacugcagcuccaucaagcugcaagucguuaaagacgcucaggcauuguuacacgggcuggauuuuucugaggugucgaacguacagcggcuaaugcgcaagcagaaacgagacgauucagaccucaagcgucugagagaucuuaaucaagccgugaacaaucuggucgaacuuaagagcacacagcagaaaaguauucucagggugggaacucugacguccgacgaucugcucaccuuagcggcugaccuggagaaguugaaaucuaagguuauacggacagaacgccccuugagcuccgguguguauaugggcaaccugucaacucagcaacuagagcagagaagggcccuccugaauaugaucgggauggcaggaggcgcccaggguacccagccugggcgggauggagucgugcgcguaugggacguuaaaaacccagaucuucugaauaaccaauucggcacaaugccgaguuugacccucgcuugucugacuaagcagggccagguggacuuaaaugaugcaguccuggcccucacagaccuugggcugauuuacaccgcuaaguaucccaacagcucugacuuggaucgacuaucccaaucacauccuauccugaauaugguggacacgaaaaagagcagucucaacauuucuggauacaauuuuucccugggugccgcggugaaagcaggcgccugcaugcuugaugggggaaacaugcuggagacuaucaaggucaccccacagacaauggacggcauauugaaaagcauccucaagguuaaaagaucgcuggguauguucgugucugaugcucccggggaaaggaauccuuaugagaacauuuuauacaagaucugucuguccggagacggcuggccauauauugccucacggaccaguaucguaggccgugcaugggaaaacaccacaguggaucuagagagcgacgggaagccccagaaagucggagcuaccgguuccaauaagucucuccagagcgccggcuuuccuacggggcugacuuacucacaacuuaugacauugaaagauaguaugaugcagcuggacccauccgcgaagaccuggauagauauugagggacgcccggaagaccccguggagguugcccucuaccagccugugagcggcugcuauauccacuucuuuagagaaccaacugaccugaaacaguucaagcaagaugcaaaguacucucaugguauugacgucgcugaucuuuuucccgcccagccugggcugacaucagcugugaucgaggccuugccaaggaacaugguacucaccugucagggcagugacgauaucaaaaagcuguuagacagccagggacggaaagauauuaagcugauagacaucgcacuauccaaagccgauucucgacgcuucgaaaaugcuguuugggaccaaugcaaggaucucugucacaugcauacgggcguggucguggagaagaaaaagagagggggaaaagaggaaauuacuccccacugcgcgcugauggacuguaucauguaugaugcagccgucucggguggccuuaacauaccgguguugagggcuguucugccucgggacaugguguuucgcacaagcucccccaagguaguccucuga

SEQ ID NO: 8608 - RNA, 1710 nt, Artificial Sequence
  derived and/or modified CDS sequence (opt3) from LASV(Lassa virus/H.sapiens-wt/NGA/2016/ISTH_0035;Clade II)__AVO03620__NP
augagcgccuccaaggaggugaaaucuuuccuguggacccagucacucagaagggaacuuaguggcuacugcagcuccaucaagcugcaagucguuaaagacgcucaggcauuguuacacgggcuggauuuuucugaggugucgaacguacagcggcuaaugcgcaagcagaaacgagacgauucagaccucaagcgucugagagaucuuaaucaagccgugaacaaucuggucgaacuuaagagcacacagcagaaaaguauucucagggugggaacucugacguccgacgaucugcucaccuuagcggcugaccuggagaaguugaaaucuaagguuauacggacagaacgccccuugagcuccgguguguauaugggcaaccugucaagucagcaacuagagcagagaagggcccuccugaauaugaucgggauggucggaggcgcacaggguacucagccugggcgggauggagugguacgcguuugggacgugaaaaacccagaucuucugaauaaccaauucggcaccaugccgagcuugacacucgccugucugaccaagcagggccaggucgacuuaaaugaugcugugcuggcacucacugaccuugggcugauuuacacagccaaguaucccaacucuuccgacuuggaucgacuaucacaaagccauccuauccugaauaugguggacaccaaaaagaguucucucaacauuuccggauacaauuuuagccugggugcugccgucaaagcgggcgcaugcaugcuugaugggggaaacaugcuggagacgaucaagguuacuccacagaccauggacggcauauugaaaucgauccucaaggugaaaagaucucuggguauguucguauccgauacacccggggaaaggaauccuuaugagaacauuuuauacaagaucugucugucaggagacggcuggccauauauugccagucggacuagcaucgugggccgugcuugggaaaacaccacagucgaucuagaguccgacgggaagccccagaaagugggaucugccgguagcaauaagucacuccagagugcaggcuuuccuaccgggcugacguacucccaacuuaugacuuugaaagauagcaugaugcagcuggacccaucugcuaagacauggauagauauugagggacgcccggaagaccccguugagaucgcccucuaccagccuauuucaggcugcuauauccacuucuuuagagaaccaaccgaccugaaacaguucaagcaagaugcgaaguacagucaugguaucgacguggccgaucuuuuucccgcacagccugggcugacuagcgcugucauugaggccuugccaaggaacauggugcucacaugucagggcuccgacgauauaaaacggcuguuagacucucagggacgacgcgauaucaagcugauugacaucgcucuaucgaaagccgauagcagaagguucgaaaaugcaguaugggaccaaugcaaggaucucugucacaugcauaccggcguuguggucgagaaaaagaagcgcgggggaaaagaggaaauaacgccccacugcgcccugauggacuguauuauguaugaugcugcgguguccgguggccuuaacaucccggucuugcgggcagugcugccuagagacaugguuuuuaggaccucaagucccaaggugguacucuga

SEQ ID NO: 8609 - RNA, 1710 nt, Artificial Sequence
  derived and/or modified CDS sequence (opt3) from LASV(Lassa virus/H.sapiens-wt/NGA/2016/ISTH_0104;Clade II)__AVO03632__NP
augagcgccuccaaggaggugaaaucuuuccuguggacccagucacucagaagggaacuuaguggcuacugcagcaacaucaagcugcaagucguuaaagacgcucaggcauuguuacacgggcuggauuuuuccgaggugucuaauguacagcggcuaaugcgcaagcagaaacgagacgauucggaccucaagcgucugagagaucuuaaccaagccgugaauaaccuggucgaauugaagucaacacagcagaaaagcauucucagggugggaacucugacgagugacgaucugcucaccuuagcggcugaccuggagaaacuuaaguccaagguuauacggacagaacgccccuugucuagcgguguguauaugggcaaucuguccacucagcaacuagagcagagaagggcccuccugaacaugaucgggauggucggaggcacccagucaacacagccuggucgggauggggugguacgcguuugggacgugaaaaauccagaucuucugaacaaucaauucggaaccaugccgaguuugacucucgcaugucugacaaagcagggccaggucgacuuaaacgaugccgugcuggcucucaccgaccuuggccugauuuacacggcaaaguaucccaauagcucugacuuggaucgacuaucccaaucacauccuauccugaacaugguggacacuaaaaagagcagucucaauauuucuggguacaacuuuucccugggagccgcugucaaagccggugcgugcaugcuugauggcgggaauaugcuggagaccaucaagguuacaccacagacuauggacggaauauugaaaagcauccucaaggugaaaagaucgcugggcauguucguaucugauacccccggugaaaggaacccuuaugagaacauuuuauacaagaucugucuguccggggacggauggccauauauugcaucacggacaaguaucgugggccgugccugggaaaauaccacggucgaucuagagagcgacggcaagccccagaaaguggggacuacaggauccaacaagucucuccagagcgcugguuuuccuaccggccugacuuacucacaacuuaugacauugaaagauaguaugaugcagcuggacccauccgccaagaccuggauagauauugaggggcgcccggaagaccccguugagaucgcacucuaccagccuaugagcggaugcuauauucacuucuuuagagaaccaacggaccugaaacaguucaagcaagaugcuaaguacucucauggcaucgacguggccgaucuuuuucccgcgcagccuggucugaccucagccgucaucgaggcauugccaaggaauauggugcucacaugucaggggagugacgauauuaaaaagcuguuagacagccagggccggcgagauauaaaacugaucgacauuucccuaucuaaggcugauucgcgcaaauucgaaaacgccguaugggaccaaugcaaggaucucugucacaugcauacuggaguuguggucgagaagaaaaagagaggcgggaaagaggaaaucacaccccacugcgcucugauggacuguauaauguuugaugccgcagugagcggaggucuuaauauuccggucuugagggccgugcugccucgggacaugguuuuccgcaccuccucacccaaggugguacucuga

SEQ ID NO: 8610 - RNA, 1710 nt, Artificial Sequence
  derived and/or modified CDS sequence (opt3) from LASV(Lassa virus/H.sapiens-wt/NGA/2016/ISTH_0133;Clade II)__AVO03636__NP
augagcgccuccaaggaggugaaaucuuuccuguggacccagucacucagaagggaacuuaguggcuacugcagcaacaucaagcugcaagucguuaaagacgcucaggcauuguuacacgggcuggauuuuuccgaggugucuaauguacagcggcuaaugcgcaagcagaaacgagacgauucggaccucaagcgucugagagaucuuaaccaagccgugaauaaccuggucgaauugaagucaacacagcagaaaagcauucucagggugggaacucugacgagugacgaucugcucaccuuagcggcugaccuggagaaacuuaaauccaagguuauacggacagaacgccccuugucuagcgguguguauaugggcaaucuguccgcccagcaacuagagcagagaagggcacuccugaacaugaucgggauggucggaggcacucaggguacccagccugggcgggauggagugguacgcguuugggacgugaaaaauccagaucuucugaacaaucaauucggcacaaugccgucauugacccucgccugucugacuaagcagggccaggucgacuuaaacgaugcugugcuggcacucacagaccuugggcugauuuacaccgccaaguaucccaaugcuagugacuuggaucgacuaagccaaucucauccuauccugaacaugguggacacgaaaaaguccucacucaauauuagcggauacaacuuuagucugggugccgcggucaaagcaggcgccugcaugcuugaugggggaaauaugcuggagacuaucaagguuaccccacagacaauggacggcauauugaaaucugugcucaagguaaagaagucccuggguauguucgugagcgauacucccggggaaagaaacccuuaugagaacaucuuauacaagauuugucugucgggagacggcuggccauauaucgcuucuaggaccuccauugucggccgggccugggaaaauacaaccguggaucuagagucagacgggaaaccccagaagaucggaccugcagguaguaacaaaagccuccaguccgcuggcuuuccagccgggcugacguacucucaacuuaugacuuugaaggauagcaugaugcagcuggacccgucagcgaaaacauggauagauauugagggacgucccgaagacccuguugagaucgcccucuaccagccaaugaguggcugcuauauucacuucuuucgcgaacccaccgaccugaagcaguucaagcaagaugcaaaauacucccaugguaucgacgugacugaucuuuuuagcgcucagccugggcugacaucugccgucaucgaggcuuugccaagaaauauggugcucaccugucagggcucagacgauauuaagaggcuguuagacagucagggacggcgagauauaaaacugaucgacauuagccuauccaagguagauucucgcagauucgaaaacgccguuugggaccaaugcaaagaucucugucacaugcauacgggcguggucguggagaagaagaaaaggggagggaaggaggaaaucacaccccacugcgcacugauggacuguauaauguaugaugccgcugucucggguggccuuaauauuccgguguugcgggcgguucugccucgcgacaugguguuuagaaccagcucccccaaaguaguccucuga

SEQ ID NO: 8611 - RNA, 1710 nt, Artificial Sequence
  derived and/or modified CDS sequence (opt3) from LASV(Lassa virus/H.sapiens-wt/NGA/2016/ISTH_0146;Clade II)__AVO03634__NP
augagcgccuccaaggaggugaaaucuuuccuguggacccagucacucagaagggaacuuaguggcuacugcagcaacaucaagcugcaagucguuaaagacgcucaggcauuguuacacgggcuggauuuuuccgaggugucuaauguacagcggcuaaugcgcaagcagaaacgagacgauucggaccucaagcgucugagagaucuuaaccaagccgugaauaaccuggucgaauugaagucaacacagcagaaaagcauucucagggugggaacucugacgagugacgaucugcucaccuuagcggcugaccuggagaaacuuaaguccaagguuauacggacagaacgccccuugucuagcgguguguauaugggcaaucuguccgcccagcaacuagagcagagaagggcacuccugaacaugaucgggauggccggaggcgcucagucaacucagccuggucgggauggggucgugcgcguaugggacguuaaaaauccagaucuucugaacaaucaauucggaaccaugccgaguuugacacucgcaugucugaccaagcagggccagguggacuuaaacgaugccguccuggcucucacugaccuuggccugauuuacacagccaaguaucccaauagcucugacuuggaucgacuaucccaaucacauccuauccugaacaugguggacaccaaaaagagcagucucaauauuucuggguacaacuuuucccugggagcggcagugaaagccggugcuugcaugcuugauggcgggaauaugcuggagacgaucaagauaacuccacagaccauggacggaaucuugaaaagcauucucaaggucaaaagaucgcugggcauguucguuucugauacacccggugaaaggaacccuuaugagaacaucuuauacaagauuugucuguccggggacggauggccauauaucgccucacggaccaguauagugggccgugcaugggaaaauaccacaguagaucuagagagcgacggcaagccccagaaaguggggaccauuggauccaacaagucucuccagagcgcugguuuuccuacgggccugacuuacucacaacuuaugacauugaaagauaguaugaugcagcuggacccauccgccaagaccuggaucgauauugaggggcgcccggaagaccccgucgagaucgcgcucuaccagccuaugagcggaugcuauauccacuucuuuagagaaccaacugaccugaaacaguucaagcaagaugccaaguacucucauggcauugacguggcagaucuuuuucccgcucagccuggucugacaucagccguuauagaggcuuugccaaggaauauggugcucaccugucaggggagugacgauaucaaacggcuguuagacagccagggccgacgcgauauuaagcugaucgacauagcccuauccaaagcagauucuagaagguucgaaaacgccgucugggaccaaugcaaggaucucugucacaugcauacgggagugguaguugagaaaaagaagcggggcgggaaagaggaaauuacuccccacugcgcucugauggacuguaucauguaugaugcggcagugucgggaggucuuaauaucccggucuugcgcgccgugcugccuagagacauggucuuuaggacaagcucccccaaggugguucucuga

SEQ ID NO: 8612 - RNA, 1710 nt, Artificial Sequence
  derived and/or modified CDS sequence (opt3) from LASV(Lassa virus/H.sapiens-wt/NGA/2016/ISTH_0187;Clade II)__AVO03550__NP
augagcguguccaaggaggucaaaucuuuccuguggacccagucacucagaagggaacuuaguggcuacugcagcaacaucaagcugcaaguugugaaagacgcccaggcuuuguuacacgggcuggauuuuuccgagguaucuaaugugcagcggcuaaugcgcaagcagcgacgugacgauggagaccucaaaagacugagggaucuuaaccaagcagucaauaaccugguggaauugaagucgacacagcagaagucaguucuccggguggguacucugagcagugacgaucugcucgucuuagccgcggaccuggagaaacuuaaguccaaagugauucgcacggaaagacccuugucuagcggcguauauauggggaaucuguccucacagcaacuagaucagaggcgggcucuccugaacaugauaggaaugaccggcgguaaucgcgggggaagugccagcucugacggcaucguucgagugugggaugucaagaacgcagagcuucugaauaaccaguucggcacaaugccuuccuugacucucgccugucugaccaaacaggggcaaguggacuuaaaugaugcugugcaggcacugacagaccucggacuuauuuacaccgccaaguauccaaacucaagcgaccuggauagauuggcucagagucauccgauccuaaauaugauugacacuaagaaaucuucccugaacaucagcgguuacaauuuuucgcucggcgccgcggucaaggcaggggccugcaugcuggauggaggcaacaugcuugagacaauaaaaguuucuccccaaaccaucgacgguauucugaagacgaucuugaaagugaagaaaucccucgggauguucauuucagauguaccuggagaaaggaacccauaugagaauauccuguacaagauauguuuaaguggcgacggcuggcccuauauugcuagccggacuuccaucguggggcgugccugggaaaacaccgucguggaucuggagucugacaauaagccucagaaaacaggaaacgguggcagcaauaagucacuacagagugcaggguuugcugccggacucacuuacucccagcugaugacccuuaaagauagcauguugcaacuggacccaaacucuaagacauggauggauauugagggccgccccgaagacccuguugagaucgcgcucuaccagccaucaagugguugcuauauccacuucuuuagagaaccgaccgaccugaaacaguucaagcaggaugccaaguacagccaugggauugacgugacggaucuuuuugcagcucaacccggccugacuuccgccgucauagaggcuuugccuaggaauauggugaucacaugucagggaucugaagacauucggaaacuccuggagucgcagggccgacgcgauaucaaguuaauagacauuagccugaacaaagccgauuccagaaaguucgagaaugcaguaugggaccaguuuaaagaucuaugccacaugcauaccgggguuguggucgaaaagaagaaaaggggagguaaggaggaaaucacuccacacugugcccucauggacugcaucauguucgaugcugcggugucaggcgggcuggacacaaaaguccuucgggcaguguugccccgcgauaugguuuuuagaaccaguacgccuaaggugguacuguga

SEQ ID NO: 8613 - RNA, 1710 nt, Artificial Sequence
  derived and/or modified CDS sequence (opt3) from LASV(Lassa virus/H.sapiens-wt/NGA/2016/ISTH_0419;Clade II)__AVO03540__NP
augagcgccuccaaggaggugaaaucuuuccuguggacccagucacucagaagggaacuuaguggcuacugcagcaacaucaagcugcaagucguuaaagacgcucaggcauuguuacacgggcuggauuuuuccgaggugucuaauguacagcggcuaaugcgcaagcagaaacgagacgauggagaccucaagcgucugagagaucuuaaccaagccgugaauaaccuggucgaauugaagucgacacagcagaaaucagugcucaggguugguacucugagcagugacgaucugcucacguuagcggcugaccuggagaaacuuaaauccaaggugauucggaccgaacgccccuugucuagcggcgucuauauggggaaucuguccucacagcaacuagaucagagaagggcccuccugaacaugauaggaaugacaggcggugggcagggagcaagugccggccgggacggcaucgugcgcguaugggauguuaaaaaugcugagcuucugaacaaucaguucgggacuaugccuagcuugacccucgcaugucugacaaagcaaggacagguggacuuaaacgaugccguccaggcucugaccgaccucggucuuauuuacacugccaaguauccaaauucuuccgaccuggaucgauugucacaaagccauccgauccuaaacaugauugacacaaagaagaguucucugaauaucuccggcuacaacuuuagccucggggcggcagugaaagccggagcuugcaugcuggauggcgguaauaugcuugagaccauaagagugucgccccagacgauggacgggauccugaagucuauuuugaaagucaagaggucccucggaauguucguuucagauaucccuggcgaacggaacccauaugagaacauucuguacaaaaucuguuuaaguggcgacggguggcccuauauagccagccguacuuccauuaccggacgcgcaugggaaaauacaaucguggaucuggagucugacagcagaccucagaagccagguaacucaggcaguaauaggucccuacagagcgcuggguuucccgccggacucacuuacucucaacugaugacccuuaaggauucaauguugcagcuggacccuaacgcgaaaacauggauggauauugagggccggccagacgacccgguagaaaucgcccucuaccagcccaguagcgguugcuauauccacuucuuucgagagccuaccgaucugaagcaguucaaacaagacgcaaaguacucccaugggauugaugugggcgaccuuuuuacggcucagccaggacugacuucugccgucuuggaagcucucccccgcaauauggugauaacaugucagggcucggaggauaucaaaaagcuguuagaaagccaggggagaaaggacauuaaacugguugauaucuccaugucaaagccugacaguaggaaauucgagaacgccgugugggaucaauauaaggaccuaugccacaugcauaccggaauagucguggagaaaaagaagcgggguggcaaagaagagauuacuccacacugugcacucauggauugcaucauguuugacgccgcuguaguugggggacuggaugcgaagauccuucgcgcaguguugcccagagacauggucuucaggacaucuaccccgaaagugguccuguga

SEQ ID NO: 8614 - RNA, 1710 nt, Artificial Sequence
  derived and/or modified CDS sequence (opt3) from LASV(Lassa virus/H.sapiens-wt/NGA/2016/ISTH_0447;Clade II)__AVO03560__NP
augagcgccuccaaggaggugagaucuuuccuguggacccagucacucaggcgggaacuuaguggcuacugcagcuccaucaaacugcaagucguuaaggacgcucaggcauuguuacacgggcuggauuuuucugaggugucgaacguacagcgccuaaugcgaaaacagaagcgugacgauucagaccucaaaagacugagggaucuuaaucaagccgugaacaaucuggucgaacucaagagcacacagcagaagaguauuuugcgggugggaacucugacguccgacgaucugcucaccuuagcggcugaccuggagaaacuuaagucuaaaguuauacgcacagaaagacccuugagcuccgguguguauaugggcaaccugucaagucagcaacuagagcagaggcgggcccuccugaauaugaucgggauggucggaggcgcacaggguacucagccugggcgcgauggagugguacgaguuugggacgugaagaacccagaucuucugaauaaccaauucggcaccaugccgagcuugacacucgccugucugaccaaacagggccaggucgacuuaaaugaugcugugcuggcacucacugaccuugggcugauuuacacagccaaguaucccaacucuuccgacuuggauagacuaucacaaagccauccuauccugaauaugguggacaccaagaaaaguucucucaacauuuccggauacaauuuuagccugggugcugccgucaaggcgggcgcaugcaugcuugaugggggaaacaugcuggagacgaucaaaguuacuccacagaccauggacggcauauugaagucgauccucaaagugaagaggucucuggguauguucguauccgauacacccggggaacggaauccuuaugagaacauuuuauacaaaaucugucugucaggagacggcuggccauauauugccagucguacuagcaucgugggccgcgcuugggaaaacaccacagucgaucuagaguccgacgggaagccccagaaggugggagccgcagguucuaccaaaagccuccagucagcuggcuuuccuacggggcugacuuacagucaacuuaugacauugaaggauuccaugaugcagcuggacccaagcgccaaaaccuggauagauauugagggaagaccggaagaccccguugagaucgcgcucuaccagccuaugucuggcugcuauauucacuucuuuagggaaccaacugaccugaagcaguucaaacaagaugccaaguacucacaugguaucgacguggcagaucuuuuucccgcucagccugggcugacaagugccgucaucgaggcuuugccacggaauauggugcucaccugucagggcagcgacgauauuaagcgacuguuagacucccagggacgcagagauauaaaacugaucgacauugcccuaucuaagguagauucgaggcgguucgaaaacgcaguuugggaccaaugcaaagaucucugucacaugcauacgggcguggucguggagaagaaaaagcgcgggggaaaggaggaaaucacaccccacugcgcccugauggacuguauaauguaugaugcugcggucagcgguggccuuaauauuccgguguugagagcaguucugccuagggacaugguguuucguaccuccucacccaaaguaguccucuga

SEQ ID NO: 8615 - RNA, 1710 nt, Artificial Sequence
  derived and/or modified CDS sequence (opt3) from LASV(Lassa virus/H.sapiens-wt/NGA/2016/ISTH_0543;Clade II)__AVO03596__NP
augagcgccuccaaggaggugaaaucuuuccuguggacccagucacucagaagggaacuuaguggcuacugcagcaacaucaagcugcaagucguuaaagacgcucaggcauuguuacacgggcuggauuuuuccgaggugucuaauguacagcggcuaaugcgcaagcagaaacgagacgauggagaccucaagcgucugagagaucuuaaccaagccgugaauaaccuggucgaauugaagucgacacagcagaaaucagugcucaggguugguacucugacgagcgacgaucugcucauuuuagcggcugaccuggagaaacuuaagaguaaggugauacggaccgaacgccccuuguccucuggcgucuauauggggaaucugagcacacagcaacuagagcagagaaaagcccuccuguccaugaucggaauggugggcggugcacaggggacucagccuggaagggauggcguaguucgggugugggacgucaagaacccagaucuucugaauaaccaauucggcaccaugccgucauugacacucgccugucugaccaagcagggacagguggacuuaaaugaugcugugcuggcacucacugaccuugggcugauuuacacagccaaauaucccaacaguagcgacuuggaucgccuaucucaaucccauccuauccugaauauggucgacaccaagaaaucaagccucaacauuagugguuacaauuuuucucugggcgcugccguuaaggcgggggcaugcaugcuugauggaggcaacaugcuggagacgaucaaagugacuccacagaccauggacgguauauugaaguccauccucaaaguaaagcgaagccuggggauguucgugucggauacacccggagaaagaaauccuuaugagaacauuuuauacaagaucugucugucuggcgacggcuggccauauauugccuccaggacuucaaucgucgggcgggcuugggaaaacaccacaguggaucuagagagugacggaaaaccccagaagguugguaccgccggcagcaauaaaucccuccagucugcaggguuuccuacgggacugacuuacagccaacuuaugacauugaaggauucaaugaugcagcuggacccaagugcuaaaaccuggauagauauugagggccguccggaagaccccguggagaucgcccucuaccagccuauguccgguugcuauauucacuucuuucgcgaaccaacugaccugaagcaguucaagcaagaugcgaaauacagccaugggaucgacgucacagaucuguuuucugcccagcccggccuuaccucagcagugaucgaggcuuugccuagaaacaugguacucacgugucagggaagugacgauauuaagaaacuguuagacagccagggcaggcgggauauaaagcugaucgacauuucccuaucuaaagccgauucgcgacgcuucgaaaaugcuguuugggaccaaugcaaggaucucugucacaugcauaccgggguggucguggagaagaaaaagagaggagguaaagaggaaaucacaccacacugcgcccugauggacuguauaauguuugaugcagccgucagcggcgggcuuaacauucccaucuugagggcugugcugccgcgggacaugguuuuccgcacuuccucaccuaaggugguacucuga

SEQ ID NO: 8616 - RNA, 1710 nt, Artificial Sequence
  derived and/or modified CDS sequence (opt3) from LASV(Lassa virus/H.sapiens-wt/NGA/2016/ISTH_0565;Clade II)__AVO03638__NP
augagcgccuccaaggaggugaaaucuuuccuguggacccagucacucagaagggaacuuaguggcuacugcagcaacaucaagcugcaagucguuaaagacgcucaggcauuguuacacgggcuggauuuuuccgaggugucuaauguacagcggcuaaugcgcaagcagaaacgagacgauggagaccucaagcgucugagagaucuuaaccaagccgugaauaaccuggucgaauugaagucgacacagcagaaaucagugcucaggguugguacucugacgagcgacgaucugcucaccuuagcggcugaccuggagaaacuuaagaguaaggugauucggacagaacgccccuuguccucuggcgucuauauggggaaucugagcacucagcaacuagagcagagaaaagcccuccuguccaugauaggaauggugggcggugcacaggggacccagccuggaagggauggcguaguucgggugugggacgucaagaacccagaucuucugaauaaccaauucggcacaaugccgucauugacccucgccugucugacuaagcagggacagguggacuuaaaugaugcugugcuggcacucacagaccuugggcugaucuacaccgccaaauaucccaacaguagcgacuuggaucgccuaucucaaucccauccuauucugaauauggucgacacgaagaaaucaagccucaacaucagugguuacaauuuuucucugggcgcugccguuaaggcgggggcaugcaugcuugauggaggcaacaugcuggagacuauuaaagugaccccacagacaauggacgguaucuugaaguccauacucaaaguaaagcgaagccuggggauguucgugucggauacucccggagaaagaaauccuuaugagaacaucuuauacaagauuugucugucuggcgacggcuggccauauaucgccuccaggaccucaauugucgggcgggcuugggaaaacacaaccguggaucuagagagugacggaaaaccccagaagguugguacggccggcagcaauaaaucccuccagucugcaggguuuccuacuggacugacauacagccaacuuaugaccuugaaggauucaaugaugcagcuggacccaagugcuaaaacuuggaucgauauagagggccguccggaagaccccguggagauugcccucuaccagccuauguccgguugcuauauccacuucuuucgcgaaccaacagaccugaagcaguucaagcaagaugcgaaauacagccaugggauugacgucaccgaucuguuuucugcccagcccggccuuacgucagcagugaucgaggcuuugccuagaaacaugguacucaccugucagggaagugacgauaucaagaaacuguuagacagccagggcaggcgggauauuaagcugauagacaucucccuaucuaaagccgauucgcgacgcuucgaaaaugcuguuugggaccaaugcaaggaucucugucacaugcauacagggguggucguggagaagaaaaagagaggagguaaagaggaaauuacuccacacugcgcccugauggacuguaucauguuugaugcagccgucagcggcgggcuuaacauacccauuuugagggcugugcugccgcgggacaugguuuuccgcaccuccucaccuaaggugguacucuga

SEQ ID NO: 8617 - RNA, 1710 nt, Artificial Sequence
  derived and/or modified CDS sequence (opt3) from LASV(Lassa virus/H.sapiens-wt/NGA/2016/ISTH_0610;Clade II)__AVO03586__NP
augagcgccuccaaggaggugaaaucuuuccuguggacccagucacucagaagggaacuuaguggcuacugcagcaacaucaagcugcaagucguuaaagacgcucaggcauuguuacacgggcuggauuuuuccgaggugucuaauguacagcggcuaaugcgcaagcagaaacgagacgauucggaccucaagcgucugagagaucuuaaccaagccgugaauaaccuggucgaauugaagucaacacagcagaaaagcgugcucaggguuggaacucugacgagugacgaucugcucaccuuagcggcugaccuggagaaacuuaaguccaaggugauucggacagaacgccccuugucuagcggugucuauaugggcaaucuguccgcccagcaacuagagcagagaagggcacuccugaacaugauagggauggugggaggcgcccaggguacucagccugggcgggauggaguaguucgcgugugggacgucaaaaauccagaucuucugaacaaucaauucggcaccaugccgucauugacacucgcuugucugaccaagcagggccagguggacuuaaacgaugugguccuggcacucacugaccuugggcugaucuacacagccaaguaucccaauaguagcgacuuggaucgacuaucucaaucccauccuauucugaacaugguugacaccaaaaagucaagccucaauaucaguggauacaacuuuucucugggugcugccgugaaagcgggcgcaugcaugcuugaugggggaaauaugcuggagacgauuaagguaacuccacagaccauggacggcaucuugaaauccauacucaaggugaaaaagagccuggguauguucgucucggauacacccggggaaagaaacccuuaugagaacaucuuauacaagauuugucugucuggagacggcuggccauauaucgccuccaggacuucaauuaugggccgggcuugggaaaauaccacaguggaucuagagagugacgggaaaccccagaagguuggaaccgccgguagcaacaaaucccuccagucugcaggcuuuccuacggggcugacuuacagccaacuuaugacauugaaggauucaaugaugcagcuggacccaagugcuaaaaccuggaucgauauagagggacguccggaagaccccguggagauugcccucuaccagccuauguccggcugcuauauccacuucuuucgcgaaccaacugaccugaagcaguucaagcaagaugcgaaauacagccaugguauugacgucacagaucuguuuucugcccagcccgggcuuaccucagcagugaucgaggcuuugccuagaaauaugguacucacgugucagggcagugacgauaucaagaggcuguuagacagccagggacggcgagauauuaaacugauagacaucgcccuauccaaggcugauucucgcagauucgaaaacgccguuugggaccaaugcaaagaucucugucacaugcauaccggcguggucguggagaagaagaaaaggggagggaaggaggaaauuacaccacacugcgcacugauggacuguaucauguaugaugccgcugucucggguggccuuaauauacccguguugcgggcgguucugccgcgcgacaugguguuuagaacuagcuccccuaaaguaguccucuga

SEQ ID NO: 8618 - RNA, 1710 nt, Artificial Sequence
  derived and/or modified CDS sequence (opt3) from LASV(Lassa virus/H.sapiens-wt/NGA/2016/ISTH_0621;Clade II)__AVO03544__NP
augagcgccuccaaggaggugaaaucuuuccuguggacccagucacucagaagggaacuuaguggcuacugcagcaacaucaagcugcaagucguuaaagacgcucaggcauuguuacacgggcuggauuuuuccgaggugucuaauguacagcggcuaaugcgcaagcagaaacgagacgauggagaccucaagcgucugagagaucuuaaccaagccgugaauaaccuggucgaauugaagucgacacagcagaaaucagugcucaggguugguacucugagcagugacgaucugcucauuuuagcggcugaccuggagaaacuuaaauccaaggugauacggacggaacgccccuugucuagcggcgucuauauggggaaucuguccucacagcaacuagaucagagaagggcccuccugaacaugaucggaaugaccggcgguagucaggggacaaauacuggacgggacggcauugugcgcaucugggauguaaagaacgcagagcuucugaauaaccaguucggcaccaugccuagcuugacacucgccugucugaccaagcaagggcagguugacuuaaaugaugcugugcaggcacugacugaccucggacuuauuuacacagccaaguauccaaacucuuccgaccuggaucgauugucacaaagccauccgauccuaaauaugauagacaccaaaaagaguucucugaacaucuccgguuacaauuuuagccucggcgcugccgucaaagcgggggcaugcaugcuggauggaggcaacaugcuugagacgauuaaggugucgccccagacuauggacgguauccugaaaucuauuuugaaggugaaaaagucccucgggauguucgucucagauaccccuggagaaagaaacccauaugagaauauccuguacaagauauguuuaaguggcgacggcuggcccuauauugccagcaggacauccaucacugggcgggcuugggaaaacaccauuguugaucuggagacagacaauaaaucucagaagccuggaaacagcgguucaaaucguagucuacaguccgccggcuuuccagcagggcucaccuacagccaacugaugacgcuuaaagauucuauguugcagcuggaccccaacgcuaagacuuggauggauaucgagggacgcccugacgacccaguggaaaucgcccucuaccagccgucaaguggcugcuauauucacuucuuuagagagcccacagaucugaaacaguucaagcaagacgcgaaguacagccaugguauagauguauccgaccuuuuugccgcacagccugggcugaccucugcugugaucgaagccuugccaaggaauauggucauuacuugucagggcucggaggauauccggaaacuccuggaaagccagggacgacgcgacauaaaguuaguggauauuucccugucaaaaagugacucuagaaaguucgagaacguugugugggaucaauuuaaagaccuaugccacaugcauacaggcgucgugguagagaagaagaaaaagggagggaaagaagagaucacgccccacugugcucucauggauugcaucauguucgacgccgcaguuauggguggccuggaugccagggugcuucgggcugucuugccucgcgacaugguguuuagaaccagcaccccaaaggucgugcuguga

SEQ ID NO: 8619 - RNA, 1710 nt, Artificial Sequence
  derived and/or modified CDS sequence (opt3) from LASV(Lassa virus/H.sapiens-wt/NGA/2016/ISTH_0701;Clade II)__AVO03630__NP
augagcgccuccaaggaggugaaaucuuuccuguggacccagucacucagaagggaacuuaguggcuacugcagcaacaucaagcugcaagucguuaaagacgcucaggcauuguuacacgggcuggauuuuuccgaggugucuaauguacagcggcuaaugcgcaagcagaaacgagacgauucggaccucaagcgucugagagaucuuaaccaagccgugaauaaccuggucgaauugaagucaacacagcagaaaagcauucucagggugggaacucugacgagugacgaucugcucauauuagcggcugaccuggagaaacuuaaguccaagguuauccggaccgaacgccccuugucuagcgguguguauaugggcaaucuguccacacagcaacuagagcagagaagggcccuccugaaccuuauugggauggucggaggcgcacaggguacucagccugggcgggauggagugguacgcguuugggacgugaaaaauccagaucuguugaacaaucaauucggcaccaugccgucacucacacuggccuguuuaaccaagcagggccaggucgaccugaacgaugcugugcucgcacuuacugaccugggguugaucuacacagccaaguaucccaauaguagcgaccuagaucgacugucucaaucccauccuauucucaacaugguggacaccaaaaagucaagccugaauaucaguggauuuaacuucucucuuggugcugccgucaaagcgggcgcaugcaugcuggaugggggaaauauguuggagacgauaaagguuacuccacagaccauggacggcauccucaaauccauucugaaggugaaacggagcuuagguauguuuguaucggauacacccggggaaaggaacccuuacgagaacauccuguauaagauuugucuaucuggagacggcuggccauacaucgccucccggacuucaauagugggccgugcuugggaaaauaccacagucgaucucgagagugacgggaagccccacaaagugggaaccgccgguagcaacaagucccugcagucugcaggcuucccuacggggcuuacuuauagccaguugaugacacugaaagauucaaugaugcaacucgacccaagugcuaagaccuggauugauaucgagggacgcccggaagaccccguugagauugcccuguaccagccuauguccggcugcuacauccacuuuuucagagaaccaacugaccuuaaacaguuuaagcaggaugcgaaguauagccaugguaucgacguggccgaucuguuccccgcacaaccuggguugacaucugcugucauugaggcccucccaaggaauauggugcugaccugucagggcucagacgauauaaaacgguuacuggacagucagggacgacgcgauaucaagcuaauugacaucgcucucagcaaagccgauuccagaagguuugaaaacgcaguaugggaccagugcaaggaucugugucauaugcacacgggcguuguggucgagaaaaagaagagagggggaaaagaggaaauaacaccccacugcgcccuuauggacuguauuauguacgaugcugcggugucugguggcuugaauaucccgguccugcgcgcagugcucccuagagacaugguuuucaggaccucgagccccaaggugguacuguga

SEQ ID NO: 8620 - RNA, 1710 nt, Artificial Sequence
  derived and/or modified CDS sequence (opt3) from LASV(Lassa virus/H.sapiens-wt/NGA/2016/ISTH_0702;Clade II)__AVO03558__NP
augagcgccuccaaggaggugaaaucuuuccuguggacccagucacucagaagggaacuuaguggcuacugcagcaacaucaagcugcaagucguuaaagacgcucaggcauuguuacacgggcuggauuuuuccgaggugucuaauguacagcggcuaaugcgcaagcagaaacgagacgauucggaccucaagcgucugagagaucuuaaccaagccgugaauaaccuggucgaauugaagucaacacagcagaaaagcauucucagggugggaacucugacgagugacgaucugcucaccuuagcggcugaccuggagaaacuuaaguccaagguuauacggacagaacgccccuugucuagcgguguguauaugggcaaucuguccacucagcaacuagagcagagaagggcccuccugucaaugaucgggauggucggaggcacccaggguacacagccugggcgggauggagugguacgcguuugggacgugaaaaacccagaucuucugaauaaccaauucggcaccaugccgaguuugacucucgcaugucugacaaagcagggccaggucgacuuaaaugaugccgugcuggcucucaccgaccuugggcugauuuacacggcaaaguaucccaacagcucugacuuggaucgacuaucccaaucacauccuauccugaauaugguggacacuaaaaagagcagucucaacauuucuggauacaauuuuucccugggugccgcugucaaagccggcgcgugcaugcuugaugggggaaacaugcuggagaccaucaagguuacaccacagacuauggacggcauauugaaaagcauccucaaggugaaaaagucgcuggguauguucguaucugauacccccggggaaagaaauccuuaugagaacauuuuauacaagaucugucuguccggagacggcuggccauauauugcaucaaggacaaguaucgugggccgggccugggaaaacaccacggucgaucuagagagcgacgggaaaccccagaaggugggaacugcugguuccaauaaaucucuccagagcgccggcuuuccuacagggcugaccuacucacaacuuaugacuuugaaggauaguaugaugcagcuggacccauccgcaaaaacauggauagauauugagggacguccggaagaccccguugagaucgcucucuaccagccuaugagcggcugcuauauucacuucuuucgcgaaccaaccgaccugaagcaguucaagcaagaugccaaauacucucaugguaucgacguggcggaucuuuuucccgcccagccugggcugacgucagcagucaucgaggcuuugccaagaaacauggugcucaccugucagggcagugacgauauuaagaggcuguuagacagccagggacggcgagauauaaaacugaucgacauuucccuaucuaaggccgauucgcgcagauucgaaaaugcuguaugggaccaaugcaaagaucucugucacaugcauacaggcguuguggucgagaagaagaaaaggggagggaaggaggaaaucacuccccacugcgcccugauggacuguauaauguaugaugcagccgugagcgguggccuuaacauuccggucuugcgggcugugcugccucgcgacaugguuuuuagaaccuccucacccaaagugguacucuga

SEQ ID NO: 8621 - RNA, 1710 nt, Artificial Sequence
  derived and/or modified CDS sequence (opt3) from LASV(Lassa virus/H.sapiens-wt/NGA/2016/ISTH_0717;Clade II)__AVO03548__NP
augagcguguccaaggaggucaaaucuuuccuguggacccagucacucagaagggaacuuaguggcuacugcagcaacaucaagguucaagugguaaaagacgcccaggcucuguugcacggguuagauuuuuccgaggugucuaauguccagcggcugaugcgcaagcagaaacgagacgauggagaccuaaagcgucucagagaucugaaccaagcagugaauaaccuuguugaacugaagucgacacagcagaaaucaguguugagggucgguacucucagcagugacgaucugcuggugcucgccgcggacuuagagaagcugaaauccaagguaauucggacggaacgcccccuuucuagcggcauauauauggggaauuuguccucacagcaacuggaucagagaaaagcucuacucaacaugaucggaaugaccggcgguaauguugggaggaacacaacuggagacggcgugguccgggugugggaugugaagaaugccgagcugcuuaacaaucaguucggcaccaugccuagucugacauuggcaugucucaccaagcaggggcaagucgaccugaacgaugccguuuuagcucugacugaccucggacuuauuuacacagcaaaauauccaaauagcucugaccuggaucgcuuggcccagucccauccgauccuaucaaugauugacaccaagaaaagcagucugaacaucucugguuacaauuuuucccucggcgcugccgugaaggcgggggcaugcaugcuggauggaggcaacaugcuugagacgauaaaaguaagcccccagacuaucgacgguauucugaagucgaucuugaaagugaagcgaucucucgggauguucauuuccgauaccccuggagaaagaaacccauaugagaauauccuguacaagauauguuuaucaggcgacggcuggcccuauauugccaguaggacaagcaucgucgggcgggcuugggaaaacacugugguugaucuggaguccgacaauaaaccucaaaagaccggaaacgguggcucuaauaaaagccuacagucagccggguuugcagcuggacucacauacagucagcugaugacccuuaaggauuccauguugcagcuggacccaaacgccaaaacguggauggauauugagggccgucccgaagacccuguggagaucgcgcucuaccaaccaagcucugguugcuauauccacuucuuucgcgaaccgacugaccugaagcaguucaagcaggaugccaaauacucacaugggauugacgucacagaucuuuuugcagcucagcccggccugaccagugccgugauagaggcuuugccuagaaauaugguaaucacuugucaaggaagcgaagacauuaggaagcuccuggagucccagggccggcgagauaucaaauuaauagacauuucucugucgaagguugauagccgcaaauucgagaacgccgugugggaccaguuuaaggaucuaugccacaugcauacagggaucgucguggaaaagaaaaagagaggagguaaagaggaaaucaccccacacugugcacucauggacugcauuauguucgaugccgcugucuccggcgggguggacgcgaagguucugagggcagugcuuccccgggauaugguauuucgcacgucaaccccuaaagucguguuguga

SEQ ID NO: 8622 - RNA, 1710 nt, Artificial Sequence
  derived and/or modified CDS sequence (opt3) from LASV(Lassa virus/H.sapiens-wt/NGA/2016/ISTH_0753;Clade II)__AVO03610__NP
augagcgccuccaaggaggugaaaucuuuccuguggacccagucacucagaagggaacuuaguggcuacugcagcuccaucaagcugcaagucguuaaagacgcucaggcauuguuacacgggcuggauuuuucugaggugucgaacguacagcggcuaaugcgcaagcagaaacgagacgauucagaccucaagcgucugagagaucuuaaucaagccgugaacaaucuggucgaacuuaagagcacacagcagaaaaguauucucagggugggaacucugacguccgacgaucugcucaccuuagcggcugaccuggagaaguugaaaucuaagguuauacggacagaacgccccuugagcuccgguguguauaugggcaaccugucaacucagcaacuagagcagagaagggcccuccugaauaugaucgggauggucggaggcgcacaggguacccagccugggcgggauggagugguacgcguuugggacgugaaaaacccagaucuucugaauaaccaauucggcacaaugccgaguuugacccucgccugucugacuaagcagggccaggucgacuuaaaugaugcugugcuggcacucacagaccuugggcugauuuacaccgccaaguaucccaacagcucugacuuggaucgacuaucccaaucacauccuauccugaauaugguggacacgaaaaagagcagucucaacauuucuggauacaauuuuucccugggugcugccgucaaagcgggcgcaugcaugcuugaugggggaaacaugcuggagacuaucaagguuaccccacagacaauggacggcauauugaaaagcgugcucaagguaaaaagaucgcuggguauguucgugucugauacucccggggaaaggaauccuuaugagaacaucuuauacaagauuugucuguccggagacggcuggccauauaucgccucacggaccaguauugucggccgugcuugggaaaacacaaccguggaucuagagagcgacgggaagccccagaaaguuggagccgcagguuccaauaagucucuccagagcgcuggcuuuccuacggggcugacuuacucacaacuuaugacauugaaagauaguaugaugcagcuggacccauccgccaagaccuggaucgauauagagggacgcccggaagaccccguggagauugcgcucuaccagccuaugagcggcugcuauauccacuucuuuagagaaccaacugaccugaaacaguucaagcaagaugccaaguacucucaugguauugacgucgcagaucuuuuucccgcucagccugggcugacaucagccgugaucgaggcuuugccaaggaacaugguacucaccugucagggcagugacgauaucaaacggcuguuagacagccagggacgacgcgauauuaagcugauagacaucgcccuauccaaagcagauucuagaagguucgaaaaugccguuugggaccaaugcaaggaucucugucacaugcauacgggcguggucguggagaaaaagaagcgcgggggaaaagaggaaauuacaccccacugcgcucugauggacuguaucauguaugaugcggcagucucggguggccuuaacauaccgguguugcgggccguucugccuagagacaugguguuuaggaccagcucccccaagguaguccucuga

SEQ ID NO: 8623 - RNA, 1710 nt, Artificial Sequence
  derived and/or modified CDS sequence (opt3) from LASV(Lassa virus/H.sapiens-wt/NGA/2016/ISTH_0759;Clade II)__AVO03594__NP
augagcgccuccaaggaggugaaaucuuuccuguggacccagucacucagaagggaacuuaguggcuacugcagcuccaucaagcugcaagucguuaaagacgcucaggcauuguuacacgggcuggauuuuucugaggugucgaacguacagcggcuaaugcgcaagcagaaacgagacgauucagaccucaagcgucugagagaucuuaaucaagccgugaacaaucuggucgaacuuaagagcacacagcagaaaaguauucucagggugggaacucugacguccgacgaucugcucaccuuagcggcugaccuggagaaguugaaaucuaagguuacacggacugaacgccccuugagcuccgguguguauaugggcaaccugucaacccagcaacuagagcagagaagggcccuccugaauaugauagggauggucggaggcgcacaggguacacagccugggcgggauggagugguacgcguuugggacgugaaaaacccagaucuucugaauaaccaauucggcaccaugccgaguuugacucucgccugucugacaaagcagggccaggucgacuuaaaugaugcugugcuggcacucaccgaccuugggcugaucuacacggccaaguaucccaacagcucugacuuggaucgacuaucccaaucacauccuauucugaauaugguggacacuaaaaagagcagucucaacaucucuggauacaauuuuucccugggugcugccgucaaagcgggcgcaugcaugcuugaugggggaaacaugcuggagaccauuaagguuacaccacagacuauggacggcaucuugaaaagcauacucaaggugaaaagaucgcuggguauguucguaucugaugcccccggggaaaggaauccuuaugagaacaucuuauacaagauuugucuguccggagacggcuggccauauaucgcuucacggaccaguauugugggccgugccugggaaaacacaaccgucgaucuagagagcgacgggaagccccagaaagugggaacggcagguuccaauaagucucuccagagcgcuggcuuuccuacugggcugacauacucacaacuuaugaccuugaaagauaguaugaugcagcuggacccauccgccaagacuuggaucgauauagagggacgcccggaagaccccguugagauugcgcucuaccagccuaugagcggcugcuauauccacuucuuuagagaaccaacagaccugaaacaguucaagcaagaugccaaguacucucaugguauugacguggcagaucuuuuucccgcucagccugggcugaccucagccgucaucgaggcuuugccaaggaacauggugcucacgugucagggcagugacgauaucaaaaagcuguuagacagccagggacggcgagauauuaaacugauagacaucgcccuaucccgcgcagauucuagaagguucgaaaaugccguaugggaccaaugcaaggaucucugucacaugcauaccggcguuguggucgagaaaaagaagcgcgggggaaaagaggaaauuacaccccacugcgcucugauggacuguaucauguaugaugcggcagugucggguggccuuaacauaccggucuugcgggccgugcugccuagagacaugguuuuuaggacuagcucccccaaggugguacucuga

SEQ ID NO: 8624 - RNA, 1710 nt, Artificial Sequence
  derived and/or modified CDS sequence (opt3) from LASV(Lassa virus/H.sapiens-wt/NGA/2016/ISTH_0777;Clade II)__AVO03616__NP
augagcgccuccaaggaggugaaaucuuuccuguggacccagucacucagaagggaacuuaguggcuacugcagcaacaucaagcugcaagucguuaaagacgcucaggcauuguuacacgggcuggauuuuuccgaggugucuaauguacagcggcuaaugcgcaagcagaaacgagacgauggagaccucaagcgucugagagaucuuaaccaagccgugaauaaccuggucgaauugaagucgacacagcagaaaucagugcucaggguugguacucugacgagcgacgaucugcucaccuuagcggcugaccuggagaaacuuaagaguaaggugauucggacagaacgccccuuguccucuggcgucuauauggggaaucugagcacucagcaacuagagcagagaaaagugcuccuguccaugauaggaaugguaggcgguacccagagggcccagccugggaaggauggaguugugcgggucugggacgugaagaacccagaucuucugaauaaccaauucggcacaaugccgucauugacccucgcaugucugacuaaacagggccagguggacuuaaaugauacaguccuggcccucaccgaccuugggcugaucuacacggcuaaguaucccaacaguagcgacuuggaucgccuaucucaaucccauccuauucugaauaugguugacacuaaaaagucaagccucaacaucaguggauacaauuuuucucugggugcagccgugaaagcuggcgccugcaugcuugaugggggaaacaugcuggagaccauuaagguaacaccacagacuauggacggcaucuugaaauccauacucaaggugaagcgaagccuggguauguucgucucggauacccccggggaaagaaauccuuaugagaacaucuuauacaaaauuugucugucuggagacggcuggccauauaucgcguccaggacaucaauugugggccgggcaugggaaaacaccacgguugaucuagagagugacgggaagccccagaaagugggaacugccgguagcaauaagucccuccagucugcuggcuuuccuacagggcugaccuacagccaacuuaugacuuugaaagauucaaugaugcagcuggacccaagugccaagacauggaucgauauagagggacguccggaagaccccgucgagauugcacucuaccagccuguguccggcugcuauauccacuucuuucgcgaaccaaccgaccugaagcaguucaaacaagaugcuaaguacagccaugguauugacguaacggaucuguuuucugcccagcccgggcuuaccucagcgguuaucgaggccuugccuagaaacauggugcucacaugucagggcagugacgauaucaaaaagcuguuagacagccagggaaggcgggauauuaaacugauagacaucucccuaucuaaguucgauucgcgaaaguuugaaaaugcagucugggaccaaugcaaagaucucugucacaugcauacuggcguggucguggagaagaaaaagcgcgggggaaaagaggaaauuaccccacacugcgcucugauggacuguaucauguucgaugccgcuguuagcgguggccuuaacauacccauuuugagagccgugcugccgagggacaugguauuucggacauccucaccuaaggucgugcucuga

SEQ ID NO: 8625 - RNA, 1707 nt, Artificial Sequence
  derived and/or modified CDS sequence (opt3) from LASV(Lassa virus/H.sapiens-wt/NGA/2016/ISTH_0779;Clade II)__AVO03656__NP
agcguguccaaggaggucaaaucuuuccuguggacccagucacucagaagggaacuuaguggcuacugcagcaacaucaagcugcaaguugugaaagacgcccaggcuuuguuacacgggcuggauuuuuccgagguaucuaaugugcagcggcuaaugcgcaagcagaaacgagacgauaacgaccucaagcgucugagagaucuuaaucaagcagucaacaaucugguggaauugaagucgguucagcagaaaucaauucucagggugggaacacugagcagugacgaucugcucauauuagccgcggaccuggagaaacuuaaguccaaggucauccggacugaacgccccuugucuagcgguguguauaugggcaaccuguccucacagcaacuagagcagagaaaagcucuccugaauaugauugggaugacgggaggcagucagggugcccagccugggagggauggaguaguucgggugugggacgucaagaacagcgaucuucugaauaaccaauucggcaccaugccaucuuugacacucgcaugucugacuaagcagggccagguggacuuaaaugaugccgugcuggcucucaccgaccuugggcugaucuacacagcaaaauauccgaacaccuccgacuuggaucgccuaucacaaagccaucccauucugaauauggucgacacuaagaaaaguucucucaacaucuccggauacaauuuuagccugggugccgcuguuaaggccggcgcgugcaugcuugaugggggaaacaugcuggagacaauaaaagugaccccucagacgauggacggcaucuugaagucgauucucaaaguaaagcgagcacuggguauguucgugucugauacuccaggggaaagaaaccccuaugagaauaucuuauacaagauuugucuguccggagaaggcuggccuuauaucgccucaaggaccaguauaacaggccgggcuugggagaacacuauugucgaccuagagagcgauuccaaaccacagaagauggggaccacaggaucuaauaaaagccuccagucagccgguuuucccgcaggccugaccuacagucaacuuaugacguugaaggacuccaugaugcagcuggauccuagcgcuaaaacuuggaucgacauugaagggcguccagaggauccgguggaaaucgcccucuaccagcccaucucuggaugcuauauucacuucuuucgcgagccuacagaccugaagcaguucaagcaagacgcgaaauacucacauggcauagauguugccgaccuuuuuagugcacagccaggucugaccagcgcugugaucgaagccuugcccagaaacaugguccucacuugucagggguccgaugacauuaagaaacuguuagauucucagggcaggcgggacaucaagcugauagauauuucgcuaaauaaagcugacagccgacgcuucgagaacgccgugugggaucaaugcaaggaccucugucacaugcauacaggaguaguuguggagaagaaaaagagaggcgggaaagaagagaucaccccucacugcgcacugauggauuguaucauguuugacgccgcugucuccggaggucuuaauauuccaaucuugagggcggugcugccccgggauauggucuuccgcacgucaaguccgaaggugguucucuga

SEQ ID NO: 8626 - RNA, 1710 nt, Artificial Sequence
  derived and/or modified CDS sequence (opt3) from LASV(Lassa virus/H.sapiens-wt/NGA/2016/ISTH_0917;Clade II)__AVO03536__NP
augagcgccuccaaggaggugaaaucuuuccuguggacccagucacucagaagggaacuuaguggcuacugcagcaacaucaagcugcaagucguuaaagacgcucaggcauuguuacacgggcuggauuuuuccgaggugucuaauguacagcggcuaaugcgcaagcagaaacgagacgauucggaccucaagcgucugagagaucuuaaccaagccgugaauaaccuggucgaauugaagucaacacagcagaaaagcauucucagggugggaacucugaguuccgacgaucugcucacguuagcgaccgaccuggagaaacuuaagucuaagguuauacggacagaacgccccuugagcuccgguguguauaugggcaaucugucaacucagcaacuagaucagagaagggcucuccugaacaugaucgggauggucggaggcagucaggguaccagcgccgggcgggacggaauugugcgcguaugggauguucgaaauccugagcuucugaacaaucaguucggcacaaugccaucuuugacccucgcaugucugacuaaacaaggccagguggacuuaaacgaugccguccaggcucugacagaccucgggcuuaucuacaccgcaaaguaucccaauuccucagaccuggauagauugagccaaagucauccgauucuaaacaugaucgacacgaagaaaucuuccauaaauaucagcggauacaacuuuucgcugggugccgcugugaaggccggcgcgugcaugcucgaugggggaaauaugcuggagacuauuaaagugucuccucaguccaucgacggcauucuuaagucaauccugaaagucaagaggaccuuggguauguucguuagugauacaccaggggaacggaaccccuaugagaacauacucuacaaaauuugucugagcggagacggcuggccuuauaucgcaucccguacuucuauuaccggccgcgccugggaaaauacagugguagauuuagagagcgacgauaagccaaagaaacccgggaacaaugagucaaacagaagucugcaguccgcuggauuuccugccggucuaaccuacagccagcucaugacgcugaaggacucuaugcuucaauuggauccaaaugcaaaaacuuggauggacaucgaaggcaggccggacgaucccguggagaucgcucuguaccagccuaacucagggugcuauauucacuucuuucgggaaccaacagaccucaagcaguucaaacaggaugccaaguacagucauggaauagacaucggcgaucuguuugcgagccaacccggucuuaccuccgccgucauugaggcacugccucgaaauauggugaucacuugucaggggucugaagacauaaagaaauugcucgagucgcagggccgcaaggauauuagacugguugacaucagcuuauccaaagcugauucaaggaaguucgagaacgccgugugggaccaguauaaagaucugugccacaugcauacaggaaucgucguggaaaagaagaaaaagggcgggaaagaggaaauuaccccacacugugcucuaauggacugcaucauguuugaugccgcaguaaugggaggucucgacgccaagguucugcgggcugugcuuccccgcgacauggucuucagaacgaguaccccgaggguggucuuguga

SEQ ID NO: 8627 - RNA, 1710 nt, Artificial Sequence
  derived and/or modified CDS sequence (opt3) from LASV(Lassa virus/H.sapiens-wt/NGA/2016/ISTH_0919;Clade II)__AVO03660__NP
augagcgccuccaaggaggugaaaucuuuccuguggacccagucacucagaagggaacuuaguggcuacugcagcaacaucaagcugcaagucguuaaagacgcucaggcauuguuacacgggcuggauuuuuccgaggugucuaauguacagcggcuaaugcgcaagcagaaacgagacgauucggaccucaagcgucugagagaucuuaaccaagccgugaauaaccuggucgaauugaagucaacacagcagaaaagcauucucagggugggaacucugacgagugacgaucugcucaccuuagcggcugaccuggagaaacuuaaguccaagguuauacggacagaacgccccuugucuagcgguguguauaugggcaaucuguccacucagcaacuagagcagagaagggcccuccugaaccuuaucgggauggucggaggcgcacagggugcccagccugggcgggauggagugguacgcguuugggacgugaaaaauccagaucuguugaacaaucaauucggcaccaugccgucacucacacuggcuuguuuaaccaagcagggccaggucgaccugaacgauguggugcucgcacuuacugaccugggguugauuuacacagccaaguaucccaauaguagcgaccuagaucgacugucucaaucccauccuauccucaacauggucgacaccaaaaagucaagccugaauauuaguggauuuaacuucucucuuggugcugccguuaaagcgggcgcaugcaugcuggaugggggaaauauguuggagacgaucaaggugacuccacagaccauggacggcauacucaaauccauccugaaggugaaaaagagcuuagguauguuuguaucggauacacccggggaaagaaacccuuacgagaacauucuguauaagaucugucuaucuggagacggcuggccauacauugccuccaggacuucaaucgucggccgggcuugggaaaauaccacaguggaucucgagagugacgggaaaccccacaagguuggaaccgccgguagcaacaaaucccugcagucugcaggcuucccuacggggcuuacuuauagccaguugaugacacugaaggauucaaugaugcaacucgacccaagugcuaaaaccuggauagauauugagggacguccggaagaccccguggagaucgcccuguaccagccuauguccggcugcuacauucacuuuuuccgcgaaccaacugaccuuaagcaguuuaagcaggaugcgaaauauagccaugguaucgacgucgccgaucuguuccccgcacaaccuggguugacaucugcugugaucgaggcccucccaagaaauaugguacugaccugucagggcucagacgauauuaagagguuacuggacagucagggacggcgagauauaaaacuaaucgacauugcucucagcaaggccgauucccgcagauuugaaaacgcaguuugggaccagugcaaagaucugugucauaugcacacgggcguggucguggagaagaagaaaaggggagggaaggaggaaaucacaccccacugcgcccuuauggacuguauaauguacgaugcugcggucucugguggcuugaauauuccggugcugcgggcaguucucccucgcgacaugguguucagaaccucgagccccaaaguaguccuguga

SEQ ID NO: 8628 - RNA, 1710 nt, Artificial Sequence
  derived and/or modified CDS sequence (opt3) from LASV(Lassa virus/H.sapiens-wt/NGA/2016/ISTH_1006;Clade II)__AVO03644__NP
augagcgccuccaaggaggugaaaucuuuccuguggacccagucacucagaagggaacuuaguggcuacugcagcaacaucaagcugcaagucguuaaagacgcucaggcauuguuacacgggcuggauuuuuccgaggugucuaauguacagcggcuaaugcgcaagcagaaacgagacgauucggaccucaagcgucugagagaucuuaaccaagccgugaauaaccuggucgaauugaagucaacacagcagaaaagcauucucagggugggaacucugacgagugacgaucugcucaccuuagcggcugaccuggagaaacuuaaguccaagguuauacggacagaacgccccuugucuagcgguguguauaugggcaaucuguccacucagcaacuagagcagagaagggcccuccugaacaugaucgggauggucggaggcacccaggguacacagccugggcgggauggagugguacgcguuugggacgugaaaaauccagaucuucugaacaaucaauucggcaccaugccgucauugacucucgcaugucugacaaagcagggccaggucgacuuaaacgaugccgugcuggcucucaccgaccuugggcugauuuacacggcaaaguaucccaauaguagcgacuuggaucgacuaucucaaucccauccuauccugaacaugguggacacuaaaaagucaagccucaauauuaguggauacaacuuuucucugggugccgcugucaaagccggcgcgugcaugcuugaugggggaaauaugcuggagaccaucaagguuacaccacagacuauggacggcauauugaaauccauccucaaggugaaaaagagccuggguauguucguaucggauacccccggggaaagaaacccuuaugagaacauuuuauacaagaucugucugucuggagacggcuggccauauauugcauccaggacaucaaucgugggccgggccugggaaaauaccacggucgaucuagagagugacgggaaaccccagaaggugggaacugcugguagcaacaaaucccuccagucugccggcuuuccuacagggcugaccuacagccaacuuaugacuuugaaggauucaaugaugcagcuggacccaagugcaaaaacauggauagauauugagggacguccggaagaccccguugagaucgcucucuaccagccuauguccggcugcuauauucacuucuuucgcgaaccaaccgaccugaagcaguucaagcaagaugccaaauacagccaugguaucgacguggcggaucuuuuucccgcccagccugggcugacgucugcagucaucgaggcuuugccaagaaauauggugcucaccugucagggcucagacgauauuaagaggcuguuagacagucagggacggcgagauauaaaacugaucgacauuagccuauccaaggccgauucucgcagauucgaaaacgcuguaugggaccaaugcaaagaucucugucacaugcauacaggcguuguggucgagaagaagaaaaggggagggaaggaggaaaucacuccccacugcgcccugauggacuguauaauguaugaugcagccgugucggguggccuuaauauuccggucuugcgggcugugcugccucgcgacaugguuuuuagaaccagcucccccaaagugguacucuga

SEQ ID NO: 8629 - RNA, 1710 nt, Artificial Sequence
  derived and/or modified CDS sequence (opt3) from LASV(Lassa virus/H.sapiens-wt/NGA/2016/ISTH_1026;Clade II)__AVO03590__NP
augagcgccuccaaggaggugaaaucuuuccuguggacccagucacucagaagggaacuuaguggcuacugcagcaacaucaagcugcaagucguuaaagacgcucaggcauuguuacacgggcuggauuuuuccgaggugucuaauguacagcggcuaaugcgcaagcagaaacgagacgauucggaccucaagcgucugagagaucuuaaccaagccgugaauaaccuggucgaauugaagucaacacagcagaaaagcauucucagggugggaacucugacgagugacgaucugcucaccuuagcggcugaccuggagaaacuuaaguccaagguuauacggacagaacgccccuugucuagcgguguguauaugggcaaucuguccgcccagcaacuagagcagagaagggcacuccugaaccuuaucgggauggucggaggcgcccaggguacucagccugggcgggauggagugguacgcguuugggacgugaaaaauccagaucuguugaacaaucaauucggcaccaugccgucacucacacuggcuuguuuaaccaagcagggccaggucgaccugaacgaugcagugcucgcccuuacugaccugggguugauuuacacagcuaaguaucccaauaguagcgaccuagaucgacugucucaaucccauccuauccucaacaugguggacaccaaaaagucaagccugaauauuaguggauuuaacuucucucuuggugccgcggucaaagcaggcgccugcaugcuggaugggggaaauauguuggagacgaucaagguuacuccacagaccauagacggcauccucaaauccauucugaaggugaaaaagagcuuagguauguuuguaucggauacacccggggaaagaaacccuuacgagaacauccuguauaagauuugucuaucuggagacggcuggccauacaucgcuuccaggacuucaauagugggccgggccugggaaaauaccacagucgaucucgagagugacgggaaaccccacaaggugggaaccgcagguagcaacaaaucccugcagucugcuggcuucccuacggggcuuacuuauagccaguugaugacacugaaggauucaaugaugcaacucgacccaagugccaaaaccuggauugauaucgagggacguccggaagaccccguugagauugcgcuguaccagccuauguccggcugcuacauccacuuuuuccgcgaaccaacugaccuuaagcaguuuaagcaggaugccaaauauagccaugguaucgacguggcagaucuguuccccgcucaaccuggguugacaucugccgucauugaggcucucccaagaaauauggugcugaccugucagggcucagacgauauaaagagguuacuggacagucagggacggcgagauaucaaacuaauugacaucgcccucagcaaggcagauucccgcagauuugaaaacgccguaugggaccagugcaaagaucugugucauaugcacacgggcguuguggucgagaagaagaaaaggggagggaaggaggaaauaacaccccacugcgcucuuauggacuguauuauguacgaugcggcagugucugguggcuugaauaucccgguccugcgggccgugcucccucgcgacaugguuuucagaaccucgagccccaaagugguacuguga

SEQ ID NO: 8630 - RNA, 1710 nt, Artificial Sequence
  derived and/or modified CDS sequence (opt3) from LASV(Lassa virus/H.sapiens-wt/NGA/2016/ISTH_1070;Clade II)__AVO03652__NP
augagcgccuccaaggaggugaaaucuuuccuguggacccagucacucagaagggaacuuaguggcuacugcagcaacaucaagcugcaagucguuaaagacgcucaggcauuguuacacgggcuggauuuuuccgaggugucuaauguacagcggcuaaugcgcaagcagaaacgagacgauggagaccucaagcgucugagagaucuuaaccaagccgugaauaaccuggucgaauugaagucgacacagcagaaaucagugcucaggguugguacucugacgagcgacgaucugcucaccuuagcggcugaccuggagaaacuuaagaguaaggugauucggacagaacgccccuuguccucuggcgucuauauggggaaucugagcacucagcaacuagagcagagaagggcccuccuguccaugauaggaauggugggcggugcacaggggacccagccuggacgggauggcguaguucgcgugugggacgucaaaaacccagaucuucugaauaaccaauucggcacaaugccgucauugacccucgccugucugacuaagcagggacagguggacuuaaaugaugugguccuggcucucacagaccuugggcugaucuacaccgcaaaguaucccaacaguagcgacuuggaucgacuaucucaaucccauccuauucugaauaugguugacacgaaaaagucaagccucaacaucagugguuacaauuuuucucugggcgccgcugugaaagccggggcgugcaugcuugauggaggcaacaugcuggagacuauuaagguaaccccacagacaauggacgguaucuugaaauccauacucaaggugaaaaagagccuggggauguucgucucggauacucccggagaaagaaauccuuaugagaacaucuuauacaagauuugucugucuggcgacggcuggccauauaucgcauccaggaccgccauuguggggcgggcuugggaaaacacaaccguugaucuagagucagacggaaaaccccagaaggugggugccacgggcaguaauaaaagccuccaguccgcaggguuuccuacuggacugacauacucucaacuuaugaccuugaaggauagcaugaugcagcuggacccaucagcuaaaacuuggaucgauauagagggccguccggaagaccccgucgagauugcccucuaccagccuaugagugguugcuauauccacuucuuucgcgaaccaacagaccugaagcaguucaagcaagaugcgaaauacucccaugggauugacgugaccgaucuuuuuagcgcccagcccggccugacgucugcaguaaucgaggcuuugccuagaaacaugguucucaccugucagggaucagacgauaucaagaggcuguuagacagucagggccggcgagauauuaaacugauagacaucgcccuaagcaaggcugauucccgcagauucgaaaaugccgugugggaccaaugcaaagaucucugucacaugcauacaggggucguggucgagaagaagaaaaggggagguaaggaggaaauuacuccacacugcgcacugauggacuguaucauguaugaugccgcugugucuggcgggcuuaacauacccguuuugcgggcggugcugccgcgcgacaugguauuuagaaccucgagcccuaaagucgugcucuga

SEQ ID NO: 8631 - RNA, 1710 nt, Artificial Sequence
  derived and/or modified CDS sequence (opt3) from LASV(Lassa virus/H.sapiens-wt/NGA/2016/ISTH_1150;Clade II)__AVO03628__NP
augagcgccuccaaggaggugaaaucuuuccuguggacccagucacucagaagggaacuuaguggcuacugcagcuccaucaagcugcaagucguuaaagacgcucaggcauuguuacacgggcuggauuuuucugaggugucgaacguacagcggcuaaugcgcaagcagaaacgagacgauucagaccucaagcgucugagagaucuuaaucaagccgugaacaaucuggucgaacucaagagcacacagcagaaaaguauuuugagggugggaacucugacguccgacgaucugcucaccuuagcggcugaccuggagaaacuuaaaucuaagguuauacggacagaacgccccuugagcuccgguguguauaugggcaaccugucaacucagcaacuagagcagagaagggcccuccugaguaugaucgggauggucggaggcgcacaggguacccagccugggcgggauggagugguacgcguuugggacgugaaaaauccagaucuucugaacaaucaauucggcacaaugccgagcuugacccucgccugucugacuaagcagggccaggucgacuuaaacgauacagugcuggcucucaccgaccuugggcugauuuacacggcaaaguaucccaauucuuccgacuuggaucgacuaucacaaagccauccuauccugaacaugguggacauuaaaaagaguucucucaauaucuccggauacaacuuuagccugggugccgcugucaaagccggcgcgugcaugcuugaugggggaaauaugcuggagacuauaaagguuaccccacagacaauggacggcaucuugaaaucgauucucaaggugaaaagaucucuggguauguucguauccgauacucccggggaaaggaacccuuaugagaauaucuuauacaagauuugucugucaggagacggcuggccauauaucgcaagucggaccagcauagugggccgugccugggaaaacacaaccgucgaucuagaguccgacgggaagccccagaaagugggaacggcugguucuaacaagagccuccagucagccggcuuuccuacugggcugacauacagucaacuuaugaccuugaaagauuccaugaugcagcuggacccaagcgcaaagacuuggauugauaucgagggacgcccggaagaccccguugagauugcucucuaccagccuaugucuggcugcuauauccacuucuuuagagaaccaacagaccugaaacaguucaagcaagaugccaaguacucacaugguaucgacgugaccgaucuuuuuagugcgcagcccgggcugacgagcgccgucauugaggcauugccuaggggcauggugcucaccugucagggauccgacgauauaaagaagcuguuagacucucagggccggcgagauaucaaacugauugacaucucgcuaagcaaggcugauucccgcagauucgaaaaugccguaugggaccaaugcaaagaucucugucacaugcauacagggguuguggucgagaagaagaaaaggggagguaaggaggaaauaacuccacacugcgcucugauggacuguauuauguuugaugccgcagugucaggcgggcuuaacauccccaucuugcgggccguccugccgcgcgacaugguguucagaaccaguucuccuaaaguugugcucuga

SEQ ID NO: 8632 - RNA, 1710 nt, Artificial Sequence
  derived and/or modified CDS sequence (opt3) from LASV(Lassa virus/H.sapiens-wt/NGA/2016/ISTH_1174;Clade II)__AVO03556__NP
augagcgccuccaaggaggugaaaucuuuccuguggacccagucacucagaagggaacuuaguggcuacugcagcaacaucaagcugcaagucguuaaagacgcucaggcauuguuacacgggcuggauuuuuccgaggugucuaauguacagcggcuaaugcgcaagcagaaacgagacgauucggaccucaagcgucugagagaucuuaaccaagccgugaauaaccuggucgaauugaagucaacacagcagaaaagcauucucagggugggaacucugacgagugacgaucugcucaccuuagcggcugaccuggagaaacuuaaguccaagguuauacggacagaacgccccuugucuagcgguguguauaugggcaaucuguccacucagcaacuagagcagagaagggcccuccugaacaugaucgggauggucggaggcgcacagucaacccagccuggucgggauggggugguacgcguuugggacgugaaaaauccagaucuucugaacaaucaauucggaacaaugccgaguuugacccucgccugucugacuaagcagggccaggucgacuuaaacgaugcugugcuggcacucacagaccuuggccugauuuacaccgccaaguaucccaauagcucugacuuggaucgacuaucccaaucacauccuauccugaacaugguggacacgaaaaagagcagucucaauauuucuggguacaacuuuucccugggagcugccgucaaagcgggugcaugcaugcuugauggcgggaauaugcuggagacuaucaagauaaccccacagacaauggacggaaucuugaaaagcauucucaagguuaaaagaucgcugggcauguucgugucugauacucccggugaaaggaacccuuaugagaacaucuuauacaagguaugucuguccggggacggauggccauauauugccucacggaccaguaucgugggccgugcuugggaaaauacaaccgucgaucuagagagcgacggcaagccccagaaaguggggacgguuggauccaacaagucucuccagagcgccgguuuuccuacuggccugacauacucacaacuuaugaccuugaaagauaguaugaugcagcuggacccauccgcaaagacuuggauagauauugaggggcgcccggaagaccccguggagaucgcucucuaccagccuaugagcggaugcuauauucacuucuuuagagaaccaacagaccugaaacaguucaagcaagaugccaaguacucucauggcaucgacgucgcggaucuuuuucccgcccagccuggucugaccucagcagugaucgaggcuuugccaaggaauaugguacucacgugucaggggagugacgauauuaaacggcuguuagacagccagggccgacgcgauauaaagcugaucgacauugcccuauccaaagcugauucuagaagguucgaaaacgccguuugggaccaaugcaaggaucucugucacaugcauaccggaguggucguggagaaaaagaagcggggcgggaaagaggaaaucacaccccacugcgcacugauggacuguauaauguaugaugccgcugucucgggaggucuuaauauuccgguguugcgcgcgguucugccuagagacaugguguuuaggacuagcucccccaagguaguccucuga

SEQ ID NO: 8633 - RNA, 1710 nt, Artificial Sequence
  derived and/or modified CDS sequence (opt3) from LASV(Lassa virus/H.sapiens-wt/NGA/2016/ISTH_1207;Clade II)__AVO03600__NP
augagcgccuccaaggaggugaaaucuuuccuguggacccagucacucagaagggaacuuaguggcuacugcagcaacaucaagcugcaagucguuaaagacgcucaggcauuguuacacgggcuggauuuuuccgaggugucuaauguacagcggcuaaugcgcaagcagaaacgagacgauucggaccucaagcgucugagagaucuuaaccaagccgugaauaaccuggucgaauugaagucaacacagcagaaaagcauucucagggugggaacucugacgagugacgaucugcucauauuagcggcugaccuggagaaacuuaaguccaagguuauccggaccgaacgccccuugucuagcgguguguauaugggcaaucuguccacacagcaacuagagcagagaagggcccuccugaacaugauugggauggucgauggagcacagggcacucagccuggucgggacggggugguacgcguuugggaugugaaaaauccagaccuucugaacaaucaauucggaaccaugccgucauugacacucgccugucugaccaagcagggccaggucgauuuaaacgacgcugugcuggcacucacugaccuuggccugaucuacacagccaaguaucccaauaguagcgauuuggaccgacuaucucaaucccauccuauucugaacaugguggauaccaaaaagucaagccucaauaucaguggguacaacuuuucucugggagcugccgucaaagcgggugcaugcaugcuugacggcgggaauaugcuggagacgauaaagguuacuccacagaccauggauggaaucuugaaauccauucucaaggugaaaaagagccugggcauguucguaucggacacacccggugaaagaaacccuuaugagaacaucuuauacaagauuugucugucuggggauggauggccauauaucgccuccaggacuucaauagugggccgggcuugggaaaauaccacagucgaccuagagagugauggcaaaagccagaagguggggaccgccggauccaacaaaucucuccagagcgcagguuuucccacgggccugacuuacucacaacuuaugacauugaaggacaguaugaugcagcuggauccuuccgcuaaaaccuggauugacaucgaggggcguccagaagacccgguugagauugcccucuaccagcccaugagcggaugcuauauccacuucuuucgcgaaccuacugaucugaagcaguucaagcaagacgcgaaauacucucauggcaucgauguggccgaccuuuuuccagcacagcccggucugacaucagcugucauugaggccuugccuagaaauauggugcucaccugucaggggagugaugacauaaagaggcuguuagauagccagggccggcgagacaucaaacugauugauaucgcucuauccaaggccgacucucgcagauucgaaaacgcaguaugggaucaaugcaaagaccucugucacaugcauacgggaguuguggucgagaagaagaaaaggggcgggaaggaggaaauaaccccacacugcgcccugauggauuguauuauguaugacgcugcggugucgggaggucuuaauauccccgucuugcgggcagugcugccgcgcgacaugguuuuuagaacaagcuccccuaaagugguacucuga

SEQ ID NO: 8634 - RNA, 1710 nt, Artificial Sequence
  derived and/or modified CDS sequence (opt3) from LASV(Lassa virus/H.sapiens-wt/NGA/2016/ISTH_1306;Clade II)__AVO03624__NP
augagcgccuccaaggaggugaaaucuuuccuguggacccagucacucagaagggaacuuaguggcuacugcagcaacaucaagcugcaagucguuaaagacgcucaggcauuguuacacgggcuggauuuuuccgaggugucuaauguacagcggcuaaugcgcaagcagaaacgagacgauggagaccucaagcgucugagagaucuuaaccaagccgugaauaaccuggucgaauugaagucgacacagcagaaaucaauucucaggguggguacucugacgagcgacgaucugcucaccuuagcggcugaccuggagaaacuuaagaguaagguuauacggacagaacgccccuuguccucuggcguguauauggggaaucugagcacucagcaacuagagcagagaagggcccuccugaacaugaucggaauggucggcggugcacaggggacccagccuggacgggauggcgugguacgcguuugggacgugaaaaauccagaucuucugaacaaucaauucggcacaaugccguccuugacccucgccugucugacuaagcaggggcaggucgacuuaaacgaugcugugcuggcacucacagaccuuggacugauuuacaccgccaaguaucccaauucaagugacuuggaucgacuaagccaaucucauccuauccugaacaugguggacacgaaaaaguccucacucaauauuagcgguuacaacuuuagucugggcgcugccgucaaagcgggggcaugcaugcuugauggaggcaauaugcuggagacuaucaagguuaccccacagacaauggacgguauauugaaaucuauccucaaggugaaaaagucccuggggauguucguaagcgauacucccggagaaagaaacccuuaugagaacauuuuauacaagaucugucugucgggcgacggcuggccauauauugccucuaggaccuccaucguggggcgggcuugggaaaauacaaccgucgaucuagagucagacggaaaaccccagaagguggguacggccggcaguaacaaaagccuccaguccgcaggguuuccuacuggacugacauacucucaacuuaugaccuugaaggauagcaugaugcagcuggacccaucagcuaaaacuuggauagauauugagggccguccggaagaccccguugagaucgcccucuaccagccuaugagugguugcuauauucacuucuuucgcgaaccaacagaccugaagcaguucaagcaagaugcgaaauacucccaugggaucgacguggccgaucuuuuucccgcacagccuggccugaccagcgcugucaucgaggccuugccaagaaauauggugcucacgugucagggaucugacgauauuaagaggcuguuagacucacagggccggcgagauauaaaacugaucgacauugcucuaaguaaggccgauagccgcagauucgaaaacgcaguaugggaccaaugcaaagaucucugucacaugcauaccgggguuguggucgagaagaagaaaaggggagguaaggaggaaaucacaccccacugcgcccugauggacuguauaauguaugaugcugcgguguccggcgggcuuaauauuccggucuugcgggcagugcugccucgcgacaugguuuuuagaacuucuucgcccaaagugguacucuga

SEQ ID NO: 8635 - RNA, 1710 nt, Artificial Sequence
  derived and/or modified CDS sequence (opt3) from LASV(Lassa virus/H.sapiens-wt/NGA/2016/ISTH_1311;Clade II)__AVO03576__NP
augagcgccuccaaggaggugaaaucuuuccuguggacccagucacucagaagggaacuuaguggcuacugcagcaacaucaagcugcaagucguuaaagacgcucaggcauuguuacacgggcuggauuuuuccgaggugucuaauguacagcggcuaaugcgcaagcagaaacgagacgauggagaccucaagcgucugagagaucuuaaccaagccgugaauaaccuggucgaauugaagucgacacagcagaaaucagugcucaggguugguacucugacgagcgacgaucugcucauuuuagcggcugaccuggagaaacuuaaaaguaaggugauacggaccgaacgccccuuguccucuggcgucuauauggggaaucugagcacacagcaacuagagcagagaagggcccuccuguccaugaucggaauggugggcggugcacaggggacucagccuggacgggauggcguaguucgcgugugggacgucaaaaacccagaucuucugaauaaccaauucggcaccaugccgucauugacacucgccugucugaccaagcagggacagguggacuuaaaugaugcugugcuggcacucacugaccuugggcugauuuacacagucaaguaucccaacaguagcgacuuggaucgacuaucucaaucccauccuauccugaauaugguugacaccaaaaagucaagccucaacauuagugguuacaauuuuucucugggcgccgcugugaaagccggggcgugcaugcuugauggaggcaacaugcuggagacgaucaagguaacuccacagaccauagacgguaucuugaaauccauucucaaggugaaaagaagccuggggauguucgucucggauacacccggagaaaggaauccuuaugagaacaucuuauacaagauuugucugucuggcgacggcuggccauauaucgcaucccggacuucaauaguggggcgugccugggaaaacaccacaguugaucuagagagugacggaaagccccagaaagugggugcugccggcagcaauaagucccuccagucugcaggguuuccuaccggacugacguacagccaacuuaugacuuugaaagauucaaugaugcagcuggacccaagugcuaagacauggauugauaucgagggccgcccggaagaccccgucgagauugcccucuaccagccuauguccgguugcuauauccacuucuuuagagaaccaaccgaccugaaacaguucaagcaagaugcgaaguacagccaugggaucgacgugacugaucuguuuucugcccagcccggccuuacaucagcaguaauugaggcuuugccuaggaacaugguucucaccugucagggaagugacgauauaaagaagcuguuagacagccagggccggcgagauaucaaacugauugacaucucccuaaauaagacggauucucgcagauucgaaaacgccgugugggaccaaugcaaagaucucugucacaugcauaccggggucguggucgagaagaagaaaaggggagguaaggaggaaauaacaccacacugcgcucugauggacuguauuauguuugaugccgcagugucgggcgggcuuaauauccccaucuugcgggccguucugccgcgcgacaugguguucagaacuagcuccccuaaaguaguccucuga

SEQ ID NO: 8636 - RNA, 1710 nt, Artificial Sequence
  derived and/or modified CDS sequence (opt3) from LASV(Lassa virus/H.sapiens-wt/NGA/2016/ISTH_1423;Clade II)__AVO03578__NP
augagcgccuccaaggaggugaaaucuuuccuguggacccagucacucagaagggaacuuaguggcuacugcagcaacaucaagcugcaagucguuaaagacgcucaggcauuguuacacgggcuggauuuuuccgaggugucuaauguacagcggcuaaugcgcaagcagaaacgagacgauucggaccucaagcgucugagagaucuuaaccaagccgugaauaaccuggucgaauugaagucaacacagcagaaaagcauucucagggugggaacucugacgagugacgaucugcucaccuuagcggcugaccuggagaaacuuaaguccaagguuauacggacagaacgccccuugucuagcgguguguauaugggcaaucuguccacucagcaacuagagcagagaagggcccuccugaacaugaucgggauggucucaggaacccagggcacacagccuggucgggauggggugguacgcguuugggacgugaaaaauccagaucuucugaacaaucaauucggaaccaugccgaguuugacucucgcaugucugacaaagcagggccaggucgacuuaaacgaugccgugcuggcucucaccgaccuuggccugauuuacacggcaaaguaucccaauagcucugacuuggaucgacuaucccaaucacauccuauccugaacaugguggacacuaaaaagagcagucucaauauuucuggguacaacuuuucccugggagccgcugucaaagccggugcgugcaugcuugauggcgggaauaugcuggagaccaucaagguuacaccacagacuauggacggaauauugaaaagcauccucaaggugaaaaagucgcugggcauguucguaucugauacccccggugaaagaaacccuuaugagaacauuuuauacaagaucugucuguccggggacggauggccauauauugcaucaaggacaaguaucgugggccgggccugggaaaauaccacggucgaucuagagagcgacggcaaaccccagaagauggggacugcuggauccaacaaaucucuccagagcgccgguuuuccuacaggccugaccuacucacaacuuaugacuuugaaggauaguaugaugcagcuggacccauccgcaaaaacauggauagauauugaggggcguccggaagaccccguggagaucgcucucuaccagccuaugagcggaugcuauauucacuucuuucgcgaaccaaccgaccugaagcaguucaagcaagaugccaaauacucucauggcaucgacguugcggaucuuuuucccgcccagccuggucugacgucagcagugaucgaggcuuugccaagaaauaugguccucaccugucaggggagugacgauauuaagaaacuguuagacagccagggcaggcgggauauaaagcugaucgacauugcccuauccaaagcugauucucgacgcuucgaaaacgccgugugggaccaaugcaaggaucucugucacaugcauacaggaguaguuguggagaagaaaaagagaggcgggaaagaggaaaucacuccccacugcgcacugauggacuguauaauguaugaugccgcugucucgggaggucuuaauauuccgguguugagggcgguccugccucgggacaugguguuucgcaccagcaaccccaagguugugcucuga

SEQ ID NO: 8637 - RNA, 1710 nt, Artificial Sequence
  derived and/or modified CDS sequence (opt3) from LASV(Lassa virus/H.sapiens-wt/NGA/2016/ISTH_1472;Clade II)__AVO03606__NP
augagcgccuccaaggaggugaaaucuuuccuguggacccagucacucagaagggaacuuaguggcuacugcagcaacaucaagcugcaagucguuaaagacgcucaggcauuguuacacgggcuggauuuuuccgaggugucuaauguacagcggcuaaugcgcaagcagaaacgagacgauucggaccucaagcgucugagagaucuuaaccaagccgugaauaaccuggucgaauugaagucaacacagcagaaaagcauucucagggugggaacucugacgagugacgaucugcucaccuuagcggcugaccuggagaaacuuaaguccaagguuauacggacagaacgccccuugucuagcgguguguauaugggcaaucuguccacucagcaacuagagcagagaagggcccuccugaacaugaucgggauggucggaggcauucaggguacccagccugggcgggauggagugguacgcguuugggacgugaaaaauccagaucuucugaacaaucaauucggcacaaugccgucauugacccucgcaugucugacuaagcagggccaggucgacuuaaacgauacagugcaagcccugaccgaccucgggcuuaucuacacggcuaaguaucccaauaguagcgaccuggaucgauugucucagucccauccuauucuaaacaugguggacacuaaaaagucaagccugaauaucaguggauacaacuuuucucucggugcagccgucaaagcuggcgccugcaugcuggaugggggaaauaugcuugagaccauaaagguuacaccacagacuauggacggcauccugaaauccauuuugaaggugaaaaagagccucgguauguucguaucggauacccccggggaaagaaacccuuaugagaacauccuguacaagauuuguuuaucuggagacggcuggccauauaucgcguccaggacaucaauagugggccgggcaugggaaaauaccacggucgaucuggagagugacgggaaaccccagaaggugggaacugccgguagcaacaaaucccuacaaucugcuggcuuuccuacagggcucaccuacagccagcugaugacucuuaaggauucaaugaugcaguuggacccaagugccaaaacauggauugauaucgagggacguccggaagaccccguugagauugcacuguaccagccuauguccggcugcuauauccacuucuuucgcgaaccaaccgaccucaagcaauucaagcaggaugcuaaauacagccaugguaucgacguggccgaucuguuucccgcgcagccugggcuuacgucugccgucauugaggcacugccaagaaauaugguguugaccugucagggcucagacgauauaaagaggcuccuggacagucaaggacggcgagauaucaaauuaauugacaucagccuguccaagacagauucucgcagauucgaaaacgcuguaugggaccagugcaaagaucuaugucacaugcauacuggcguuguggucgagaagaagaaaaggggagggaaggaggaaauaacaccccacugcgcccucauggacuguauuauguaugaugcugccgugucggguggccugaauaucccgguccuucgggcaguguugccucgcgacaugguuuuuagaaccagcucccccaaagugguacuguga

SEQ ID NO: 8638 - RNA, 1710 nt, Artificial Sequence
  derived and/or modified CDS sequence (opt3) from LASV(Lassa virus/H.sapiens-wt/NGA/2016/ISTH_1474;Clade II)__AVO03614__NP
augagcgccuccaaggaggugaaaucuuuccuguggacccagucacucagaagggaacuuaguggcuacugcagcaacaucaagcugcaagucguuaaagacgcucaggcauuguuacacgggcuggauuuuuccgaggugucuaauguacagcggcuaaugcgcaagcagaaacgagacgauucggaccucaagcgucugagagaucuuaaccaagccgugaauaaccuggucgaauugaagucaacacagcagaaaagcauucucagggugggaacucugacgagugacgaucugcucaccuuagcggcugaccuggagaaacuuaaguccaagguuauacggacagaacgccccuugucuagcgguguguauaugggcaaucuguccacucagcaacuagagcagagaagggcccuccugaacaugaucgggauggucggaggcauucaggguacccagccugggcgggauggagugguacgcguuugggacgugaaaaauccagaucuucugaacaaucaauucggcacaaugccgucauugacccucgcaugucugacuaagcagggccaggucgacuuaaacgauacagugcaagcccugaccgaccucgggcuuaucuacacggcuaaguaucccaauaguagcgaccuggaucgauugucucagucccauccuauucuaaacaugguggacacuaaaaagucaagccugaauaucaguggauacaacuuuucucucggugcagccgucaaagcuggcgccugcaugcuggaugggggaaauaugcuugagaccauaaagguuacaccacagacuauggacggcauccugaaauccauuuugaaggugaaaagaagccucgguauguucguaucggauacccccggggaaaggaacccuuaugagaacauccuguacaagauuuguuuaucuggagacggcuggccauauaucgcgucccggacaucaauagugggccgugcaugggaaaauaccacggucgaucuggagagugacgggaagccccagaaagugggaacugccgguagcaacaagucccuacaaucugcuggcuuuccuacagggcucaccuacagccagcugaugacucuuaaagauucaaugaugcaguuggacccaagugccaagacauggauugauaucgagggacgcccggaagaccccguugagauugcacuguaccagccuauguccggcugcuauauccacuucuuuagagaaccaaccgaccucaaacaauucaagcaggaugcuaaguacagccaugguaucgacguggccgaucuguuucccgcgcagccugggcuuacgucugccgucauugaggcacugccaaggaauaugguguugaccugucagggcucagacgauauaaaacggcuccuggacagucaaggacgacgcgauaucaaguuaauugacaucgcucugagcaaagccgauuccagaagguucgaaaacgcuguaugggaccagugcaaggaucuaugucacaugcauacaggcguuguggucgagaaaaagaagcgcgggggaaaagaggaaauaacuccccacugcgcccucauggacuguauuauguaugaugcagccgugucugguggccugaauaucccgguccuucgggcuguguugccuagagacaugguuuuuaggaccucgagccccaaggugguacuguga

SEQ ID NO: 8639 - RNA, 1710 nt, Artificial Sequence
  derived and/or modified CDS sequence (opt3) from LASV(Lassa virus/H.sapiens-wt/NGA/2016/ISTH_1496;Clade II)__AVO03580__NP
augagcgccuccaaggaggugaaaucuuuccuguggacccagucacucagaagggaacuuaguggcuacugcagcaacaucaagcugcaagucguuaaagacgcucaggcauuguuacacgggcuggauuuuuccgaggugucuaauguacagcggcuaaugcgcaagcagaaacgagacgauucggaccucaagcgucugagagaucuuaaccaagccgugaauaaccuggucgaauugaagucaacacagcagaaaagcauucucaaggugggaacucugacgagugacgaucugcucaccuuagcggcugaccuggagaaacuuaaguccaaaguuauaaggacagaacggcccuugucuagcgguguguauaugggcaaucuguccacucagcaacuagagcagcgcagagcccuccugaacaugaucgggauggucggaggcgcacaggguacccagccugggagggauggagugguacggguuugggacgugaagaauccagaucuucugaacaaucaauucggcacaaugccgucauugacccucgccugucugacuaagcagggccaggucgacuuaaacgaugcugugcuggcacucacagaccuugggcugauuuacaccgccaaauaucccaauaguagcgacuuggaucgccuaucucaaucccauccuauccugaacaugguggacacgaagaaaucaagccucaauauuaguggauacaacuuuucucugggugcugccgucaaggcgggcgcaugcaugcuugaugggggaaauaugcuggagacuaucaaaguuaccccacagacaauggacggcauauugaaguccauccucaaagugaagcgaagccuggguauguucguaucggauacucccggggaaagaaacccuuaugagaacauuuuauacaagaucugucugucuggagacggcuggccauauauugccuccaggaccucaaucgugggccgggcuugggaaaauacaaccgucgaucuagagagugacgggaaaccccagaaggugggaacgauagguagcaacaaaucccuccagucugccggcuuuccuacugggcugacauacagccaacuuaugaccuugaaggauucaaugaugcagcuggacccaagugcaaaaacuuggauugauaucgagggacguccggaagaccccguugagauugcucucuaccagccuauguccggcugcuauauccacuucuuucgcgaaccaacagaccugaagcaguucaagcaagaugccaaauacagccaugguaucgacguggcggaucuuuuucccgcccagccugggcugaccucugcagucauugaggcuuugccaagaaauauggugcucacgugucagggcucagacgauauaaagaggcuguuagacagucagggacggcgagauaucaaacugauugacaucgcccuaagcaaggcugauucccgcagauucgaaaacgccguaugggaccaaugcaaagaucucugucacaugcauaccggcguuguggucgagaagaagaaaaggggagggaaggaggaaauaacaccccacugcgcacugauggacuguauuauguaugaugccgcugugucugguggccuuaauaucccggucuugcgggcggugcugccucgcgacaugguuuuuagaacuucgagccccaaagugguacucuga

SEQ ID NO: 8640 - RNA, 1710 nt, Artificial Sequence
  derived and/or modified CDS sequence (opt3) from LASV(Lassa virus/H.sapiens-wt/NGA/2016/ISTH_1541;Clade II)__AVO03554__NP
augagcgccuccaaggaggugaaaucuuuccuguggacccagucacucagaagggaacuuaguggcuacugcagcaacaucaagcugcaagucguuaaagacgcucaggcauuguuacacgggcuggauuuuuccgaggugucuaauguacagcggcuaaugcgcaagcagaaacgagacgauggagaccucaagcgucugagagaucuuaaccaagccgugaauaaccuggucgaauugaagucgacacagcagaaaucaauucucaggguggguacucugagcagugacgaucugcucauauuagcggcugaccuggagaaacuuaaauccaagguuauccggacggaacgccccuugucuagcggcguguauauggggaaucuguccucacagcaacuagaucagagaagggcccuccugaacaugauuggaaugaccggcgguaaucagggggcaaguacaggacgggacggcaucguccgcgugugggauguaaagaacgccgagcuucugaauaaccaguucggcacuaugccuagcuugacccucgcuugucugacaaagcaagggcagguugacuuaaaugaugcagugcaggcccugaccgaccucggacuuauuuacacugcuaaguauccaaacucuuccgaccuggaucgauugucacaaagccauccgauccuaaauaugauagacaccaaaaagaguucucugaacaucuccgguuacaauuuuagccucggcgccgcggucaaagcaggggccugcaugcuggauggaggcaacaugcuugagaccauuaaggugucgccccagacgauggacgguauccugaaaucuauuuugaaggugaaaaagucccucgggauguucgucucagauacuccuggagaaagaaacccauaugagaauauccuguacaagauauguuuaaguggcgacggcuggcccuauauugcuagcaggaccuccaucauugggcgggccugggaaaacacaaucguugaucuggaggcagacaauaaaccucagaagucuggaaacaaugguagcaaccguucacuacagagugcuggcuuuccauccgggcucacuuacagccaacugaugacccuuaaagauucuauguugcagcuggaccccaaugccaagacauggauggauaucgagggacgcccugacgacccaguggaaauugcgcucuaccagccgucaaguggcugcuauauacacuucuuuagagagcccaccgaucugaaacaguucaagcaagacgccaaguacagccaugguaucgauguauccgaccuuuuugcagcucagccugggcugacgucugccgugauugaggcuuugccaaggaacauggucaucacuugucagggcucggaagauauuaaaaagcuccuggaaagccagggacggaaagacauaaaguuaguggauaucucccugucaaaacuagacagucgaaaguucgagaauguugugugggaucaauauaaggaccucugccacaugcauacaggcaucgucguggagaaaaagaaacgcgggggaaaggaagagauuacaccccacugugcccugauggauugcaucauguuugacgcagccguaauggguggccuugaugcuagaguuuugagggcggugcugccucgggacauggucuuccgcacuucuacaccaaaagugguccucuga

SEQ ID NO: 8641 - RNA, 1710 nt, Artificial Sequence
  derived and/or modified CDS sequence (opt3) from LASV(Lassa virus/H.sapiens-wt/NGA/2016/ISTH_1546;Clade II)__AVO03538__NP
augagcgccuccaaggaggugaaaucuuuccuguggacccagucacucagaagggaacuuaguggcuacugcagcaacaucaagcugcaagucguuaaagacgcucaggcauuguuacacgggcuggauuuuuccgaggugucuaauguacagcggcuaaugcgcaagcagaaacgagacgauggagaccucaagcgucugagagaucuuaaccaagccgugaauaaccuggucgaauugaagucgacacagcagaaaucagugcucaggguugguacucugagcagugacgaucugcucauuuuagcggcugaccuggagaaacuuaaauccaaggugauacggacggaacgccccuugucuagcggcgucuauauggggaaucuguccucacagcaacuagaucagagaagggcccuccugaacaugaucggaaugaccggcgguaaucaggggacaaacgcaggacgggacggcauugugcgcaucugggauguaaagaaugccgagcuucugaacaaucaguucggcacuaugccuaguuugacccucgcuugucugacaaagcaagggcagguugacuuaaacgaugugguccaggcacugaccgaccucggacuuauuuacacugccaaguauccaaauagcucugaccuggaucgauugucccaaucacauccgauccuaaacaugauagacacuaaaaagagcagucugaauaucucugguuacaacuuuucccucggcgcugccgugaaagcgggggcaugcaugcuggauggaggcaacaugcuugagaccauuaaggugagcccccagacgauggacgguauccugaaaucgauuuugaaggucaaaagaucucucgggauguucguuuccgauacuccuggagaaaggaauccauaugagaacauccuguacaagauauguuuaucaggcgacggcuggcccuauauugccagucggaccagcaucauugggcgugcuugggaaaauacaaucguggaucuggagacuaacaauaagccucagaaaccaggaaacaaugguuccaaccgcucucuacagagcgccggcuuucccgcagggcucaccuacucacaacugaugacacuuaaggacaguauguugcagcuggauccuaaugcuaaaaccuggauggacaucgagggaagaccagaugacccgguagaaauugcccucuaccagcccuccagcggcugcuauauacacuucuuuagggagccuacggaccugaagcaguucaaacaagaugcgaaguacucucaugguaucgaccuuucagaucuguuugccgcacagccaggguugacaagugcugugauugaagcccucccccggaacauggucaucacaugucagggcagcgaggacauaaugaagcuguuagaaucccagggacgaaaagauauuaagcugguggacaucucucuaucgaaaagcgauucccgcaaguucgagaaugcuguuugggaccaauauaaagaucucugccacaugcauaccggcaucguggucgagaagaagaaaaagggagggaaagaagagauuacuccucacugugcccugauggacugcaucauguuugaugcagccgugauggguggccuugacgcuaagguauugagagcgguucugccaaaagauaugguguucaggacaucaacccccaaggucgugcucuga

SEQ ID NO: 8642 - RNA, 1710 nt, Artificial Sequence
  derived and/or modified CDS sequence (opt3) from LASV(Lassa virus/H.sapiens-wt/NGA/2016/ISTH_1568;Clade II)__AVO03562__NP
augagcgccuccaaggaggugaaaucuuuccuguggacccagucacucagaagggaacuuaguggcuacugcagcuccaucaagcugcaagucguuaaagacgcucaggcauuguuacacgggcuggauuuuucugaggugucgaacguacagcggcuaaugcgcaagcagaaacgagacgauucagaccucaagcgucugagagaucuuaaucaagccgugaacaaucuggucgaacuuaagagcacacagcagaaaaguauucucagggugggaacucugacguccgacgaucugcucaccuuagcggcugaccuggagaaguugaaaucuaagguuauacggacagaacgccccuugagcuccgguguguauaugggcaaccugucaagucagcaacuagagcagagaagggcccuccugaauaugaucgggauggucggaggcgcacaggguacucagccugggcgggauggagugguacgcguuugggacgugaaaaacccagaucuucugaauaaccaauucggcaccaugccgagcuugacacucgccugucugaccaagcagggccaggucgacuuaaaugaugcugugcuggcacucacugaccuugggcugauuuacacagccaaguaucccaacucuuccgacuuggaucgacuaucacaaagccauccuauccugaauaugguggacaccaaaaagaguucucucaacauuuccggauacaauuuuagccugggugcugccgucaaagcgggcgcaugcaugcuugaugggggaaacaugcuggagacgaucaagguuacuccacagaccauggacggcauauugaaaucgauccucaaggugaaaagaucucuggguauguucguauccgauacacccggggaaaggaauccuuaugagaacauuuuauacaagaucugucugucaggagacggcuggccauauauugccagucggacuagcaucgugggccgugcuugggaaaacaccacagucgaucuagaguccgacgggaagccccagaaagugggaccugccgguucuaauaagagccuccagucagcaggcuuuccaaccgggcugacguacagucaacuuaugacuuugaaagauuccaugaugcagcuggacccgagcgcuaagacauggauagauauugagggacgccccgaagacccuguugagaucgcccucuaccagccaauuucuggcugcuauauccacuucuuuagagaacccaccgaccugaaacaguucaagcaagaugcgaaguacucacaugguaucgacguggccgaucuuuuuccugcacagccagggcugacaagugcugucauugaggccuugcccaggaacauggugcucacuugucagggcagcgacgauauaaaacggcuguuagacucccagggacgacgcgauaucaagcugauugacaucgcucuaucuaaagccgauucgagaagguucgaaaaugcaguaugggaccaaugcaaggaucucugucacaugcauaccggcguuguggucgagaaaaagaagcgcgggggaaaagaggaaauaacgccgcacugcgcccugauggacuguauuauguaugaugcugcggugagcgguggccuuaacaucccugucuugcgggcagugcugcccagagacaugguuuuuaggaccuccucaccaaaggugguacucuga

SEQ ID NO: 8643 - RNA, 1710 nt, Artificial Sequence
  derived and/or modified CDS sequence (opt3) from LASV(Lassa virus/H.sapiens-wt/NGA/2016/ISTH_1591;Clade II)__AVO03648__NP
augagcgccuccaaggaggugaaaucuuuccuguggacccagucacucagaagggaacuuaguggcuacugcagcuccaucaagcugcaagucguuaaagacgcucaggcauuguuacacgggcuggauuuuucugaggugucgaacguacagcggcuaaugcgcaagcagaaacgagacgauucagaccucaagcgucugagagaucuuaaucaagccgugaacaaucuggucgaacuuaagagcacacagcagaaaaguauucucagggugggaacucugacguccgacgaucugcucaccuuagcggcugaccuggagaaguugaaaucuaagguuauacggacagaacgccccuugagcuccgguguguauaugggcaaccugucaagucagcaacuagagcagagaagggcccuccugaauaugaucgggauggucggaggcgcacaggguacucagccugggcgggauggagugguacgcguuugggacgugaaaaacccagaucuucugaauaaccaauucggcaccaugccgagcuugacacucgccugucugaccaagcagggccaggucgacuuaaaugaugcugugcuggcacucacugaccuugggcugauuuacacagccaaguaucccaacucuuccgacuuggaucgacuaucacaaagccauccuauccugaauaugguggacaccaaaaagaguucucucaacauuuccggauacaauuuuagccugggugcugccgucaaagcgggcgcaugcaugcuugaugggggaaacaugcuggagacgaucaagguuacuccacagaccauggacggcauauugaaaucgauccucaaggugaaaagaucucuggguauguucguauccgauacacccggggaaaggaauccuuaugagaacauuuuauacaagaucugucugucaggagacggcuggccauauauugccagucggacuagcaucgugggccgugcuugggaaaacaccacagucgaucuagaguccgacgggaagccccagaaagugggaucugccgguagcaauaagucacuccagagugcaggcuuuccuaccgggcugacguacucccaacuuaugacuuugaaagauagcaugaugcagcuggacccaucugcuaagacauggauagauauugagggacgcccggaagaccccguugagaucgcccucuaccagccuaugucaggcugcuauauucacuucuuuagagaaccaaccgaccugaaacaguucaagcaagaugcgaaguacagucaugguaucgacguggccgaucuuuuucccgcacagccugggcugacuagcgcugucaucgaggccuugccaaggaacauggugcucacaugucagggcuccgacgauguaaaacggcuguuagacucucagggacgacgcgauauuaagcugauagacaucgcucuaucgaaagccgauagcagaagguucgaaaaugcaguuugggaccaaugcaaggaucucugucacaugcauaccggcguggucguggagaaaaagaagcgcgggggaaaagaggaaauuacgccccacugcgcccugauggacuguaucauguaugaugcugcggucuccgguggccuuaacauaccgguguugcgggcaguucugccuagagacaugguguuuaggaccucaagucccaagguaguccucuga

SEQ ID NO: 8644 - RNA, 1710 nt, Artificial Sequence
  derived and/or modified CDS sequence (opt3) from LASV(Lassa virus/H.sapiens-wt/NGA/2016/ISTH_1604;Clade II)__AVO03542__NP
augagcgccuccaaggaggugaaaucuuuccuguggacccagucacucagaagggaacuuaguggcuacugcagcaacaucaagcugcaagucguuaaagacgcucaggcauuguuacacgggcuggauuuuuccgaggugucuaauguacagcggcuaaugcgcaagcagaaacgagacgauggagaccucaagcgucugagagaucuuaaccaagccgugaauaaccuggucgaauugaagucgacacagcagaaaucaauucucaggguggguacucugagcagugacgaucugcucacguuagcggcugaccuggagaaacuuaaguccaagguuauacggaccgaacgccccuugucuagcggcguguauauggggaaucuguccacacagcaacuagaucagagaagggcccuccugaacaugaucggaauggucggcgguucacaggggacuagcgcaggacgggacggcauugugcgcguaugggauguucgaaauccugagcuucugaacaaucaguucggcaccaugccgagcuugacacucgccugucugaccaaacaaggacagguggacuuaaacgaugcuguccaggcacugacugaccucgggcuuaucuacacagccaaguauccaaauucuuccgaccuggauagauugucacaaagccaucccauucuaaacaugaucgacaccaagaaaaguucuauaaauaucuccgguuacaacuuuagccugggcgcugccgugaaggcgggggcaugcaugcucgauggaggcaauaugcuggagacgauuaaagugucgccucagucuauggacgguauccuuaaguccauucugaaagucaagaggucauuggggauguucguuagugauacuccaggagaacggaaccccuaugagaacauccucuacaaaauaugucugagcggcgacggcuggccuuauauugccucccguaccucuaucacagggcgcgcuugggaaaauacugugguagauuuagagagcgacaacaagccaaagaaacccggaaauaacgagucaaauagaagucugcaguccgccgguuuuccugcaggccuaaccuacagccagcucaugacacugaaggauucuaugcuucaauuggacccaaacgcuaaaaccuggauggauauugaagggaggccggacgaccccguggagaucgcccuguaccagccuaauucaggaugcuauauccacuucuuucgggaaccaacggaucucaagcaguucaaacaggacgcgaaguacagucauggcauugauauaagcgaccuguuugccgcacaacccggucuuacuuccgcugucaucgaggcccugccucgaaacauggugauuacaugucaggggucugaagauguuaagaaauugcucgagucgcagggccgcaaggacaucagacugguggauauaaguuuauccaaagcugacucaaggaaguucgagaaugccgucugggaucaguauaaagaccugugccacaugcauaccggaauugugguagaaaagaagaaaaagggcgggaaagaggaaaucacuccacacugugcacuaauggauugcaucauguuugacgccgcuguuaugaacggacucgaugcgcgggugcugcgcgcaguccuucccagagacaugguguucaggacaaguaccccgcgugucguguuguga

SEQ ID NO: 8645 - RNA, 1710 nt, Artificial Sequence
  derived and/or modified CDS sequence (opt3) from LASV(Lassa virus/H.sapiens-wt/NGA/2016/ISTH_1609;Clade II)__AVO03662__NP
augagcgccuccaaggaggugaaaucuuuccuguggacccagucacucagaagggaacuuaguggcuacugcagcaacaucaagcugcaagucguuaaagacgcucaggcauuguuacacgggcuggauuuuuccgaggugucuaauguacagcggcuaaugcgcaagcagaaacgagacgauggagaccucaagcgucugagagaucuuaaccaagccgugaauaaccuggucgaauugaagucgacacagcagaaaucaauucucaggguggguacucugagcagugacgaucugcucauauuagcggcugaccuggagaaacuuaaauccaagguuauccggacggaacgccccuugucuagcggcguguauauggggaaucuguccucacagcaacuagaucagagaagggcccuccugaacaugauuggaaugaccggcgguaaucaggggacaaacacuggacgggacggcaucguccgcgugugggauguaaagaaugcagagcuucugaacaaucaguucggcaccaugccuaguuugacacucgccugucugaccaagcaagggcagguugacuuaaacgaugcugugcaggcacugacugaccucggacuuauuuacacagccaaguauccaaauagcucugaccuggaucgauugucccaaucacauccgauccuaaacaugauagacaccaaaaagagcagucugaauaucucugguuacaacuuuucccucggcgcugccgucaaagcgggggcaugcaugcuggauggaggcaacaugcuugagacgauuaaggugagcccccagacuauggacgguauccugaaaucgauuuugaaggugaaaaagucucucgggauguucgucuccgauaccccuggagaaagaaauccauaugagaacauccuguacaagauauguuuaucaggcgacggcuggcccuauauugccaguaggacaagcaucacugggcgggcuugggaaaauaccaugguugaucuggagacaaacaauaaaucccagaagccuggaaacaaugguucuaaccguagccuacagucagccggcuuuccagcagggcucaccuacagucaacugaugacgcuuaaagacuccauguugcagcuggaucccaaugcuaagacuuggauggacauugagggacgcccugaugacccaguggaaaucgcccucuaccagccgagcucuggcugcuauauccacuucuuuagagagcccacagaccugaaacaguucaagcaagaugcgaaguacucacaugguauugacauaagugaucuuuuugccgcacagccugggcugaccagcgcuguaaucgaaguguugccaaggaacaugacuauuacaugucagggcuccgaggacaucaaaaagcuccuggaaucucagggacggaaagauauaaaguuagucgacauuucgcugagcaaacuagauucccgaaaguucgagaaugccgugugggaccaauuuaaggaucucugccacaugcauaccggcaucguuguggagaaaaagaaaaagggagggaaagaagagaucacgccccacugugcucugauggacugcauuauguucgaugccgcagucauggguggccuugacgccaagguguugcgcgcuguacugccuagagauaugguuuuuaggaccucaacaccaaaggugguccucuga

SEQ ID NO: 8646 - RNA, 1710 nt, Artificial Sequence
  derived and/or modified CDS sequence (opt3) from LASV(Lassa virus/H.sapiens-wt/NGA/2016/ISTH_1610;Clade II)__AVO03604__NP
augagcgccuccaaggagaucaaaucuuuccuguggacccagucacucagaagggaacuuaguggcuacugcagcuccauuaagcugcaaguggucaaagacgcucaggcauuguuacacgggcuggauuuuucugagguuucgaacgugcagcggcuaaugcgcaagcagaaacgagacgauucagaccucaagcgucugagagaucuuaaucaagccguaaacaaucugguggaacucaagagcacacagcagaaaaguauauugagggucggaacucugacguccgacgaucugcucaccuuagcggcugaccuggagaaacuuaaaucuaaggugauccggacagaacgccccuugagcuccgguguuuauaugggcaaccugucaacucagcaacuagagcagagaagggcccuccugaauaugauugggauggugggaggcgcacaggguacccagccugggcgggauggagucgugcgcguaugggacguuaaaaacccagaucuucugaauaaccaauucggcacaaugccgaguuugacccucgccugucugacuaagcagggccagguggacuuaaaugaugcuguccuggcacucacagaccuugggcugaucuacaccgccaaguaucccaacagcucugacuuggaucgacuaucccaaucacauccuauucugaauaugguggacacgaaaaagagcagucucaacaucucuggauacaauuuuucccugggugcugccgugaaagcgggcgcaugcaugcuugaugggggaaacaugcuggagacuauaaaggucaccccacagacaauggacggcaucuugaaaagcauucucaagguuaaaagaucgcuggguauguucgugucugauacucccggggaaaggaauccuuaugagaacaucuuauacaagauuugucuguccggagacggcuggccauauaucgccucacggaccaguauaguaggccgugcuugggaaaacacaaccguggaucuagagagcgacgggaagccccagaaagucggaacggccgguuccaauaagucucuccagagcgcaggcuuuccuacugggcugacauacucacaacuuaugaccuugaaagauaguaugaugcagcuggacccauccgcuaagacuuggauugauaucgagggacgcccggaagaccccguggagauugcccucuaccagccuaugagcggcugcuauauccacuucuuuagagaaccaacagaccugaaacaguucaagcaagaugcgaaguacucucaugguaucgacguugccgaucuuuuucccgcacagccugggcugaccucagcugugauugaggccuugccaaggaacaugguccucacgugucagggcagugacgauauaaagaagcuguuagacagccagggacggcgagauaucaaacugauugacaucgcucuauccaagaccgauucucgcagauucgaaaaugccgugugggaccaaugcaaagaucucugucacaugcauacaggcguaguuguggagaagaagaaaaggggagggaaggaggaaauaacuccccacugcgcacugauggacuguauuauguaugaugccgcugucucggguggccuuaacaucccgguguugcgggcgguccugccucgcgacaugguguuuagaaccagcucccccaaaguugugcucuga

SEQ ID NO: 8647 - RNA, 1710 nt, Artificial Sequence
  derived and/or modified CDS sequence (opt3) from LASV(Lassa virus/H.sapiens-wt/NGA/2018/ISTH_0541;Clade II)__AVV65114__NP
augagcgccuccaaggaggugaaaucuuuccuguggacccagucacucagaagggaacuuaguggcuacugcagcuccaucaagcugcaagucguuaaagacgcucaggcauuguuacacgggcuggauuuuucugaggugucgaacguacagcggcuaaugcgcaagcagaaacgagacgauucagaccucaagcgucugagagaucuuaaucaagccgugaacaaucuggucgaacuuaagagcacacagcagaaaaguauucucagggugggaacucugacguccgacgaucugcucaccuuagcggcugaccuggagaaguugaaaucuaagguuauacggacagaacgccccuugagcuccgguguguauaugggcaaccugucaacucagcaacuagagcagagaagggcccuccugaauaugaucgggauggucggaggcgcacaggguacccagccugggcgggauggagugguacgcguuugggacgugaaaaacccagaucuucugaauaaccaauucggcacaaugccgaguuugacccucgccugucugacuaagcagggccaggucgacuuaaaugaugcugugcuggcacucacagaccuugggcugauuuacaccgccaaguaucccaacagcucugacuuggaucgacuaucccaaucacauccuauccugaauaugguggacacgaaaaagagcagucucaacauuucuggauacaauuuuucccugggugcugccgucaaagcgggcgcaugcaugcuugaugggggaaacaugcuggagacuaucaagguuaccccacagacaauggacggcauauugaaaagcauccucaaggugaaaagaucgcuggguauguucguaucugauacucccggggaaaggaauccuuaugagaacauuuuauacaagaucugucuguccggagacggcuggccauauauugccucacggaccaguaucgugggccgugcuugggaaaacacaaccgucgaucuagagagcgacgggaagccccagaaagugggaguugccgguuccaauaagucucuccagagcgcaggcuuuccuacggggcugacuuacucacaacuuaugacauugaaagauaguaugaugcagcuggacccauccgcuaagaccuggauagauauugagggacgcccggaagaccccguggagaucgcccucuaccagccuaugagcggcugcuauauucacuucuuuagagaaccaacugaccugaaacaguucaagcaagaugcgaaguuuucucaugguaucgacgucgccgaucuuuuccccgcacagccugggcugacaucagcugugaucgaggccuugccaaggaacaugguacucaccugucagggcagugacgauauuaaacggcuguuagacagccagggacgacgcgauauaaagcugaucgacauugcucuauccaaagccgauucuagaagguuugaaaaugcaguuugggaccaaugcaaggaucucugucacaugcauacgggcguggucguggagaaaaagaagcgcgggggaaaagaggaaaucacaccccacugcgcccugauggacuguauaauguacgaugcugcggucucggguggccuuaacauuccgguguugcgggcaguucugccuagagacaugguguucaggaccagcucccccaagguaguccucuga

SEQ ID NO: 8648 - RNA, 1710 nt, Artificial Sequence
  derived and/or modified CDS sequence (opt3) from LASV(Lassa virus/H.sapiens-wt/NGA/2018/ISTH_0664;Clade II)__AVV65096__NP
augagcgccuccaaggaggugaaaucuuuccuguggacccagucacucagaagggaacuuaguggcuacugcagcuccaucaagcugcaagucguuaaagacgcucaggcauuguuacacgggcuggauuuuucugaggugucgaacguacagcggcuaaugcgcaagcagaaacgagacgauucagaccucaagcgucugagagaucuuaaucaagccgugaacaaucuggucgaacuuaagagcacacagcagaaaaguauucucagggugggaacucugacguccgacgaucugcucaccuuagcggcugaccuggagaaguugaaaucuaagguuauacggacagaacgccccuugagcuccgguguguauaugggcaaccugucaacucagcaacuagagcagagaagggcccuccugaauaugaucgggauggucggaggcacccaggguacacagccugggcgggauggagugguacgcguuugggacgugaaaaacccagaucuucugaauaaccaauucggcaccaugccgaguuugacucucgcaugucugacaaagcagggccaggucgacuuaaaugaugccgugcuggcucucaccgaccuugggcugauuuacacggcaaaguaucccaacagcucugacuuggaucgacuaucccaaucacauccuauccugaauaugguggacacuaaaaagagcagucucaacauuucuggauacaauuuuucccugggugccgcugucaaagccggcgcgugcaugcuugaugggggaaacaugcuggagaccaucaagguuacaccacagacuauggacggcauauugaaaagcauccucaaggugaaaaagucgcuggguauguucguaucugauacccccggggaaagaaauccuuaugagaacauuuuauacaagaucugucuguccggagacggcuggccauauauugcaucaaggacaaguaucgugggccgggccugggaaaacaccacggucgaucuagagcccgacgggaaacuccagaaggugggaacuguugguagcaauaaaucccugcagucugcuggcuuuccuacagggcuuaccuacagccaauugaugacucugaaggauucaaugaugcagcucgacccaagugccaaaacauggauagauauugagggacguccggaagaccccguggagaucgcacuguaccagccuauguccggcugcuauauucacuucuuucgcgaaccaaccgaccuuaagcaguucaagcaagaugcuaaauacagccaugguaucgacgucgccgaucuguuucccgcgcagccuggguugacgucugccgugaucgaggcacucccaagaaacaugguacugaccugucagggcucagacgauauuaagagguuacuggacagucagggacggcgagauauaaaacuaaucgacauuagccucuccaaggcugauucucgcagauucgaaaaugccguuugggaccaaugcaaagaucugugucacaugcauacaggcguggucguggagaagaagaaaaggggagggaaggaggaaaucacuccccacugcgcucuuauggacuguauaauguaugaugccgcagucucggguggcuugaacauuccggugcugcgggccguucucccucgcgacaugguguuuagaaccagcucccccaaaguaguccuguga

SEQ ID NO: 8649 - RNA, 1710 nt, Artificial Sequence
  derived and/or modified CDS sequence (opt3) from LASV(Lassa virus/H.sapiens-wt/NGA/2018/ISTH_0959;Clade II)__AVV65100__NP
augagcgccuccaaggaggugaaaucuuuccuguggacccagucacucagaagggaacuuaguggcuacugcagcaacaucaagcugcaagucguuaaagacgcucaggcauuguuacacgggcuggauuuuuccgaggugucuaauguacagcggcuaaugcgcaagcagaaacgagacgauucggaccucaagcgucugagagaucuuaaccaagccgugaauaaccuggucgaauugaagucaacacagcagaaaagcauucucagggugggaacucugacgagugacgaucugcucaccuuagcggcugaccuggagaaacuuaaguccaagguuauacggacagaacgccccuugucuagcgguguguauaugggcaaucuguccacucagcaacuagagcagagaagggcccuccugaaccuuaucgggauggucggaggcgcacaggguacccagccugggcgggauggagugguacgcguuugggacgugaaaaauccagaucuguugaacaaucaauucggcacaaugccgucacucacccuggccuguuuaacuaagcagggccaggucgaccugaacgauguggugcucgcucuuacagaccugggguugauuuacaccgcaaaguaucccaauaguagcgaccuagaucgacugucucaaucccauccuauccucaacauggucgacacgaaaaagucaagccugaauauuaguggauuuaacuucucucuuggugccgcuguuaaagccggcgcgugcaugcuggaugggggaaauauguuggagacuaucaaggugaccccacagacaauggacggcauacucaaauccauccugaaggugaaaaagagcuuagguauguuuguaucggauacucccggggaaagaaacccuuacgagaacauucuguauaagaucugucuaucuggagacggcuggccauacauugcauccaggaccucaaucgucggccgggccugggaaaauacaaccguggaucucgagagugacgggaaaccccacaagguuggaacggcugguagcaacaaaucccugcagucugccggcuucccuacugggcuuacauauagccaguugaugacccugaaggauucaaugaugcaacucgacccaagugcaaaaacuuggauagauauugagggacguccggaagaccccguggagaucgcucuguaccagccuauguccggcugcuacauucacuuuuuccgcgaaccaacagaccuuaagcaguuuaagcaggaugccaaauauagccaugguaucgacgucgcggaucuguuccccgcccaaccuggguugaccucugcagugaucgaggcucucccaagaaauaugguacugacgugucagggcucagacgauauuaagagguuacuggacagucagggacggaaagauauaaagcuaaucgacauugcccucagcaaaaccgauucccgacgcuuugaaaacgcuguuugggaccagugcaaggaucugugucauaugcacacaggcguggucguggagaagaaaaagagagggggaaaagaggaaaucacuccccacugcgcccuuauggacuguauaauguacgaugcagccgucucugguggcuugaauauuccggugcugagggcuguucucccucgggacaugguguuccgcaccucgagccccaagguaguccuguga

SEQ ID NO: 8650 - RNA, 1710 nt, Artificial Sequence
  derived and/or modified CDS sequence (opt3) from LASV(Lassa virus/H.sapiens-wt/NGA/2018/ISTH_1024;Clade II)__AVV65106__NP
augagcgccuccaaggaggugaaaucuuuccuguggacccagucacucagaagggaacuuaguggcuacugcagcuccaucaagcugcaagucguuaaagacgcucaggcauuguuacacgggcuggauuuuucugaggugucgaacguacagcggcuaaugcgcaagcagaaacgagacgauucagaccucaagcgucugagagaucuuaaucaagccgugaacaaucuggucgaacucaagagcacacagcagaaaaguguguugaggguuggaacucuguccucugacgaucugcucacguuagcggcugaccuggagaaacuuaaaagcaaggugauucggaccgaacgccccuuguccucaggugucuauaugggcaaccugaguacacagcaacuagagcagagaagggcccuccugaauaugauagggauggugggaggcgcacaggguacucagccugggcgggauggaguaguucgcgugugggacgucaaaaacccagaucuucugaauaaccaauucggcaccaugccgagcuugacacucgccugucugaccaagcagggccagguggacuuaaaugaugcugugcuggcacucacugaccuugggcugaucuacacagccaaguaucccaacucuuccgacuuggaucgacuaucacaaagccauccuauucugaauauggucgacaccaaaaagaguucucucaacaucuccggauacaauuuuagccugggugcugccguuaaagcgggcgcaugcaugcuugaugggggaaacaugcuggagacgauuaaggugacuccacagaccaucgacggcauauugaaaucgauccucaagguaaagaagucucuggguauguucguguccgauacacccggggaaagaaauccuuaugagaacauuuuauacaagaucugucugucaggagacggcuggccauauauugccaguaggacuagcaucgucggccgggcuugggaaaacaccacaguggaucuagaguccgacgggaaaccccagaagguuggaaccgccgguucuaauaaaagccuccagucagcaggcuuuccuacggggcugacuuacagucaacuuaugacauugaaggauuccaugaugcagcuggacccaagcgcuaaaaccuggauagauauugagggacguccggaagaccccguggagaucgcccucuaccagccuaugucuggcugcuauauucacuucuuucgcgaaccaacugaccugaagcaguucaagcaagaugcgaaauacucacaugguaucgacgucguggaucuuuuucccgcccagccugggcugacaagugcaguaaucgaggcuuugccaagaaacaugguucucaccugucagggcagcgacgauauuaagaggcuguuagacucccagggacggcgagauauaaaacugaucgacauugcccuaucuaaggcugauucgcgcagauucgaaaaugccgugugggaccaaugcaaagaucucugucacaugcauacgggcgucguggucgagaagaagaaaaggggagggaaggaggaaaucacaccccacugcgcacugauggacuguauaauguaugaugccgcugugagcgguggccuuaacauuccgguuuugcgggcggugcugccucgcgacaugguauuuagaaccuccucacccaaagucgugcucuga

SEQ ID NO: 8651 - RNA, 1710 nt, Artificial Sequence
  derived and/or modified CDS sequence (opt3) from LASV(Lassa virus/H.sapiens-wt/NGA/2018/ISTH_1079;Clade II)__AVV65108__NP
augagcgccuccaaggaggugaaaucuuuccuguggacccagucacucagaagggaacuuaguggcuacugcagcaacaucaagcugcaagucguuaaagacgcucaggcauuguuacacgggcuggauuuuuccgaggugucuaauguacagcggcuaaugcgcaagcagaaacgagacgauucggaccucaagcgucugagagaucuuaaccaagccgugaauaaccuggucgaauugaagucaacacagcagaaaagcauucucagggugggaacucugacgagugacgaucugcucaccuuagcggcugaccuggagaaacuuaaguccaagguuauacggacagaacgccccuugucuagcgguguguauaugggcaaucuguccacucagcaacuagagcagagaagggcccuccugaacaugaucgggauggucggaggcacccaggguacacagccugggcgggauggagugguacgcguuugggacgugaaaaauccagaucuucugaacaaucaauucggcaccaugccgucauugacucucgcaugucugacaaagcagggccaggucgacuuaaacgaugccgugcuggcucucaccgaccuugggcugauuuacacggcaaaguaucccaauaguagcgacuuggaucgacuaucucaaucccauccuauccugaacaugguggacacuaaaaagucaagccucaauauuaguggauacaacuuuucucugggugccgcugucaaagccggcgcgugcaugcuugaugggggaaauaugcuggagaccaucaagguuacaccacagacuauggacggcauauugaaauccauccucaaggugaaaaagagccuggguauguucguaucggauacccccggggaaagaaacccuuaugagaacauuuuauacaagaucugucugucuggagacggcuggccauauauugcauccaggacaucaaucgugggccgggccugggaaaauaccacggucgaucuagagagugacgggaaaccccagaaggugggaacugcugguagcaacaaaucccuccagucugccggcuuuccuacagggcugaccuacagccaacuuaugacuuugaaggauucaaugaugcagcuggacccaagugcaaaaacauggauagauauugagggacguccggaagaccccguugagaucgcucucuaccagccuauuuccggcugcuauauccacuucuuucgcgaaccaaccgaccugaagcaguucaagcaagaugccaaauacagccaugguaucgacguggcggaucuuuuucccgcccagccugggcugacgucugcagucauugaggcuuugccaagaaauauggugcucaccugucagggcucagacgauauaaagaggcuguuagacagucagggacggcgagauaucaaacugauugacaucagccuauccaaggccgauucucgcagauucgaaaacgcuguaugggaccaaugcaaagaucucugucacaugcauacaggcguuguggucgagaagaagaaaaggggagggaaggaggaaauaacuccccacugcgcccugauggacuguauuauguaugaugcagccgugucggguggccuuaauaucccggucuugcgggcugugcugccucgcgacaugguuuuuagaaccagcucccccaaagugguacucuga

SEQ ID NO: 8652 - RNA, 1710 nt, Artificial Sequence
  derived and/or modified CDS sequence (opt3) from LASV(Lassa virus/H.sapiens-wt/NGA/2018/ISTH_1375;Clade II)__AVV65116__NP
augagcgccuccaaggaggugaaaucuuuccuguggacccagucacucagaagggaacuuaguggcuacugcagcaacaucaagcugcaagucguuaaagacgcucaggcauuguuacacgggcuggauuuuuccgaggugucuaauguacagcggcuaaugcgcaagcagaaacgagacgauucggaccucaagcgucugagagaucuuaaccaagccgugaauaaccuggucgaauugaagucaacacagcagaaaagcauucucagggugggaacucugacgagugacgaucugcucauauuagcggcugaccuggagaaguuaaaauccaagguuauccggaccgaacgccccuugucuagcgguguguauaugggcaaucuguccacacagcaacuagagcagagaagggcccuccugaaccuuauugggauggucggaggcgcacaggguacucagccugggcgggauggagugguacgcguuugggacgugaaaaauccagaucuguugaacaaucaauucggcaccaugccgucacucacacuggccuguuuaaccaagcagggccaggucgaccugaacgaugcugugcucgcacuuacugaccugggguugaucuacacagccaaguaucccaauaguagcgaccuagaucgacugucucaaucccauccuauucucaacaugguggacaccaaaaagucaagccugaauaucaguggauuuaacuucucucuuggugcugccgucaaagcgggcgcaugcaugcuggaugggggaaauauguuggagacgauaagaaucacuccacagaccauggacggcauucucaaguccauccugaaaguuaagaaaagccuugguauguuugugucggauacacccggggaaaggaacccuuacgagaacauucuguauaagaucugucuaucuggagacggcuggccauacauagccucccggacuucaauuguaggccgugcuugggaaaauaccacaguggaucucgagagugacgggaagccccacaaagucggaaccgccgguagcaacaagucccugcagucugcaggcuucccuacggggcuuacuuauagccaguugaugacacugaaagauucaaugaugcaacucgacccaagugcuaagaccuggaucgauauugagggacgcccggaagaccccguggagaucgcccuguaccagccuauguccggcugcuacauccacuuuuucagagaaccaacugaccuuaaacaguuuaagcaggaugcgaaguauagccaugguauugacguugccgaucuguuccccgcacaaccuggguugacaucugcugugauagaggcccucccaaggaauaugguccugaccugucagggcucagacgauaucaaacgguuacuggacagucagggacgacgcgauauuaagcuaaucgacauagcucucagcaaagccgauuccagaagguuugaaaacgcagugugggaccagugcaaggaucugugucauaugcacacgggcguaguuguggagaaaaagaagcgcgggggaaaagaggaaauuacaccccacugcgcccuuauggacuguaucauguacgaugcugcggucucugguggcuugaauaucccggugcugcgggcaguccucccuagagacaugguguucaggaccucgagccccaagguugugcuguga

SEQ ID NO: 8653 - RNA, 1710 nt, Artificial Sequence
  derived and/or modified CDS sequence (opt3) from LASV(Lassa virus/H.sapiens-wt/NGA/2018/ISTH_1381;Clade II)__AVV65112__NP
augagcguguccaaggaggucaaaucuuuccuguggacccagucacucagaagggaacuuaguggcuacugcagcuccaucaagcugcaaguugugaaagacgcccaggcuuuguuacacgggcuggauuuuucugagguaucgaacgugcagcggcuaaugcgcaagcagaaacgagacgauucagaccucaagcgucugagagaucuuaaucaagcagucaacaaucugguggaacuuaagagcacacagcagaaaaguauucucaggguuggaacucugacguccgacgaucugcucaccuuagccgcggaccuggagaaguugaaaucuaaggugauacggacagaacgccccuugagcuccggugucuauaugggcaaccugucaacucagcaacuagagcagagaagggcucuccugaauaugaucgggauggccggaggcgcacaggguacccagccugggcgggauggagugguacgcguuugggacgugaaaaacccagaucuucugaauaaccaauucggcacaaugccgaguuugacccucgccugucugacuaagcagggccaggucgacuuaaaugaugcugugcuggcacucacagaccuugggcugauuuacaccgccaaguaucccaacagcucugacuuggaucgacuaucccaaucacauccuauccugaauaugguggacacgaaaaagagcagucucaacauuucuggauacaauuuuucccugggugcugccgucaaagcgggcgcaugcaugcuugaugggggaaacaugcuggagacuaucaagguuaccccacagacaauggacggcauauugaaaagcauccucaaggugaaaagaucgcuggguauguucguaucugauacucccggggaaaggaauccuuaugagaacauuuuauacaagaucugucuguccggagacggcuggccauauauugccucacggaccaguaucgugggccgugcuugggaaaacacaaccgucgaucuagagagcgacgggaagccccagaaaauaggaaauacggguuccaacaagucucuccagagcgccggcuuuccuacugggcugacauacucacaacuuaugaccuugaaagauaguaugaugcagcuggacccauccgcaaagacuuggauugauaucgagggacgcccggaagaccccguggagauugcucucuaccagccuaugagcggcugcuauauccacuucuuuagagaaccaacagaccugaaacaguucaagcaagaugccaaguacucucaugguaucgacguugcggaucuuuuucccgcccagccugggcugaccucagcagugauugaggcuuugccaaggaauaugguccucacgugucagggcagugacgauauaaaacggcuguuagaaagccagggacgacgcgacaucaagcugauugauaucgcccuauccaaagcugacucuagaagguucgagaacgccgugugggaucaaugcaaggaccucugucacaugcauaccggcguaguuguggagaaaaagaagcgcgggggaaaagaagagauaacaccccacugcgcacugauggauuguauuauguaugacgccgcugucucggguggccuuaauaucccgguguugcgggcgguccugccuagagauaugguguuuaggacuagcucccccaagguugugcucuga

SEQ ID NO: 8654 - RNA, 1710 nt, Artificial Sequence
  derived and/or modified CDS sequence (opt3) from LASV(LASV003-NIG-2008;Clade II)__AIT17581__NP
augagcgccuccaaggaggugaaaucuuuccuguggacccagucacucagaagggaacuuaguggcuacugcagcuccaucaagcugcaagucguuaaagacgcucaggcauuguuacacgggcuggauuuuucugaggugucgaacguacagcggcuaaugcgcaagcagaaacgagacgauucagaccucaagcgucugagagaucuuaaucaagccgugaacaaucuggucgaacuuaagagcacacagcagaaaagugugcucaggguuggaacucugacguccgacgaucugcucaccuuagcggcugaccuggagaaguugaaaucuaaggugauucggacagaacgccccuugagcuccggugucuauaugggcaaccugucagcccagcaacuagagcagagaaggacucuccugaauaugauagggauggugggaggcgcacaggguacccagccugggcgggauggaguaguucgcgugugggacgucaaaaacccagaucuucugaauaaccaauucggcacaaugccgaguuugacccucgccugucugacuaagcagggccagguggacuuaaaugaugugguccuggcucucacagaccuugggcugaucuacaccgcaaaguaucccaacagcucugacuuggaucgacuaucccaaucacauccuauucugagcaugguugacacgaaaaagaguucucucaauaucuccggauacaacuuuagccugggugccgcugugaaagccggcgcgugcaugcuugaugggggaaauaugcuggagacuauuaagguaaccccacagacaauggacggcaucuugaaaucgauacucaaggugaaaaagucucuggguauguucgucuccgauacucccggggaaagaaacccuuaugagaauaucuuauacaagauuugucugucaggagacggcuggccauauaucgcaaguaggaccagcauugugggccgggccugggaaaacacaaccguugaucuagaguccgacgggaaaccccagaaggugggaacggcugguucuaacaaaagccuccagucagccggcuuuccuacugggcugacauacagucaacuuaugaccuugaaggauuccaugaugcagcuggacccaagcgcaaaaacuuggaucgauauagagggacguccggaagaccccgucgagauugcucucuaccagccuaugucuggcugcuauauccacuucuuucgcgaaccaacagaccugaagcaguucaagcaagaugccaaauacucacaugguauugacgugaccgaucuuuuucccgcgcagccugggcugacgagugccguaaucgaggcauugccaagaaauaugguucucaccugucagggcagcgacgauaucaagaggcuguuagacucccagggacggcgagauauuaaacugauagacaucgcucuaucuaaggccgauucgcgcagauucgaaaacgcugugugggaccaaugcaaagaucucugucacaugcauacaggcgucguggucgagaagaagaaaaggggagggaaggaggaaauuacuccccacugcgcccugauggacuguaucauguaugaugcagccgugagcgguggccuuaauauaccgguuuugcgggcugugcugccucgcgacaugguauuuagaaccuccucacccaaagucgugcucuga

SEQ ID NO: 8655 - RNA, 1710 nt, Artificial Sequence
  derived and/or modified CDS sequence (opt3) from LASV(LASV035-NIG-2009;Clade II)__AIT17589__NP
augagcgccuccaaggaggugaaaucuuuccuguggacccagucacucagaagggaacuuaguggcuacugcagcuccaucaagcugcaagucguuaaagacgcucaggcauuguuacacgggcuggauuuuucugaggugucgaacguacagcggcuaaugcgcaagcagaaacgagacgauucagaccucaagcgucugagagaucuuaaucaagccgugaacaaucuggucgaacuuaagagcacacagcagaaaaguauucucagggugggaacucugacguccgacgaucugcucaccuuagcggcugaccuggagaaguugaaaucuaagguuauacggacagaacgccccuugagcuccgguguguauaugggcaaccugucagcccagcaacuagagcagagaagggcacuccugaauaugaucgggauggucggaggcgcccaggguacucagccugggcgggauggagugguacgcguuugggacgugaaaaacccagaucuucugaauaaccaauucggcaccaugccgaguuugacacucgcuugucugaccaagcagggccaggucgacuuaaaugaugcagugcuggcccucacugaccuugggcugauuuacacagcuaaguaucccaacagcucugacuuggaucgacuaucccaaucacauccuauccugaauaugguggacaccaaaaagagcagucucaacauuucuggauacaauuuuucccugggugccgcggucaaagcaggcgccugcaugcuugaugggggaaacaugcuggagacgaucaagguuacuccacagaccauggacggcauauugaaaagcauccucaaggugaaaagaucgcuggguauguucguaucugauacacccggggaaaggaauccuuaugagaacauuuuauacaagaucugucuguccggagacggcuggccauauauugcuucacggaccaguaucgugggccgugccugggaaaacacuacagucgaucuagagagcgacgggaagccccagaaagugggaaccacggguuccaauaagucucuccagagcgcaggcuuuccuacugggcugacauacucacaacuuaugaccuugaaagauaguaugaugcagcuggacccauccgcuaagacuuggauagauauugagggacgcccggaagaccccguugagaucgcccucuaccagccuaugagcggcugcuauauucacuucuuuagagaaccaacagaccugaaacaguucaagcaagaugcgaaguacucucaugguaucgacguggccgaucuuuuucccgcacagccugggcugaccucagcugucaucgaggccuugccaaggaacauggugcucacgugucagggcagugacgauauuaaaaagcuguuagacagccagggacggcgagauauaaaacugaucgacauugcucuauccaaggccgauucucgcaaauucgaaaaugcaguaugggaccaaugcaaggaucucugucacaugcauaccggcguuguggucgagaagaaaaagagagggggaaaagaggaaaucacaccccacugcgcccugauggacuguauaauguaugaugcugcggugucggguggccuuaacauuccggucuugagggcagugcugccucgggacaugguuuuucgcacuagcucccccaaggugguacucuga
